United States Patent Application Publication US 2011/0183924 A1 - sequence listing, part 26

SEQ ID NO: 61864 - DNA, 3912 bp, Homo sapiens
cgccgccgtgggtgccgggtccgcgcgcaccccaacacccccaccagctgggcctcggggcacatctccagacttcaatttggctgaaataattcatgccacggacctgtgcacatgcctggaattgagagacacagttaaaagactccaagttgctttctgccttttgaaaactcctgaaaaccatccctctggactctggaattctacacagctcaaccaagactttgcttgaatgtttacattttctgctcgctgtcctacatatcacaatatagtgttcacgttttgttaaaactttggggtgtcaggagttgagcttgctcagcaagccagcatggctaggatgagctttgttatagcagcttgccaattggtgctgggcctactaatgacttcattaaccgagtcttccatacagaatagtgagtgtccacaactttgcgtatgtgaaattcgtccctggtttaccccacagtcaacttacagagaagccaccactgttgattgcaatgacctccgcttaacaaggattcccagtaacctctctagtgacacacaagtgcttctcttacagagcaataacatcgcgaagactgtggatgagctgcagcagcttttcaacttgactgaactagatttctcccaaaacaactttactaacattaaggaggtcgggctggcaaacctaacccagctcacaacgctgcatttggaggaaaatcagattaccgagatgactgattactgtctacaagacctcagcaaccttcaagaactctacatcaaccacaaccaaattagcactatttctgctcatgcttttgcaggcttaaaaaatctattaaggctccacctgaactccaacaaattgaaagttattgatagtcgctggtttgattctacacccaacctggaaattctcatgatcggagaaaaccctgtgattggaattctggatatgaacttcaaacccctcgcaaatttgagaagcttagttttggcaggaatgtatctcactgatattcctggaaatgctttggtgggtctggatagccttgagagcctgtctttttatgataacaaactggttaaagtccctcaacttgccctgcaaaaagttccaaatttgaaattcttagacctcaacaaaaaccccattcacaaaatccaagaaggggacttcaaaaatatgcttcggttaaaagaactgggaatcaacaatatgggcgagctcgtttctgtcgaccgctatgccctggataacttgcctgaactcacaaagctggaagccaccaataaccctaaactctcttacatccaccgcttggctttccgaagtgtccctgctctggaaagcttgatgctgaacaacaatgccttgaatgccatttaccaaaagacagtcgaatccctccccaatctgcgtgagatcagtatccatagcaatcccctcaggtgtgactgtgtgatccactggattaactccaacaaaaccaacatccgcttcatggagcccctgtccatgttctgtgccatgccgcccgaatataaagggcaccaggtgaaggaagttttaatccaggattcgagtgaacagtgcctcccaatgatatctcacgacagcttcccaaatcgtttaaacgtggatatcggcacgacggttttcctagactgtcgagccatggctgagccagaacctgaaatttactgggtcactcccattggaaataagataactgtggaaaccctttcagataaatacaagctaagtagcgaaggtaccttggaaatatctaacatacaaattgaagactcaggaagatacacatgtgttgcccagaatgtccaaggggcagacactcgggtggcaacaattaaggttaacgggacccttctggatggtacccaggtgctaaaaatatacgtcaagcagacagaatcccattccatcttagtgtcctggaaagttaattccaatgtcatgacgtcaaacttaaaatggtcgtctgccaccatgaagattgataaccctcacataacatatactgccagggtcccagtcgatgtccatgaatacaacctaacgcatctgcagccttccacagattatgaagtgtgtctcacagtgtccaatattcatcagcagactcaaaagtcatgcgtaaatgtcacaaccaaaaatgccgccttcgcagtggacatctctgatcaagaaaccagtacagcccttgctgcagtaatggggtctatgtttgccgtcattagccttgcgtccattgctgtgtactttgccaaaagatttaagagaaaaaactaccaccactcattaaaaaagtatatgcaaaaaacctcttcaatcccactaaatgagctgtacccaccactcattaacctctgggaaggtgacagcgagaaagacaaagatggttctgcagacaccaagccaacccaggtcgacacatccagaagctattacatgtggtaactcagaggatattttgcttctggtagtaaggagcacaaagacgtttttgctttattctgcaaaagtgaacaagttgaagacttttgtatttttgactttgctagtttgtggcagagtggagaggacgggtggatatttcaaatttttttagtatagcgtatcgcaagggtttgacacggctgccagcgactctaggcttccagtctgtgtttggtttttattcttatcattattatgattgttattatattattattttattttagttgttgtgctaaactcaataatgctgttctaactacagtgctcaataaaatgattaatgacaggatggggttcccctgtgcttttaccagtagcatgaccccttctgaagccatccgtagaaagtactttgtcctccaaaaagctaacatacggttttgaagcagcattgaaacttttgtagcaatctggtctatagacttttaactcaagaagctaaggctagacttgttaccttcgttgaatgatgttagttgactgtactgtaatgttgtatcaactgaattgaatgtttgcctttaaacaatgaattttctttttctttcctttttttttttttgttgtaatagttaaagaggcttagaacaagctaacaggcaatagaaatatgtatatcagattttttaatgtaacaaactacatgttaattgttatcttattctttttatctttagtagacacttttaaaagaaaagacaattttgttgtgtttaactcaccaacacgtggtgtataatgaagacagaactataataaattagttttgttctgattttttagaacacttgcaataatgtatcatttatagttcttgctagttgcagtggtaatatttttcacatccataaaaacaactaccaaaataaatcagctgtagcatgttgctttttaaagctaggccctaaaaggttttaattctttttctaagggaagaaatgtctattttaattaagatattttaatgaacaggatttctgtattttaaatagtactgactagcacctaatgggcagtgggagggtggttcatatgaagaaaaaaaaggtgtattgttgtatcccatgcataaataaaggtaaatatatatatacaccaatatattcatatatactcacacacatcccaacctgtcacacacaatgcgtgtgtatatatatatgaatatattggatatgtcatttctgtaagagttttgttaaaacctgattttcttttgtagtatccacattcttcatcaaagtacaaaaacgtctgtggagtgtcacaaactgtatgacatgttatttctttttaacagttgtctatatgcttagacccgtgttagtctctatatctgtgtggcaatatctgctgagacaagtaaatgattaatagaaaac

SEQ ID NO: 61865 - DNA, 490 bp, Homo sapiens
gcaaggctggcctcgaactcctgacctcaagtgatccaaccgcctcaacctcctaaaatgctgggattacaagagtgaggcacagtgcctggccgcaaaaatgttttttttaaatattcaaaaatagccatggcttgcagttgctataaagctatatagtaactccttcactgggcacaacagaagaaataggaaagagagaaagtgctgctccagaggttcaaaggtgaagatagagcagtgtagtggtggggatttatgtttcctaatctcccttgtcagcccagcatgtcttcagtataaatacacacgtggcagtggcctatgcactcattcacacttcagggaagcccatggtttccttttctcctccattttagcagtgggcagcctgcaaccttttgatcaagctgactttgtatgttacatgactgaactcagctatgccagacatccttaaggaagttgacatttgtgtactttgaaagaa

SEQ ID NO: 61866 - DNA, 268 bp, Homo sapiens
tttgaaagtaaaggaggatcctgtttaagtagattagggtctggcaggccatttaactttatcaggcatctaaagccgaggatgtacactgtagccggctgtgagttgccaattagctgggctttccccactgtttctggtttggcagggatgaggtggttcaccctgccgcactactgcctgccaaggacacatggccagctcccggcttcctgtcttcctctttgtgtcctggccttgccttccagggagctgccagaacacaatt

SEQ ID NO: 61867 - DNA, 316 bp, Homo sapiens
acaccacacttaaggaatgggagttatatttcacttccctgaggccagaatatatatatgtatatatgtatatgtgtgtgtgtgtctatatatatatatatatagacacacacgcacattatacacacatatatatacacacacatatatatatgtgtgtgtacaatatataaataatttagggagaaaagacaaatctcccatgcagaaggattccaaataatttttttgtgtgtaacatatatgtgtgtgtatatatatatgcacacatatttatgtgtatatatgtatatatatatctgtatatacaagtata

SEQ ID NO: 61868 - DNA, 504 bp, Homo sapiens
cattttgagttgattttttataaaaggagagacttaggttgtggttctttttctgttggcatcgttatcaatgtccaattgcacctgcaccatttgttgttggttgaaaaggctgccctttgttaacttgcttttgcacttttgtcaaaaacaattggacatatttgtgttggtctttctttaatttttgatatttatatttaatgaaaatataaaaccttgcaatttctcattctctatgaatagatgatagatatcaatttagttaagctctttatttcaaggagagcatcagccatggtacgagctcttttttcaaaaaggcaatgggaagagttactttcccgtgagcgccttctcactaggtagagctggataaaggtggtaacaatttattcaccctcaaaagacttgggttgtgggaggcagagcttgcagtgagccgagatcgcgccactgcactccagtctaggcaacagagcaagactccatttcaaaagaaaa

SEQ ID NO: 61869 - DNA, 5181 bp, Homo sapiens
gtgtgtgcgcgcgtgaggggggcagcagagaggagtctcccggtgccgccgcggcgtcagagacactgcgagcggcgagcgcggtggggccgcatctgcatcagccgccgcagccgctgcggggccgcgaacaaagaggaggagccgaggcgcgagagcaaagtctgaaatggatgttacatgagtcattttaagggatgcacacaactatgaacatttctgaagattttttctcagtaaagtagataaagatggatgaatcagccttgttggatcttttggagtgtccggtgtgtctagagcgccttgatgcttctgcgaaggtcttgccttgccagcatacgttttgcaagcgatgtttgctggggatcgtaggttctcgaaatgaactcagatgtcccgagtgcaggactcttgttggctcgggtgtcgaggagcttcccagtaacatcttgctggtcagacttctggatggcatcaaacagaggccttggaaacctggtcctggtgggggaagtgggaccaactgcacaaatgcattaaggtctcagagcagcactgtggctaattgtagctcaaaagatctgcagagctcccagggcggacagcagcctcgggtgcaatcctggagccccccagtgaggggtatacctcagttaccatgtgccaaagcattatacaactatgaaggaaaagagcctggagaccttaaattcagcaaaggtgacatcatcattttgcgaagacaagtggatgaaaattggtaccatggggaagtcaatggaatccatggctttttccccaccaactttgtgcagattattaaaccgttacctcagcccccacctcagtgcaaagcactttatgactttgaagtgaaagacaaggaagcagacaaagattgccttccatttgcaaaggatgatgttctgactgtgatccgaagagtggatgaaaactgggctgaaggaatgctggcagacaaaataggaatatttccaatttcatatgttgagtttaactcggctgctaagcagctgatagaatgggataagcctcctgtgccaggagttgatgctggagaatgttcctcggcagcagcccagagcagcactgccccaaagcactccgacaccaagaagaacaccaaaaagcggcactccttcacttccctcactatggccaacaagtcctcccaggcatcccagaaccgccactccatggagatcagcccccctgtcctcatcagctccagcaaccccactgctgctgcacggatcagcgagctgtctgggctctcctgcagtgccccttctcaggttcatataagtaccaccgggttaattgtgaccccgcccccaagcagcccagtgacaactggcccctcgtttactttcccatcagatgttccctaccaagctgcccttggaactttgaatcctcctcttccaccaccccctctcctggctgccactgtccttgcctccacaccaccaggcgccaccgccgctgctgctgctgctggaatgggaccgaggcccatggcaggatccactgaccagattgcacatttacggccgcagactcgccccagtgtgtatgttgctatatatccatacactcctcggaaagaggatgaactagagctgagaaaaggggagatgtttttagtgtttgagcgctgccaggatggctggttcaaagggacatccatgcataccagcaagataggggttttccctggcaattatgtggcaccagtcacaagggcggtgacaaatgcttcccaagctaaagtccctatgtctacagctggccagacaagtcggggagtgaccatggtcagtccttccacggcaggagggcctgcccagaagctccagggaaatggcgtggctgggagtcccagtgttgtccccgcagctgtggtatcagcagctcacatccagacaagtcctcaggctaaggtcttgttgcacatgacggggcaaatgacagtcaaccaggcccgcaatgctgtgaggacagttgcagcgcacaaccaggaacgccccacggcagcagtgacacccatccaggtacagaatgccgccggcctcagccctgcatctgtgggcctgtcccatcactcgctggcctccccacaacctgcgcctctgatgccaggctcagccacgcacactgctgccatcagtatcagtcgagccagtgcccctctggcctgtgcagcagctgctccactgacttccccaagcatcaccagtgcttctctggaggctgagcccagtggccggatagtgaccgttctccctggactccccacatctcctgacagtgcttcatcagcttgtgggaacagttcagcaaccaaaccagacaaggatagcaaaaaagaaaaaaagggtttgttgaagttgctttctggcgcctccactaaacggaagccccgcgtgtctcctccagcatcgcccaccctagaagtggagctgggcagtgcagagcttcctctccagggagcggtggggcccgaactgccaccaggaggtggccatggcagggcaggctcctgccctgtggacggggacggaccggtcacgactgcagtggcaggagcagccctggcccaggatgcttttcataggaaggcaagttccctggactccgcagttcccatcgctccacctcctcgccaggcctgttcctccctgggtcctgtcttgaatgagtctagacctgtcgtttgtgaaaggcacagggtggtggtttcctatcctcctcagagtgaggcagaacttgaacttaaagaaggagatattgtgtttgttcataaaaaacgagaggatggctggttcaaaggcacattacaacgtaatgggaaaactggccttttcccaggaagctttgtggaaaacatatgaggagactgacactgaagaagcttaaaatcacttcacacaacaaagtagcacaaagcagtttaacagaaagagcacatttgtggacttccagatggtcaggagatgagcaaaggattggtatgtgactctgatgccccagcacagttaccccagcgagcagagtgaagaagatgtttgtgtgggttttgttagtctggattcggatgtataaggtgtgccttgtactgtctgatttactacacagagaaacttttttttttttttaagatatatgactaaaatggacaattgtttacaaggcttaactaatttatttgcttttttaaacttgaacttttcgtataatagatacgttctttggattatgattttaagaaattattaatttatgaaatgataggtaaggagaagctggattatctcctgttgagagcaagagattcgttttgacatagagtgaatgcattttcccctctcctcctccctgctaccattatattttggggttatgttttgcttctttaagatagaaatcccagttctctaatttggttttcttctttgggaaaccaaacatacaaatgaatcagtatcaattagggcctggggtagagagacagaaacttgagagaagagaagttagtgattccctctctttctagtttggtaggaatcaccctgaagacctagtcctcaatttaattgtgtgggtttttaattttcctagaatgaagtgactgaaacaatgagaaagaatacagcacaacccttgaacaaaatgtatttagaaatatatttagttttatagcagaagcagctcaattgtttggttggaaagtaggggaaattgaagttgtagtcactgtctgagaatggctatgaagcgtcatttcacattttaccccaactgacctgcatgcccaggacacaagtaaaacatttgtgagatagtggtggtaagtgatgcactcgtgttaagtcaaaggctataagaaacactgtgaaaagttcatattcatccattgtgattctttccccacgtcttgcatgtattactggattcccacagtaatatagactgtgcatggtgtgtatatttcattgcgatttcctgttaagatgagtttgtactcagaattgaccaattcaggaggtgtaaaaataaacagtgttctcttctctaccccaaagccactactgaccaaggtctcttcagtgcactcgctccctctctggctaaggcatgcattagccactacacaagtcattagtgaaagtggtcttttatgtcctcccagcagacagacatcaaggatgagttaaccaggagactactcctgtgactgtggagctctggaaggcttggtgggagtgaatttgcccacaccttacaattgtggcaggatccagaagagcctgtctttttatatccattccttgatgtcattggcctctcccaccgatttcattacggtgccacgcagtcatggatctgggtagtccggaaaacaaaaggagggaagacagcctggtaatgaataagatccttaccacagttttctcatgggaaatacataataaaccctttcatctttttttttttcctttaagaattaaaactgggaaatagaaacatgaactgaaaagtcttgcaatgacaagaggtttcatggtcttaaaaagatactttatgtggttgaagatgaaatcattcctaaattaacctttttttaaaaaaaaaacaatgtatattatgttcctgtgtgttgaatttaaaaaaaaaaatactttacttggatattcatgtaatatataaaggtttggtgaaatgaactttagttaggaaaaagctggcatcagctttcatctgtgtaagttgacaccaatgtgtcataatattctttattttgggaaattagtgtattttataaaaattttaaaaagaaaaaagactactacaggttaagataatttttttacctgtcttttctccatattttaagctatgtgatttgaagtacctctgttcatagtttcctggtataaagttggttaaaatttcatctgttaatagatcattaggtaatataatgtatgggttttctattggttttttgcagacagtagagggagattttgtaacaagggcttgttacacagtgatatggtaatgataaaattgcaatttatcactccttttcatgttaataatttgaggactggataaaaggtttcaagattaaaatttgatgttcaaaccttt

SEQ ID NO: 61870 - DNA, 3936 bp, Homo sapiens
ataggctagtacgaggccgggttgaatcggccgagggcgagctgtctgggttctcctgcagtgccccttctcaggttcatataagtaccaccgggttaattgtgaccccgcccccaagcagcccagtgacaactggcccctcgtttactttcccatcagatgttccctaccaagctgcccttggaactttgaatcctcctcttccaccaccccctctcctggctgccactgtccttgcctccacaccaccaggcgccaccgccgctgctgctgctgctggaatgggaccgaggcccatggcaggatccactgaccagattgcacatttacggccgcagactcgccccagtgtgtatgttgctatatatccatacactcctcggaaagaggatgaactagagctgagaaaaggggagatgtttttagtgtttgagcgctgccaggatggctggttcaaagggacatccatgcataccagcaagataggggttttccctggcaattatgtggcaccagtcacaagggcggtgacaaatgcttcccaagctaaagtccctatgtctacagctggccagacaagtcggggagtgaccatggtcagtccttccacggcaggagggcctgcccagaagctccagggaaatggcgtggctgggagtcccagtgttgtccccgcagctgtggtatcagcagctcacatccagacaagtcctcaggctaaggtcttgttgcacatgacggggcaaatgacagtcaaccaggcccgcaatgctgtgaggacagttgcagcgcacaaccaggaacgccccacggcagcagtgacacccatccaggtacagaatgccgccggcctcagccctgcatctgtgggcctgtcccatcactcgctggcctccccacaacctgcgcctctgatgccaggctcagccacgcacactgctgccatcagtatcagtcgagccagtgcccctctggcctgtgcagcagctgctccactgacttccccaagcatcaccagtgcttctctggaggctgagcccagtggccggatagtgaccgttctccctggactccccacatctcctgacagtgcttcatcagcttgtgggaacagttcagcaaccaaaccagacaaggatagcaaaaaagaaaaaaagggtttgttgaagttgctttctggcgcctccactaaacggaagccccgcgtgtctcctccagcatcgcccaccctagaagtggagctgggcagtgcagagcttcctctccagggagcggtggggcccgaactgccaccaggaggtggccatggcagggcaggctcctgccctgtggacggggacggaccggtcacgactgcagtggcaggagcagccctggcccaggatgcttttcataggaaggcaagttccctggactccgcagttcccatcgctccacctcctcgccaggcctgttcctccctgggtcctgtcttgaatgagtctagacctgtcgtttgtgaaaggcacagggtggtggtttcctatcctcctcagagtgaggcagaacttgaacttaaagaaggagatattgtgtttgttcataaaaaacgagaggatggctggttcaaaggcacattacaacgtaatgggaaaactggccttttcccaggaagctttgtggaaaacatatgaggagactgacactgaagaagcttaaaatcacttcacacaacaaagtagcacaaagcagtttaacagaaagagcacatttgtggacttccagatggtcaggagatgagcaaaggattggtatgtgactctgatgccccagcacagttaccccagcgagcagagtgaagaagatgtttgtgtgggttttgttagtctggattcggatgtataaggtgtgccttgtactgtctgatttactacacagagaaacttttttttttttttaagatatatgactaaaatggacaattgtttacaaggcttaactaatttatttgcttttttaaacttgaacttttcgtataatagatacgttctttggattatgattttaagaaattattaatttatgaaatgataggtaaggagaagctggattatctcctgttgagagcaagagattcgttttgacatagagtgaatgcattttcccctctcctcctccctgctaccattatattttggggttatgttttgcttctttaagatagaaatcccagttctctaatttggttttcttctttgggaaaccaaacatacaaatgaatcagtatcaattagggcctggggtagagagacagaaacttgagagaagagaagttagtgattccctctctttctagtttggtaggaatcaccctgaagacctagtcctcaatttaattgtgtgggtttttaattttcctagaatgaagtgactgaaacaatgagaaagaatacagcacaacccttgaacaaaatgtatttagaaatatatttagttttatagcagaagcagctcaattgtttggttggaaagtaggggaaattgaagttgtagtcactgtctgagaatggctatgaagcgtcatttcacattttaccccaactgacctgcatgcccaggacacaagtaaaacatttgtgagatagtggtggtaagtgatgcactcgtgttaagtcaaaggctataagaaacactgtgaaaagttcatattcatccattgtgattctttccccacgtcttgcatgtattactggattcccacagtaatatagactgtgcatggtgtgtatatttcattgcgatttcctgttaagatgagtttgtactcagaattgaccaattcaggaggtgtaaaaataaacagtgttctcttctctaccccaaagccactactgaccaaggtctcttcagtgcactcgctccctctctggctaaggcatgcattagccactacacaagtcattagtgaaagtggtcttttatgtcctcccagcagacagacatcaaggatgagttaaccaggagactactcctgtgactgtggagctctggaaggcttggtgggagtgaatttgcccacaccttacaattgtggcaggatccagaagagcctgtctttttatatccattccttgatgtcattggcctctcccaccgatttcattacggtgccacgcagtcatggatctgggtagtccggaaaacaaaaggagggaagacagcctggtaatgaataagatccttaccacagttttctcatgggaaatacataataaaccctttcatctttttttttttcctttaagaattaaaactgggaaatagaaacatgaactgaaaagtcttgcaatgacaagaggtttcatggtcttaaaaagatactttatgtggttgaagatgaaatcattcctaaattaacctttttttaaaaaaaaaacaatgtatattatgttcctgtgtgttgaatttaaaaaaaaaaatactttacttggatattcatgtaatatataaaggtttggtgaaatgaactttagttaggaaaaagctggcatcagctttcatctgtgtaagttgacaccaatgtgtcataatattctttattttgggaaattagtgtattttataaaaattttaaaaagaaaaaagactactacaggttaagataatttttttacctgtcttttctccatattttaagctatgtgatttgaagtacctctgttcatagtttcctggtataaagttggttaaaatttcatctgttaatagatcattaggtaatataatgtatgggttttctattggttttttgcagacagtagagggagattttgtaacaagggcttgttacacagtgatatggtaatgataaaattgcaatttatcactccttttcatgttaataatttgaggactggataaaaggtttcaagattaaaatttgatgttcaaaccttt

SEQ ID NO: 61871 - DNA, 4235 bp, Homo sapiens
gtgtgtgcgcgcgtgaggggggcagcagagaggagtctcccggtgccgccgcggcgtcagagacactgcgagcggcgagcgcggtggggccgcatctgcatcagccgccgcagccgctgcggggccgcgaacaaagaggaggagccgaggcgcgagagcaaagtctgaaatggatgttacatgagtcattttaagggatgcacacaactatgaacatttctgaagattttttctcagtaaagtagataaagatggatgaatcagccttgttggatcttttggagtgtccggtgtgtctagagcgccttgatgcttctgcgaaggtcttgccttgccagcatacgttttgcaagcgatgtttgctggggatcgtaggttctcgaaatgaactcagatgtcccgagtgcaggactcttgttggctcgggtgtcgaggagcttcccagtaacatcttgctggtcagacttctggatggcatcaaacagaggccttggaaacctggtcctggtgggggaagtgggaccaactgcacaaatgcattaaggtctcagagcagcactgtggctaattgtagctcaaaagatctgcagagctcccagggcggacagcagcctcgggtgcaatcctggagccccccagtgaggggtatacctcagttaccatgtgccaaagcattatacaactatgaaggaaaagagcctggagaccttaaattcagcaaaggtgacatcatcattttgcgaagacaagtggatgaaaattggtaccatggggaagtcaatggaatccatggctttttccccaccaactttgtgcagattattaaaccgttacctcagcccccacctcagtgcaaagcactttatgactttgaagtgaaagacaaggaagcagacaaagattgccttccatttgcaaaggatgatgttctgactgtgatccgaagagtggatgaaaactgggctgaaggaatgctggcagacaaaataggaatatttccaatttcatatgttgagtttaactcggctgctaagcagctgatagaatgggataagcctcctgtgccaggagttgatgctggagaatgttcctcggcagcagcccagagcagcactgccccaaagcactccgacaccaagaagaacaccaaaaagcggcactccttcacttccctcactatggccaacaagtcctcccaggcatcccagaaccgccactccatggagatcagcccccctgtcctcatcatatcagtcgagccagtgcccctctggcctgtgcagcagctgctccactgacttccccaagcatcaccagtgcttctctggaggctgagcccagtggccggatagtgaccgttctccctggactccccacatctcctgacagtgcttcatcagcttgtgggaacagttcagcaaccaaaccagacaaggatagcaaaaaagaaaaaaagggtttgttgaagttgctttctggcgcctccactaaacggaagccccgcgtgtctcctccagcatcgcccaccctagaagtggagctgggcagtgcagagcttcctctccagggagcggtggggcccgaactgccaccaggaggtggccatggcagggcaggctcctgccctgtggacggggacggaccggtcacgactgcagtggcaggagcagccctggcccaggatgcttttcataggaaggcaagttccctggactccgcagttcccatcgctccacctcctcgccaggcctgttcctccctgggtcctgtcttgaatgagtctagacctgtcgtttgtgaaaggcacagggtggtggtttcctatcctcctcagagtgaggcagaacttgaacttaaagaaggagatattgtgtttgttcataaaaaacgagaggatggctggttcaaaggcacattacaacgtaatgggaaaactggccttttcccaggaagctttgtggaaaacatatgaggagactgacactgaagaagcttaaaatcacttcacacaacaaagtagcacaaagcagtttaacagaaagagcacatttgtggacttccagatggtcaggagatgagcaaaggattggtatgtgactctgatgccccagcacagttaccccagcgagcagagtgaagaagatgtttgtgtgggttttgttagtctggattcggatgtataaggtgtgccttgtactgtctgatttactacacagagaaacttttttttttttttaagatatatgactaaaatggacaattgtttacaaggcttaactaatttatttgcttttttaaacttgaacttttcgtataatagatacgttctttggattatgattttaagaaattattaatttatgaaatgataggtaaggagaagctggattatctcctgttgagagcaagagattcgttttgacatagagtgaatgcattttcccctctcctcctccctgctaccattatattttggggttatgttttgcttctttaagatagaaatcccagttctctaatttggttttcttctttgggaaaccaaacatacaaatgaatcagtatcaattagggcctggggtagagagacagaaacttgagagaagagaagttagtgattccctctctttctagtttggtaggaatcaccctgaagacctagtcctcaatttaattgtgtgggtttttaattttcctagaatgaagtgactgaaacaatgagaaagaatacagcacaacccttgaacaaaatgtatttagaaatatatttagttttatagcagaagcagctcaattgtttggttggaaagtaggggaaattgaagttgtagtcactgtctgagaatggctatgaagcgtcatttcacattttaccccaactgacctgcatgcccaggacacaagtaaaacatttgtgagatagtggtggtaagtgatgcactcgtgttaagtcaaaggctataagaaacactgtgaaaagttcatattcatccattgtgattctttccccacgtcttgcatgtattactggattcccacagtaatatagactgtgcatggtgtgtatatttcattgcgatttcctgttaagatgagtttgtactcagaattgaccaattcaggaggtgtaaaaataaacagtgttctcttctctaccccaaagccactactgaccaaggtctcttcagtgcactcgctccctctctggctaaggcatgcattagccactacacaagtcattagtgaaagtggtcttttatgtcctcccagcagacagacatcaaggatgagttaaccaggagactactcctgtgactgtggagctctggaaggcttggtgggagtgaatttgcccacaccttacaattgtggcaggatccagaagagcctgtctttttatatccattccttgatgtcattggcctctcccaccgatttcattacggtgccacgcagtcatggatctgggtagtccggaaaacaaaaggagggaagacagcctggtaatgaataagatccttaccacagttttctcatgggaaatacataataaaccctttcatctttttttttttcctttaagaattaaaactgggaaatagaaacatgaactgaaaagtcttgcaatgacaagaggtttcatggtcttaaaaagatactttatgtggttgaagatgaaatcattcctaaattaacctttttttaaaaaaaaaacaatgtatattatgttcctgtgtgttgaatttaaaaaaaaaaatactttacttggatattcatgtaatatataaaggtttggtgaaatgaactttagttaggaaaaagctggcatcagctttcatctgtgtaagttgacaccaatgtgtcataatattctttattttgggaaattagtgtattttataaaaattttaaaaagaaaaaagactactacaggttaagataatttttttacctgtcttttctccatattttaagctatgtgatttgaagtacctctgttcatagtttcctggtataaagttggttaaaatttcatctgttaatagatcattaggtaatataatgtatgggttttctattggttttttgcagacagtagagggagattttgtaacaagggcttgttacacagtgatatggtaatgataaaattgcaatttatcactccttttcatgttaataatttgaggactggataaaaggtttcaagattaaaatttgatgttcaaaccttt

SEQ ID NO: 61872 - DNA, 1184 bp, Homo sapiens
ttctagacctgtcgttaggagtgcgtactcagaatggaactgaacatggatctttgctgttacctagtgtactcctgctcttgcctagtgcttgtatttgtccacggatattacattaaaggcgccggtcgctccctatctggtctgaacaatgtcctgatgcagtactgaggtcattagtgaatctgttcatattagagtagtcctcccggagctcgagatctcatgtgaactgcacgctgacctgggagactactcctgtgactgtggagctctggaaggcttggtgggagtgaatttgcccacaccttacaattgtggcaggatccagaagagcctgtctttttatatccattccttgatgtcattggcctctcccaccgatttcattacggtgccacgcagtcatggatctgggtagtccggaaaacaaaaggagggaagacagcctggtaatgaataagatccttaccacagttttctcatgggaaatacataataaaccctttcatctttttttttttcctttaagaattaaaactgggaaatagaaacatgaactgaaaagtcttgcaatgacaagaggtttcatggtcttaaaaagatactttatgtggttgaagatgaaatcattcctaaattaacctttttttaaaaaaaaaacaatgtatattatgttcctgtgtgttgaatttaaaaaaaaaaatactttacttggatattcatgtaatatataaaggtttggtgaaatgaactttagttaggaaaaagctggcatcagctttcatctgtgtaagttgacaccaatgtgtcataatattctttattttgggaaattagtgtattttataaaaattttaaaaagaaaaaagactactacaggttaagataatttttttacctgtcttttctccatattttaagctatgtgatttgaagtacctctgttcatagtttcctggtataaagttggttaaaatttcatctgttaatagatcattaggtaatataatgtatgggttttctattggttttttgcagacagtagagggagattttgtaacaagggcttgttacacagtgatatggtaatgataaaattgcaatttatcactccttttcatgttaataatttgaggactggataaaaggtttcaagattaaaatttgatgttcaaaccttt

SEQ ID NO: 61873 - DNA, 272 bp, Homo sapiens
taagtgcttttaggccaccgtccatcccatctttattgtaataaatacaatagcagcctttcatcatggtctgatgcagtgaaatgactcatgttttggtgagcagcatctattagatagttgaattttgctgtgttccctcttcccatctactagttgcagcgcacaaccaggaacgccccacggcagcagtgacacccatccaggtacagaatgccgccggcctcagccctgcatctgtgggcctgtcccatcactcgctggcctcccca

SEQ ID NO: 61874 - DNA, 4167 bp, Homo sapiens
tggggtgatctagaggatcccacagaggtgaatgggataagcctcctgtgccaggagttgatgctggagaatgttcctcggcagcagcccagagcagcactgccccaaagcactccgacaccaagaagaacaccaaaaagcggcactccttcacttccctcactatggccaacaagtcctcccaggcatcccagaaccgccactccatggagatcagcccccctgtcctcatcagctccagcaaccccactgctgctgcacggatcagcgagctgtctgggctctcctgcagtgccccttctcaggttcatataagtaccaccgggttaattgtgaccccgcccccaagcagcccagtgacaactggcccctcgtttactttcccatcagatgttccctaccaagctgcccttggaactttgaatcctcctcttccaccaccccctctcctggctgccactgtccttgcctccacaccaccaggcgccaccgccgctgctgctgctgctggaatgggaccgaggcccatggcaggatccactgaccagattgcacatttacggccgcagactcgccccagtgtgtatgttgctatatatccatacactcctcggaaagaggatgaactagagctgagaaaaggggagatgtttttagtgtttgagcgctgccaggatggctggttcaaagggacatccatgcataccagcaagataggggttttccctggcaattatgtggcaccagtcacaagggcggtgacaaatgcttcccaagctaaagtccctatgtctacagctggccagacaagtcggggagtgaccatggtcagtccttccacggcaggagggcctgcccagaagctccagggaaatggcgtggctgggagtcccagtgttgtccccgcagctgtggtatcagcagctcacatccagacaagtcctcaggctaaggtcttgttgcacatgacggggcaaatgacagtcaaccaggcccgcaatgctgtgaggacagttgcagcgcacaaccaggaacgccccacggcagcagtgacacccatccaggtacagaatgccgccggcctcagccctgcatctgtgggcctgtcccatcactcgctggcctccccacaacctgcgcctctgatgccaggctcagccacgcacactgctgccatcagtatcagtcgagccagtgcccctctggcctgtgcagcagctgctccactgacttccccaagcatcaccagtgcttctctggaggctgagcccagtggccggatagtgaccgttctccctggactccccacatctcctgacagtgcttcatcagcttgtgggaacagttcagcaaccaaaccagacaaggatagcaaaaaagaaaaaaagggtttgttgaagttgctttctggcgcctccactaaacggaagccccgcgtgtctcctccagcatcgcccaccctagaagtggagctgggcagtgcagagcttcctctccagggagcggtggggcccgaactgccaccaggaggtggccatggcagggcaggctcctgccctgtggacggggacggaccggtcacgactgcagtggcaggagcagccctggcccaggatgcttttcataggaaggcaagttccctggactccgcagttcccatcgctccacctcctcgccaggcctgttcctccctgggtcctgtcttgaatgagtctagacctgtcgtttgtgaaaggcacagggtggtggtttcctatcctcctcagagtgaggcagaacttgaacttaaagaaggagatattgtgtttgttcataaaaaacgagaggatggctggttcaaaggcacattacaacgtaatgggaaaactggccttttcccaggaagctttgtggaaaacatatgaggagactgacactgaagaagcttaaaatcacttcacacaacaaagtagcacaaagcagtttaacagaaagagcacatttgtggacttccagatggtcaggagatgagcaaaggattggtatgtgactctgatgccccagcacagttaccccagcgagcagagtgaagaagatgtttgtgtgggttttgttagtctggattcggatgtataaggtgtgccttgtactgtctgatttactacacagagaaacttttttttttttttaagatatatgactaaaatggacaattgtttacaaggcttaactaatttatttgcttttttaaacttgaacttttcgtataatagatacgttctttggattatgattttaagaaattattaatttatgaaatgataggtaaggagaagctggattatctcctgttgagagcaagagattcgttttgacatagagtgaatgcattttcccctctcctcctccctgctaccattatattttggggttatgttttgcttctttaagatagaaatcccagttctctaatttggttttcttctttgggaaaccaaacatacaaatgaatcagtatcaattagggcctggggtagagagacagaaacttgagagaagagaagttagtgattccctctctttctagtttggtaggaatcaccctgaagacctagtcctcaatttaattgtgtgggtttttaattttcctagaatgaagtgactgaaacaatgagaaagaatacagcacaacccttgaacaaaatgtatttagaaatatatttagttttatagcagaagcagctcaattgtttggttggaaagtaggggaaattgaagttgtagtcactgtctgagaatggctatgaagcgtcatttcacattttaccccaactgacctgcatgcccaggacacaagtaaaacatttgtgagatagtggtggtaagtgatgcactcgtgttaagtcaaaggctataagaaacactgtgaaaagttcatattcatccattgtgattctttccccacgtcttgcatgtattactggattcccacagtaatatagactgtgcatggtgtgtatatttcattgcgatttcctgttaagatgagtttgtactcagaattgaccaattcaggaggtgtaaaaataaacagtgttctcttctctaccccaaagccactactgaccaaggtctcttcagtgcactcgctccctctctggctaaggcatgcattagccactacacaagtcattagtgaaagtggtcttttatgtcctcccagcagacagacatcaaggatgagttaaccaggagactactcctgtgactgtggagctctggaaggcttggtgggagtgaatttgcccacaccttacaattgtggcaggatccagaagagcctgtctttttatatccattccttgatgtcattggcctctcccaccgatttcattacggtgccacgcagtcatggatctgggtagtccggaaaacaaaaggagggaagacagcctggtaatgaataagatccttaccacagttttctcatgggaaatacataataaaccctttcatctttttttttttcctttaagaattaaaactgggaaatagaaacatgaactgaaaagtcttgcaatgacaagaggtttcatggtcttaaaaagatactttatgtggttgaagatgaaatcattcctaaattaacctttttttaaaaaaaaaacaatgtatattatgttcctgtgtgttgaatttaaaaaaaaaaatactttacttggatattcatgtaatatataaaggtttggtgaaatgaactttagttaggaaaaagctggcatcagctttcatctgtgtaagttgacaccaatgtgtcataatattctttattttgggaaattagtgtattttataaaaattttaaaaagaaaaaagactactacaggttaagataatttttttacctgtcttttctccatattttaagctatgtgatttgaagtacctctgttcatagtttcctggtataaagttggttaaaatttcatctgttaatagatcattaggtaatataatgtatgggttttctattggttttttgcagacagtagagggagattttgtaacaagggcttgttacacagtgatatggtaatgataaaattgcaatttatcactccttttcatgttaataatttgaggactggataaaaggtttcaagattaaaatttgatgttcaaaccttt

SEQ ID NO: 61875 - DNA, 3214 bp, Homo sapiens
gtgtgtgcgcgcgtgaggggggcagcagagaggagtctcccggtgccgccgcggcgtcagagacactgcgagcggcgagcgcggtggggccgcatctgcatcagccgccgcagccgctgcggggccgcgaacaaagaggaggagccgaggcgcgagagcaaagtctgaaatggatgttacatgagtcattttaagggatgcacacaactatgaacatttctgaagattttttctcagtaaagtagataaagatggatgaatcagccttgttggatcttttggagtgtccggtgtgtctagagcgccttgatgcttctgcgaaggtcttgccttgccagcatacgttttgcaagcgatgtttgctggggatcgtaggttctcgaaatgaactcagatgtcccgagtgcaggactcttgttggctcgggtgtcgaggagcttcccagtaacatcttgctggtcagacttctggatggcatcaaacagaggccttggaaacctggtcctggtgggggaagtgggaccaactgcacaaatgcattaaggtctcagagcagcactgtggctaattgtagctcaaaagatctgcagagctcccagggcggacagcagcctcgggtgcaatcctggagccccccagtgaggggtatacctcagttaccatgtgccaaagcattatacaactatgaaggaaaagagcctggagaccttaaattcagcaaaggtgacatcatcattttgcgaagacaagtggatgaaaattggtaccatggggaagtcaatggaatccatggctttttccccaccaactttgtgcagattattaaaccgttacctcagcccccacctcagtgcaaagcactttatgactttgaagtgaaagacaaggaagcagacaaagattgccttccatttgcaaaggatgatgttctgactgtgatccgaagagtggatgaaaactgggctgaaggaatgctggcagacaaaataggaatatttccaatttcatatgttgagtttaactcggctgctaagcagctgatagaatgggataagcctcctgtgccaggagttgatgctggagaatgttcctcggcagcagcccagagcagcactgccccaaagcactccgacaccaagaagaacaccaaaaagcggcactccttcacttccctcactatggccaacaagtcctcccaggcatcccagaaccgccactccatggagatcagcccccctgtcctcatcagctccagcaaccccactgctgctgcacggatcagcgagctgtctgggctctcctgcagtgccccttctcaggttcatataagtaccaccgggttaattgtgaccccgcccccaagcagcccagtgacaactggcccctcgtttactttcccatcagatgttccctaccaagctgcccttggaactttgaatcctcctcttccaccaccccctctcctggctgccactgtccttgcctccacaccaccaggcgccaccgccgctgctgctgctgctggaatgggaccgaggcccatggcaggatccactgaccagattgcacatttacggccgcagactcgccccagtgtgtatgttgctatatatccatacactcctcggaaagaggatgaactagagctgagaaaaggggagatgtttttagtgtttgagcgctgccaggatggctggttcaaagggacatccatgcataccagcaagataggggttttccctggcaattatgtggcaccagtcacaagggcggtgacaaatgcttcccaagctaaagtccctatgtctacagctggccagacaagtcggggagtgaccatggtcagtccttccacggcaggagggcctgcccagaagctccagggaaatggcgtggctgggagtcccagtgttgtccccgcagctgtggtatcagcagctcacatccagacaagtcctcaggctaaggtcttgttgcacatgacggggcaaatgacagtcaaccaggcccgcaatgctgtgaggacagttgcagcgcacaaccaggaacgccccacggcagcagtgacacccatccaggtacagaatgccgccggcctcagccctgcatctgtgggcctgtcccatcactcgctggcctccccacaacctgcgcctctgatgccaggctcagccacgcacactgctgccatcagtatcagtcgagccagtgcccctctggcctgtgcagcagctgctccactgacttccccaagcatcaccagtgcttctctggaggctgagcccagtggccggatagtgaccgttctccctggactccccacatctcctgacagtgcttcatcagcttgtgggaacagttcagcaaccaaaccagacaaggatagcaaaaaagaaaaaaagggtttgttgaagttgctttctggcgcctccactaaacggaagccccgcgtgtctcctccagcatcgcccaccctagaagtggagctgggcagtgcagagcttcctctccagggagcggtggggcccgaactgccaccaggaggtggccatggcagggcaggctcctgccctgtggacggggacggaccggtcacgactgcagtggcaggagcagccctggcccaggatgcttttcataggaaggcaagttccctggactccgcagttcccatcgctccacctcctcgccaggcctgttcctccctgggtcctgtcttgaatgagtctagacctgtcgtttgtgaaaggcacagggtggtggtttcctatcctcctcagagtgaggcagaacttgaacttaaagaaggagatattgtgtttgttcataaaaaacgagaggatggctggttcaaaggcacattacaacgtaatgggaaaactggccttttcccaggaagctttgtggaaaacatatgaggagactgacactgaagaagcttaaaatcacttcacacaacaaagtagcacaaagcagtttaacagaaagagcacatttgtggacttccagatggtcaggagatgagcaaaggattggtatgtgactctgatgccccagcacagttaccccagcgagcagagtgaagaagatgtttgtgtgggttttgttagtctggattcggatgtataaggtgtgccttgtactgtctgatttactacacagagaaacttttttttttttttaagatatatgactaaaatggacaattgtttac

SEQ ID NO: 61876 - DNA, 850 bp, Homo sapiens
gtgtgtgcgcgcgtgaggggggcagcagagaggagtctcccggtgccgccgcggcgtcagagacactgcgagcggcgagcgcggtggggccgcatctgcatcagccgccgcagccgctgcggggccgcgaacaaagaggaggagccgaggcgcgagagcaaagtctgaaatggatgttacatgagtcattttaagggatgcacacaactatgaacatttctgaagattttttctcagtaaagtagataaagatggatgaatcagccttgttggatcttttggagtgtccggtgtgtctagagcgccttgatgcttctgcgaaggtcttgccttgccagcatacgttttgcaagcgatgtttgctggggatcgtaggttctcgaaatgaactcagatgtcccgagtgcaggactcttgttggctcgggtgtcgaggagcttcccagtaacatcttgctggtcagacttctggatggcatcaaacagaggccttggaaacctggtcctggtgggggaagtgggaccaactgcacaaatgcattaaggtctcagagcagcactgtggctaattgtagctcaaaagatctgcagagctcccagggcggacagcagcctcgggtgcaatcctggagccccccagtgagggtaagtagcctacagaggtagtttggtgaataaaggtggtaatgtccacattttttctttattctttagcttggtgttttcgaagtcaactcattgcttaggaaaccatacatactggaacagatagattatacctctgaatatttttttcccccatcttggaatgagattggatataaataataaattttattgttttgaaaatt

SEQ ID NO: 61877 - DNA, 285 bp, Homo sapiens
ctgctgcagccactgcacacggagcccctgctggctacctgggcctctgccacagcttcccatgctatgctggatgttctggtcccacttcacactaaggaaactgaggctcagggatgctaaacaacctgcatacttccacattggacagtgcccaccagggggagatggaatcagaccctttcagctgcacagcagcgtctcaatcggctccagctgctgcccaaggaagcagcaaagcccctcacccagctcaggctggagcagggacggggtggaggaggc

SEQ ID NO: 61878 - DNA, 189 bp, Homo sapiens
tctcctctctgacctcatctcctagtccttttccgcctcattcccaccagagcactctgcttcagccacagtggccttcttgccattcctcaaatacaccaagcacacttgagccttagggctccaccttaaggcctttaaactggctgtttcctctgcctgaaatgcccttcccccaatatccacgtg

SEQ ID NO: 61879 - DNA, 314 bp, Homo sapiens
ccagtaaggtagataatgatggccatccctattttacagataaaaaatctgaatcacagaagggttaagttactggtctaggtcaccagctaggaaatgagaggactgaggcttgaacccaggtggcttgttgctgaagctcattctttttctaccttgggctgccactcgaagccatggaatgcagctgagatgcctgggtgtggaacttggtgggaacagagggaacattgaaccttaaatgggtcacaaacctagataagtgagatcgggcctggtctggtacagcagttgtagaagttgcagggttcttg

SEQ ID NO: 61880 - DNA, 132 bp, Homo sapiens
tctgggcggaaggtggtgcggtgaaaggtgcagggacagactgggttagaggccactcttggtcttatcctccatggccacaacagaggtgacaaatacatgggtcactcagttatgtttagccaacagcct

SEQ ID NO: 61881 - DNA, 704 bp, Homo sapiens
tgcaataaatcttgctgctgcttgctctttaggtccacactgcctttatgagctataacagtccccgtgaaggtctgcagcttcactcctgaagccagcaagaccatgaacccaccagaaggaagaaactctgaacacgtctgaacatcagaaggaacaaactccggacacaccatctttaagaactgtaacaccgcgagggtgcgcggcttcattcttaaagtcagtgagaccaagaacccaccaattccggacacacttgcatgactccagaatgttgctacccaagtgtggggatgaacaatcaacctctgactaatgtcctattacagctctcttctttaccaaagaattaagggatgtgtctttgaagaagggttagagaaaaagagaccaggagcttcatatcatgtgcctctcacatttcttccacggattctatcgtgctgcagataaaataaaatccctatattcataatatttccattctatttctactgtaatctttcagaaagttactgttttcctgtgacatcagcgatgtgctgtaataaaattatttttatttattcaacaaatacatgttacgtgccagaaccgtttcagaaagtgtaaagaaaaagagggcattgtatctgctctcaaaaagctagtcaggaatcagaatttttactattaaaaagtcattaaatattatttattac

SEQ ID NO: 61882 - DNA, 219 bp, Homo sapiens
aagaaagactccaggtagacttagacataattctaaccttagatatattatagacccagcttggttattagtattgaaaatgctcttaaaaccaccgtgtcatatatatttcacacaagaagaaataaattgagtaaacatgtggaaaaatgttatgttcacctgttaataagcaaaaataaaaaataaaacaactcattaaattagcagactttgaaa

SEQ ID NO: 61883 - DNA, 235 bp, Homo sapiens
aaaaaaaaagaactcagcaccttccagagggagggctacatgaaatcccctctaggccacctgaagctccacttctgatatggagggaaagggcctggggaggcctcgtcccctcctcattttagagacagtgcacaggacaagatgctttagaagaatgctttaacttaaaggaatataattggatttcatcctttaacatcaaagggagtctggagaaacagctaaggccatt

SEQ ID NO: 61884 - DNA, 430 bp, Homo sapiens
agtgtatgctacacttttcctttgcaaccaaggaggaacaagctgcaagattaagttggtgctaaatcaatacagtaacacacttgaaaagggtagctacagaagcaagacttcaaagctagaagcatctggttttcagaagaattgctgtaaggacttttgataaggcaggtgtgaatccttcaagtttatataaaactgagaaggtagttttcttgtttttgttttatttttatttcaagttgaagtttagaatgagtcagtatggtgcataagacgggataaattaagtagtatttgatagtcttgaaaagcattatagagttgtagtaaggtgtatattttaagagcgtgttctattgctgttaactcatcatctgtaggaatgttttgtcaattgctttttcaaataagatggcattttattgat

SEQ ID NO: 61885 - DNA, 438 bp, Homo sapiens
ccatactggtctcgaactcctgagctcaagtgatctgcccaccttggcctcccagagtgctgggatcataggtgtgagcctgtaagtgtgggcccgccagcctctttcattcaacatgtactttcatccagattcctcgggatctgaattcctgcaggctttctatcctagaagcactggcttttccagaatctaggcctgagggcaagaacttgcttgtcatagtagtggccaagtcataaaaccatattctcttccgactagggtaggctttagggttcagcttacttcccttcttggaacttaggttgcagtatcaggctttcaacagagctaggatatgctgagtctccttgagtagaggcggcagtgggaacaacgtggtttcaggagacataaattgcacgaaaccaattaggttatttaggggaaagaaat

SEQ ID NO: 61886 - DNA, 629 bp, Homo sapiens
ggcaggatcaaaagcagctcctgcatggggacgccgtgtcctcctgctgttatcatagtatgccctgtgctcccaggaggaggctgagtcataaagggcattgtggcacctaccttgatttctcttggatcactcattctgagggaagatagctgccatgttgggaggacgtgcaagcagccctgtgaagaggtcaacacaggggggaactgaagccccttccgaacagctagcaccaacttgccagccatgtaaagtgattcaccttggaaacagatcctccagcctcagccaagccttcagatgcaacctcatgacagactctgaaccagaaacacacagccaagctgctgacccacagactttgtgagagatcataaacatttactgttgttctaagacactgttttagggtgctttgttgtacaacaatagcttactgaaaatacagagagcctagcacagtgcctgcatgtggtcatcactcaatggttgagcgagtgaatcttgcttagtattgaacactcccactgacagctaactgtaccatctctcaaaacaattcattctatctttgggcaattctgttaaagattattagaattaaattggatctttctcaatacagc

SEQ ID NO: 61887 - DNA, 430 bp, Homo sapiens
tcgaggcttggtgcagtaaggatgaaaacctggagctgctgacagctgtctgactggtggtcacatgcaggggcctatctgagggcagtggcagcacagagggaggcttggaagagagaagaaagtagggagagagtcaggaccttgtggcactctttaaccagtgaatgctagttgaaggcaatacaaccctctaggaggagtttggaaagttgtcaaggttttcaattgtctggaggatgtggttccgactggaactctttggaaaacagttggcattttctgttaaagccaaacacatacacctacccaatgtccagcaattccattccattcttaggtatatatccaacagagatgctatgaatagatgtgttcacaaaagagttgcaaaagaatgttcatagcagcctttttctctaataacaaa

SEQ ID NO: 61888 - DNA, 487 bp, Homo sapiens
gtgtctcagactctgaaacaactgaaattacgggtgcgcgctaccacgcccggctaatttttgtatttttagtagggacagggttttgccctgttgtccaggttggtcctgaactcctgacttcaagtgatctgcctgcctcagcctcccaaagtgctgggattataggcatgagccaccacacccagcctgaatcatttttgtaatttaaaaatttaacgcaaaaagaataaaacttagcaataacaaaaatgcacaaaagatggaaagaaatccacccctgacctttgtggagagatgacctctgataacagtctcagggtgaacgggcacctctgataacagtctcagggtgaacgggcatcccgagacactgttagcagaggtggtccatgtccatgctgtccgcgttacaataattacactatgtttattcttaaggttttaaaaacatttatttttaacaaattttctttgaaaagctacc

SEQ ID NO: 61889 - DNA, 3726 bp, Homo sapiens
  misc_feature (62)..(62): n is a, c, g, or t
ggcgcagtgcagagcatccaggcgagctgagcaagctgggcaaggcgcacgccacacgaganaatacggtgagcaagctgctggagaaggtgcgcaaggtcagcgtcaacgtgaagaccgtgcgcggcagcctggagcgccaggcggggcagatcaagaagctggaggtcaacgaggccgagctgctgcggcgccgcaactttaaagtcatgatctaccaggatgaagtgaagctgccggccaaactgagcatcagcaaatcgctgaaagagtcggaggccccacccggccggtcccgcacggctccgggtagccatggaggaccccacgctctatattgtcgagcggccgcttcccgggtaccccgacgccgaggccccggagccttcctccgctggggctcaggcagcggaggagccgtcgggggccggctcagaagagctgatcaagtcggaccaggtgaacggcgtgctggtgctgagcctcctggacaaaatcatcggggccgtagaccagatccagctgactcaagcacagctggaggagcggcaggcggagatggagggcgcagtgcagagcatccagggcgagctgagcaagctgggcaaggcgcacgccaccacgagcaatacggtgagcaagctgctggagaaggtgcgcaaggtcagcgtcaacgtgaagaccgtgcgcggcagcctggagcgccaggcggggcagatcaagaagctggaggtcaacgaggccgagctgctgcggcgccgcaactttaaagtcatgatctaccaggatgaagtgaagctgccggccaaactgagcatcagcaaatcgctgaaagagtcggaggcgctgccagagaaggagggcgaggagctgggcgagggcgagcggcccgaggaggacgcagcggcgctggagctttcgtcggacgaggcggtggaggttgaggaggttattgaggagtcccgcgcagagcgtatcaagcgcagcggcctgcggcgcgtggacgacttcaagaaggccttctccaaggagaagatggagaagaccaaggtgcgtacccgcgagaacctggagaagacgcgcctcaagaccaaggaaaacctggagaagacgcggcacaccctggagaagcgcatgaacaagctgggcacgcgcctggtgcccgccgagcggcgcgagaaactgaagacgtcgcgggacaagttgcgcaaatccttcacgcccgaccacgtggtgtacgcgcgctccaagaccgcggtctacaaggtgccacccttcaccttccacgtcaagaagatccgcgagggccaggtggaagtgctcaaggccaccgagatggtggaggtgggcgccgacgacgacgagggcggcgcggagcgcggggaggccggcgacctgcggcgcgggagcagccccgacgtgcacgcgctgctggagatcaccgaggagtcggacgccgtgctggtggacaagagcgacagcgactgagccgcccccgctgccacccaccccattcctcgctccttccgaacttcctctttcgcattctctctcggctcgagctggctgagatttttctaaattgaaaacacgcccccctccccacacctccaggaactccactcccagtcttagagctgttaggacccgatggggaggcagcccccgcagtggacagcccccgcttggacacagtccgagtggaatgggaagggaatggtcaatccctgtcctggttgtccaagtcgggatctcagaggaaattgcagtgattccacggttaggcccccctgggggggctgccttcccctcagcctctccccacaccacccacccagctgctgtcattccgctcactgagctcttcttcattctcaccctgatccctgggggactcaaagccaaaactgcccaaagaggaaagattgaatcctaaaggggatccttgcccccatgggaggccccctactagaaggacgtgaaagcagcttttgggggaaactgaggcagtggggaagacagagcagaatgagccctcaccctggctgggggtccagcacaggctgtatctgcagagggtcccagaggaacgctggagccaagagaagccctgggaaggaggggtggggaacgacatgcatgtgagggatggcacactgatgtgtttatgcacctgtacacaggagcgcatggccatggctttggaaaggagaatggaaaaatagaagaaggtcggccgggcttggtggcttaagcctgtaaccccagcactttgggaggccgaggtgggcggatcacctgaggtcaggagttcgggaccagcctggcaaacaccccatctctactaagcgaaaacccatctctactaaaattacaaaaattagctgggcatggttgcgcatgcctgtaatcccagctactttggaggctgaggtggggagaattgcttgaacctgggaggtggaggttgcagtgagccaaggtcgcgacactgcactccagcctgggtgacagagtgagactccatctcaacagaaggaaaaaaaaaggaaaataggagaaggtggaaatgggtgaagagagaagtcccctcactagctgcatgagaaatctatcttactgtggttctccatgggcagcaggaccatttttcagaatcaagagggaggacagtgtgagaaggcgatgatccaaagaagacagagaggtcagccccacccgatccctcaaatgggctcttggaggcacccccaggggcagcccatttctcaaagtccagaaaattagggtcccagaagggggcagcagcaggctgggagttaggagggagagcagggtgccggccctgccaccaagttgagagctggaggggaggtggggagagaacatcacagagcagccagccctggttcactcctggcagtttcttctcaagctccttccctaggagcatggtggcacgtgcctgtggtctcagctacttgggaggctgaggcgggaggatcgccagagcccaggagtttgaggctgcagtgagctatgagggtgcctctgtgctccatcctaggcaacagagtgagacgctgtttaaaaaggaaaaaatccttccctagagctagtatcctaaagctgcagagctagcccagacctcattggtttccttgtccttggggtgcttttcctgaatctttgggggtgaagggagtgttgctcccagtccagaggcctgattctgttcggactgggttctcaagacacgaccaggttctcaagacacgagtccccttgttcctccccattaaagggggtttgtcagaagcaagaacagcccctctccccagtcacagcctgaagggaggccccgagagcttcctccttccccccacctgctccttaccttctctgccctgctttttagaactgcagttcattgttttaagggattgggggagggagcctggggacacaaaccttttatacaatacaaagctttgctttttttttttttttcttccttttccctttctcggttctcttctctcctctgaatggctgaagacccctctgccgagggaggttggggattgtgggacaaggtcccttggtgctgatggcctgaaggggcctgagctgtgggcagatgcagttttctgtgggcttggggaacctctcacgttgctgtgtcctggtgagcagcccgaccaataaacctgcttttctaaaaga

SEQ ID NO: 61890 - DNA, 4221 bp, Homo sapiens
  misc_feature (4199)..(4199): n is a, c, g, or t
acctgattccgttcctcagctcgcattcctccgcccgtcccgctcccgccgccagcggaggccctagtctcccgctccaactattccaaccatcccgggaagggtggggcgctcggctcttgggtccccctccgccgccccgcctcgtcgatctccccttctaccccggtccctccctttctggggtggggccagccaatcagcgatcagactccggagtttggcccgggagctggggagctcaccgatcccccgcccagcagttctggccgctgtcccggtgcgcacggacgtggctcgagtttcctctgctctccgctctcgcccgctagctctcctcccttccgctcctgcttctctccgggtctcccgctccagctccagccccacccggccggtcccgcacggctccgggtagccatggaggaccccacgctctatattgtcgagcggccgcttcccgggtaccccgacgccgaggccccggagccttcctccgctggggctcaggcagcggaggagccgtcgggggccggctcagaagagctgatcaagtcggaccaggtgaacggcgtgctggtgctgagcctcctggacaaaatcatcggggccgtagaccagatccagctgactcaagcacagctggaggagcggcaggcggagatggagggcgcagtgcagagcatccagggcgagctgagcaagctgggcaaggcgcacgccaccacgagcaatacggtgagcaagctgctggagaaggtgcgcaaggtcagcgtcaacgtgaagaccgtgcgcggcagcctggagcgccaggcggggcagatcaagaagctggaggtcaacgaggccgagctgctgcggcgccgcaactttaaagtcatgatctaccaggatgaagtgaagctgccggccaaactgagcatcagcaaatcgctgaaagagtcggaggcgctgccagagaaggagggcgaggagctgggcgagggcgagcggcccgaggaggacgcagcggcgctggagctttcgtcggacgaggcggtggaggttgaggaggttattgaggagtcccgcgcagagcgtatcaagcgcagcggcctgcggcgcgtggacgacttcaagaaggccttctccaaggagaagatggagaagaccaaggtgcgtacccgcgagaacctggagaagacgcgcctcaagaccaaggaaaacctggagaagacgcggcacaccctggagaagcgcatgaacaagctgggcacgcgcctggtgcccgccgagcggcgcgagaaactgaagacgtcgcgggacaagttgcgcaaatccttcacgcccgaccacgtggtgtacgcgcgctccaagaccgcggtctacaaggtgccacccttcaccttccacgtcaagaagatccgcgagggccaggtggaagtgctcaaggccaccgagatggtggaggtgggcgccgacgacgacgagggcggcgcggagcgcggggaggccggcgacctgcggcgcgggagcagccccgacgtgcacgcgctgctggagatcaccgaggagtcggacgccgtgctggtggacaagagcgacagcgactgagccgcccccgctgccacccaccccattcctcgctccttccgaacttcctctttcgcattctctctcggctcgagctggctgagatttttctaaattgaaaacacgcccccctccccacacctccaggaactccactcccagtcttagagctgttaggacccgatggggaggcagcccccgcagtggacagcccccgcttggacacagtccgagtggaatgggaagggaatggtcaatccctgtcctggttgtccaagtcgggatctcagaggaaattgcagtgattccacggttaggcccccctgggggggctgccttcccctcagcctctccccacaccacccacccagctgctgtcattccgctcactgagctcttcttcattctcaccctgatccctgggggactcaaagccaaaactgcccaaagaggaaagattgaatcctaaaggggatccttgcccccatgggaggccccctactagaaggacgtgaaagcagcttttgggggaaactgaggcagtggggaagacagagcagaatgagccctcaccctggctgggggtccagcacaggctgtatctgcagagggtcccagaggaacgctggagccaagagaagccctgggaaggaggggtggggaacgacatgcatgtgagggatggcacactgatgtgtttatgcacctgtacacaggagcgcatggccatggctttggaaaggagaatggaaaaatagaagaaggtcggccgggcttggtggcttaagcctgtaaccccagcactttgggaggccgaggtgggcggatcacctgaggtcaggagttcgggaccagcctggcaaacaccccatctctactaagcgaaaacccatctctactaaaattacaaaaattagctgggcatggttgcgcatgcctgtaatcccagctactttggaggctgaggtggggagaattgcttgaacctgggaggtggaggttgcagtgagccaaggtcgcgacactgcactccagcctgggtgacagagtgagactccatctcaacagaaggaaaaaaaaaggaaaataggagaaggtggaaatgggtgaagagagaagtcccctcactagctgcatgagaaatctatcttactgtggttctccatgggcagcaggaccatttttcagaatcaagagggaggacagtgtgagaaggcgatgatccaaagaagacagagaggtcagccccacccgatccctcaaatgggctcttggaggcacccccaggggcagcccatttctcaaagtccagaaaattagggtcccagaagggggcagcagcaggctgggagttaggagggagagcagggtgccggccctgccaccaagttgagagctggaggggaggtggggagagaacatcacagagcagccagccctggttcactcctggcagtttcttctcaagctccttccctaggagcatggtggcacgtgcctgtggtctcagctacttgggaggctgaggcgggaggatcgccagagcccaggagtttgaggctgcagtgagctatgagggtgcctctgtgctccatcctaggcaacagagtgagacgctgtttaaaaaggaaaaaatccttccctagagctagtatcctaaagctgcagagctagcccagacctcattggtttccttgtccttggggtgcttttcctgaatctttgggggtgaagggagtgttgctcccagtccagaggcctgattctgttcggactgggttctcaagacacgaccaggttctcaagacacgagtccccttgttcctccccattaaagggggtttgtcagaagcaagaacagcccctctccccagtcacagcctgaagggaggccccgagagcttcctccttccccccacctgctccttaccttctctgccctgctttttagaactgcagttcattgttttaagggattgggggagggagcctggggacacaaaccttttatacaatacaaagctttgctttttttttttttttcttccttttccctttctcggttctcttctctcctctgaatggctgaagacccctctgccgagggaggttggggattgtgggacaaggtcccttggtgctgatggcctgaaggggcctgagctgtgggcagatgcagttttctgtgggcttggggaacctctcacgttgctgtgtcctggtgagcagcccgaccaataaacctgcttttctaaaagaaaaaaaataaaaaaaaaacaaagaaaacacaaacaacaaagaaaaaaaaaaaacaaaaaaaaaaaaattttgtgggcggctctgggccttggaaaaaggttttttaagacacattggggtggggcgcgcggggcccaagtcaggtcgagtgtgaacccatggggccaaagctgggacacccaaaggaagacaccggggaacaggaacacagtcgctggggatctcccacgcaaatagaaaaaaagagcgccggggggagcaacacggaagcgttctggaacaactccccgagggggcgtgtcacgaacgagcctcaaccggatgcctcaccaacaaggagtgccaaacggagtccggatatccaattnaacgccggcacggagaggagcg

SEQ ID NO: 61891 - DNA, 3255 bp, Homo sapiens
acctgattccgttcctcagctcgcattcctccgcccgtcccgctcccgccgccagcggaggccctagtctcccgctccaactattccaaccatcccgggaagggtggggcgctcggctcttgggtccccctccgccgccccgcctcgtcgatctccccttctaccccggtccctccctttctggggtggggccagccaatcagcgatcagactccggagtttggcccgggagctggggagctcaccgatcccccgcccagcagttctggccgctgtcccggtgcgcacggacgtggctcgagtttcctctgctctccgctctcgcccgctagctctcctcccttccgctcctgcttctctccgggtctcccgctccagctccagccccacccggccggtcccgcacggctccgggtagccatggaggacgcagcggcgctggagctttcgtcggacgaggcggtggaggttgaggaggttattgaggagtcccgcgcagagcgtatcaagcgcagcggcctgcggcgcgtggacgacttcaagaaggccttctccaaggagaagatggagaagaccaaggtgcgtacccgcgagaacctggagaagacgcgcctcaagaccaaggaaaacctggagaagacgcggcacaccctggagaagcgcatgaacaagctgggcacgcgcctggtgcccgccgagcggcgcgagaaactgaagacgtcgcgggacaagttgcgcaaatccttcacgcccgaccacgtggtgtacgcgcgctccaagaccgcggtctacaaggtgccacccttcaccttccacgtcaagaagatccgcgagggccaggtggaagtgctcaaggccaccgagatggtggaggtgggcgccgacgacgacgagggcggcgcggagcgcggggaggccggcgacctgcggcgcgggagcagccccgacgtgcacgcgctgctggagatcaccgaggagtcggacgccgtgctggtggacaagagcgacagcgactgagccgcccccgctgccacccaccccattcctcgctccttccgaacttcctctttcgcattctctctcggctcgagctggctgagatttttctaaattgaaaacacgcccccctccccacacctccaggaactccactcccagtcttagagctgttaggacccgatggggaggcagcccccgcagtggacagcccccgcttggacacagtccgagtggaatgggaagggaatggtcaatccctgtcctggttgtccaagtcgggatctcagaggaaattgcagtgattccacggttaggcccccctgggggggctgccttcccctcagcctctccccacaccacccacccagctgctgtcattccgctcactgagctcttcttcattctcaccctgatccctgggggactcaaagccaaaactgcccaaagaggaaagattgaatcctaaaggggatccttgcccccatgggaggccccctactagaaggacgtgaaagcagcttttgggggaaactgaggcagtggggaagacagagcagaatgagccctcaccctggctgggggtccagcacaggctgtatctgcagagggtcccagaggaacgctggagccaagagaagccctgggaaggaggggtggggaacgacatgcatgtgagggatggcacactgatgtgtttatgcacctgtacacaggagcgcatggccatggctttggaaaggagaatggaaaaatagaagaaggtcggccgggcttggtggcttaagcctgtaaccccagcactttgggaggccgaggtgggcggatcacctgaggtcaggagttcgggaccagcctggcaaacaccccatctctactaagcgaaaacccatctctactaaaattacaaaaattagctgggcatggttgcgcatgcctgtaatcccagctactttggaggctgaggtggggagaattgcttgaacctgggaggtggaggttgcagtgagccaaggtcgcgacactgcactccagcctgggtgacagagtgagactccatctcaacagaaggaaaaaaaaaggaaaataggagaaggtggaaatgggtgaagagagaagtcccctcactagctgcatgagaaatctatcttactgtggttctccatgggcagcaggaccatttttcagaatcaagagggaggacagtgtgagaaggcgatgatccaaagaagacagagaggtcagccccacccgatccctcaaatgggctcttggaggcacccccaggggcagcccatttctcaaagtccagaaaattagggtcccagaagggggcagcagcaggctgggagttaggagggagagcagggtgccggccctgccaccaagttgagagctggaggggaggtggggagagaacatcacagagcagccagccctggttcactcctggcagtttcttctcaagctccttccctaggagcatggtggcacgtgcctgtggtctcagctacttgggaggctgaggcgggaggatcgccagagcccaggagtttgaggctgcagtgagctatgagggtgcctctgtgctccatcctaggcaacagagtgagacgctgtttaaaaaggaaaaaatccttccctagagctagtatcctaaagctgcagagctagcccagacctcattggtttccttgtccttggggtgcttttcctgaatctttgggggtgaagggagtgttgctcccagtccagaggcctgattctgttcggactgggttctcaagacacgaccaggttctcaagacacgagtccccttgttcctccccattaaagggggtttgtcagaagcaagaacagcccctctccccagtcacagcctgaagggaggccccgagagcttcctccttccccccacctgctccttaccttctctgccctgctttttagaactgcagttcattgttttaagggattgggggagggagcctggggacacaaaccttttatacaatacaaagctttgctttttttttttttttcttccttttccctttctcggttctcttctctcctctgaatggctgaagacccctctgccgagggaggttggggattgtgggacaaggtcccttggtgctgatggcctgaaggggcctgagctgtgggcagatgcagttttctgtgggcttggggaacctctcacgttgctgtgtcctggtgagcagcccgaccaataaacctgcttttctaaaaga

SEQ ID NO: 61892 - DNA, 3970 bp, Homo sapiens
  misc_feature (3788)..(3788): n is a, c, g, or t
acctgattccgttcctcagctcgcattcctccgcccgtcccgctcccgccgccagcggaggccctagtctcccgctccaactattccaaccatcccgggaagggtggggcgctcggctcttgggtccccctccgccgccccgcctcgtcgatctccccttctaccccggtccctccctttctggggtggggccagccaatcagcgatcagactccggagtttggcccgggagctggggagctcaccgatcccccgcccagcagttctggccgctgtcccggtgcgcacggacgtggctcgagtttcctctgctctccgctctcgcccgctagctctcctcccttccgctcctgcttctctccgggtctcccgctccagctccagccccacccggccggtcccgcacggctccgggtagccatggaggaccccacgctctatattgtcgagcggccgcttcccgggtaccccgacgccgaggccccggagccttcctccgctggggctcaggcagcggaggagccgtcgggggccggctcagaagagctgatcaagtcggaccaggtgaacggcgtgctggtgctgagcctcctggacaaaatcatcggggccgtagaccagatccagctgactcaagcacagctggaggagcggcaggcggagatggagggcgcagtgcagagcatccagggcgagctgagcaagctgggcaaggcgcacgccaccacgagcaatacggtgagcaagctgctggagaaggtgcgcaaggtcagcgtcaacgtgaagaccgtgcgcggcagcctggagcgccaggcggggcagatcaagaagctggaggtcaacgaggccgagctgctgcggcgccgcaactttaaagtcatgatctaccaggatgaagtgaagctgccggccaaactgagcatcagcaaatcgctgaaagagtcggaggcgctgccagagaaggagggcgaggagctgggcgagggcgagcggcccgaggaggacgcagcggcgctggagctttcgtcggacgaggcggtggaggttgaggaggttattgaggagtcccgcgcagagcgtatcaagcgcagcggcctgcggcgcgtggacgacttcaagaaggccttctccaaggagaagatggagaagaccaaggtgcgtacccgcgagaacctggagaagacgcgcctcaagaccaaggaaaacctggagaagacgcggcacaccctggagaagcgcatgaacaagctgggcacgcgcctggtgcccgccgagcggcgcgagaaactgaagacgtcgcgggacaagttgcgcaaatccttcacgcccgaccacgtggtgtacgcgcgctccaagaccgcggtctacaaggtgccacccttcaccttccacgtcaagaagatccgcgagggccaggtggaagtgctcaaggccaccgagatggtggaggtgggcgccgacgacgacgagggcggcgcggagcgcggggaggccggcgacctgcggcgcgggagcagccccgacgtgcacgcgctgctggagatcaccgaggagtcggacgccgtgctggtggacaagagcgacagcgactgagccgcccccgctgccacccaccccattcctcgctccttccgaacttcctctttcgcattctctctcggctcgagctggctgagatttttctaaattgaaaacacgcccccctccccacacctccaggaactccactcccagtcttagagctgttaggacccgatggggaggcagcccccgcagtggacagcccccgcttggacacagtccgagtggaatgggaagggaatggtcaatccctgtcctggttgtccaagtcgggatctcagaggaaattgcagtgattccacggttaggcccccctgggggggctgccttcccctcagcctctccccacaccacccacccagctgctgtcattccgctcactgagctcttcttcattctcaccctgatccctgggggactcaaagccaaaactgcccaaagaggaaagattgaatcctaaaggggatccttgcccccatgggaggccccctactagaaggacgtgaaagcagcttttgggggaaactgaggcagtggggaagacagagcagaatgagccctcaccctggctgggggtccagcacaggctgtatctgcagagggtcccagaggaacgctggagccaagagaagccctgggaaggaggggtggggaacgacatgcatgtgagggatggcacactgatgtgtttatgcacctgtacacaggagcgcatggccatggctttggaaaggagaatggaaaaatagaagaaggtcggccgggcttggtggcttaagcctgtaaccccagcactttgggaggccgaggtgggcggatcacctgaggtcaggagttcgggaccagcctggcaaacaccccatctctactaagcgaaaacccatctctactaaaattacaaaaattagctgggcatggttgcgcatgcctgtaatcccagctactttggaggctgaggtggggagaattgcttgaacctgggaggtggaggttgcagtgagccaaggtcgcgacactgcactccagcctgggtgacagagtgagactccatctcaacagaaggaaaaaaaaaggaaaataggagaaggtggaaatgggtgaagagagaagtcccctcactagctgcatgagaaatctatcttactgtggttctccatgggcagcaggaccatttttcagaatcaagagggaggacagtgtgagaaggcgatgatccaaagaagacagagaggtcagccccacccgatccctcaaatgggctcttggaggcacccccaggggcagcccatttctcaaagtccagaaaattagggtcccagaagggggcagcagcaggctgggagttaggagggagagcagggtgccggccctgccaccaagttgagagctggaggggaggtggggagagaacatcacagagcagccagccctggttcactcctggcagtttcttctcaagctccttccctaggagcatggtggcacgtgcctgtggtctcagctacttgggaggctgaggcgggaggatcgccagagcccaggagtttgaggctgcagtgagctatgagggtgcctctgtgctccatcctaggcaacagagtgagacgctgtttaaaaaggaaaaaatccttccctagagctagtatcctaaagctgcagagctagcccagacctcattggtttccttgtccttggggtgcttttcctgaatctttgggggtgaagggagtgttgctcccagtccagaggcctgattctgttcggactgggttctcaagacacgaccaggttctcaagacacgagtccccttgttcctccccattaaagggggtttgtcagaagcaagaacagcccctctccccagtcacagcctgaagggaggccccgagagcttcctccttccccccacctgctccttaccttctctgccctgctttttagaactgcagttcattgttttaagggattgggggagggagcctggggacacaaaccttttatacaatacaaagctttgctttttttttttttttcttccttttccctttctcggttctcttctctcctctgaatggctgaagacccctctgccgagggaggttggggattgtgggacaaggtcccttggtgctgatggcctgaaggggcctgagctgtgggcagatgcagttttctgtgggcttggggaacctctcacggttgggtngtggtcccttgggtggagcaaggccgggaccaaataaaccgtggttttttctaaaaaaaaaacaaagcaaaaacgagaaacaagaaagcagaaaaaggaacacaaatagggagagaagaaaaagaaagagagggacacaggagaaaaggacgacacaaagagaggaaacgaaagaaggaaag

SEQ ID NO: 61893 - DNA, 2121 bp, Homo sapiens
actatggtcatagctgattcttgaggataaacctgttaggacccgatggggaggcagcccccgcagtggacagcccccgcttggacacagtccgagtggaatgggaagggaatggtcaatccctgtcctggttgtccaagtcgggatctcagaggaaattgcagtgattccacggttaggcccccctgggggggctgccttcccctcagcctctccccacaccacccacccagctgctgtcattccgctcactgagctcttcttcattctcaccctgatccctgggggactcaaagccaaaactgcccaaagaggaaagattgaatcctaaaggggatccttgcccccatgggaggccccctactagaaggacgtgaaagcagcttttgggggaaactgaggcagtggggaagacagagcagaatgagccctcaccctggctgggggtccagcacaggctgtatctgcagagggtcccagaggaacgctggagccaagagaagccctgggaaggaggggtggggaacgacatgcatgtgagggatggcacactgatgtgtttatgcacctgtacacaggagcgcatggccatggctttggaaaggagaatggaaaaatagaagaaggtcggccgggcttggtggcttaagcctgtaaccccagcactttgggaggccgaggtgggcggatcacctgaggtcaggagttcgggaccagcctggcaaacaccccatctctactaagcgaaaacccatctctactaaaattacaaaaattagctgggcatggttgcgcatgcctgtaatcccagctactttggaggctgaggtggggagaattgcttgaacctgggaggtggaggttgcagtgagccaaggtcgcgacactgcactccagcctgggtgacagagtgagactccatctcaacagaaggaaaaaaaaaggaaaataggagaaggtggaaatgggtgaagagagaagtcccctcactagctgcatgagaaatctatcttactgtggttctccatgggcagcaggaccatttttcagaatcaagagggaggacagtgtgagaaggcgatgatccaaagaagacagagaggtcagccccacccgatccctcaaatgggctcttggaggcacccccaggggcagcccatttctcaaagtccagaaaattagggtcccagaagggggcagcagcaggctgggagttaggagggagagcagggtgccggccctgccaccaagttgagagctggaggggaggtggggagagaacatcacagagcagccagccctggttcactcctggcagtttcttctcaagctccttccctaggagcatggtggcacgtgcctgtggtctcagctacttgggaggctgaggcgggaggatcgccagagcccaggagtttgaggctgcagtgagctatgagggtgcctctgtgctccatcctaggcaacagagtgagacgctgtttaaaaaggaaaaaatccttccctagagctagtatcctaaagctgcagagctagcccagacctcattggtttccttgtccttggggtgcttttcctgaatctttgggggtgaagggagtgttgctcccagtccagaggcctgattctgttcggactgggttctcaagacacgaccaggttctcaagacacgagtccccttgttcctccccattaaagggggtttgtcagaagcaagaacagcccctctccccagtcacagcctgaagggaggccccgagagcttcctccttccccccacctgctccttaccttctctgccctgctttttagaactgcagttcattgttttaagggattgggggagggagcctggggacacaaaccttttatacaatacaaagctttgctttttttttttttttcttccttttccctttctcggttctcttctctcctctgaatggctgaagacccctctgccgagggaggttggggattgtgggacaaggtcccttggtgctgatggcctgaaggggcctgagctgtgggcagatgcagttttctgtgggcttggggaacctctcacgttgctgtgtcctggtgagcagcccgaccaataaacctgcttttctaaaaga

SEQ ID NO: 61894 - DNA, 3390 bp, Homo sapiens
acctgattccgttcctcagctcgcattcctccgcccgtcccgctcccgccgccagcggaggccctagtctcccgctccaactattccaaccatcccgggaagggtggggcgctcggctcttgggtccccctccgccgccccgcctcgtcgatctccccttctaccccggtccctccctttctggggtggggccagccaatcagcgatcagactccggagtttggcccgggagctggggagctcaccgatcccccgcccagcagttctggccgctgtcccggtgcgcacggacgtggctcgagtttcctctgctctccgctctcgcccgctagctctcctcccttccgctcctgcttctctccgggtctcccgctccagctccagccccacccggccggtcccgcacggctccgggtagccatggaggaccccacgctctatattgtcgagcggccgcttcccgggtaccccgacgccgaggccccggagccttcctccgctggggctcaggcagcggaggagccgtcgggggccggctcagaagagctgatcaagtcggaccaggtgaacggcgtgctggtgctgagcctcctggacaaaatcatcggggccgtagaccagatccagctgactcaagcacagctggaggagcggcaggcggagatggagggcgcagtgcagagcatccagggcgagctgagcaagctgggcaaggcgcacgccaccacgagcaatacggtgagcaagctgctggagaaggtgcgcaaggtcagcgtcaacgtgaagaccgtgcgcggcagcctggagcgccaggcggggcagatcaagaagctggaggtcaacgaggccgagctgctgcggcgccgcaactttaaagtcatgatctaccaggatgaagtgaagctgccggccaaactgagcatcagcaaatcgctgaaagagtcggaggcgctgccagagaaggagggcgaggagctgggcgagggcgagcggcccgaggaggacgcagcggcgctggagctttcgtcggacgaggcggtggaggttgaggaggttattgaggagtcccgcgcagagcgtatcaagcgcagcggcctgcggcgcgtggacgacttcaagaaggccttctccaaggagaagatggagaagaccaaggtgcgtacccgcgagaacctggagaagacgcgcctcaagaccaaggaaaacctggagaagacgcggcacaccctggagaagcgcatgaacaagctgggcacgcgcctggtgcccgccgagcggcgcgagaaactgaagacgtcgcgggacaagttgcgcaaatccttcacgcccgaccacgtggtgtacgcgcgctccaagaccgcggtctacaaggtgccacccttcaccttccacgtcaagaagatccgcgagggccaggtggaagtgctcaaggccaccgagatggtggaggtgggcgccgacgacgacgagggcggcgcggagcgcggggaggccggcgacctgcggcgcgggagcagccccgacgtgcacgcgctgctggagatcaccgaggagtcggacgccgtgctggtggacaagagcgacagcgactgagccgcccccgctgccacccaccccattcctcgctccttccgaacttcctctttcgcattctctctcggctcgagctggctgagatttttctaaattgaaaacacgcccccctccccacacctccaggaactccactcccagtcttagagctgttaggacccgatggggaggcagcccccgcagtggacagcccccgcttggacacagtccgagtggaatgggaagggaatggtcaatccctgtcctggttgtccaagtcgggatctcagaggaaattgcagtgattccacggttaggcccccctgggggggctgccttcccctcagcctctccccacaccacccacccagctgctgtcattccgctcactgagctcttcttcattctcaccctgatccctgggggactcaaagccaaaactgcccaaagaggaaagattgaatcctaaaggggatccttgcccccatgggaggccccctactagaaggacgtgaaagcagcttttgggggaaactgaggcagtggggaagacagagcagaatgagccctcaccctggctgggggtccagcacaggctgtatctgcagagggtcccagaggaacgctggagccaagagaagccctgggaaggaggggtggggaacgacatgcatgtgagggatggcacactgatgtgtttatgcacctgtacacaggagcgcatggccatggctttggaaaggagaatggaaaaatagaagaaggtcggccgggcttggtggcttaagcctgtaaccccagcactttgggaggccgaggtgggcggatcacctgaggtcaggagttcgggaccagcctggcaaacaccccatctctactaagcgaaaacccatctctactaaaattacaaaaattagctgggcatggttgcgcatgcctgtaatcccagctactttggaggctgaggtggggagaattgcttgaacctgggaggtggaggttgcagtgagccaaggtcgcgacactgcactccagcctgggtgacagagtgagactccatctcaacagaaggaaaaaaaaaggaaaataggagaaggtggaaatgggtgaagagagaagtcccctcactagctgcatgagaaatctatcttactgtggttctccatgggcagcaggaccatttttcagaatcaagagggaggacagtgtgagaaggcgatgatccaaagaagacagagaggtcagccccacccgatccctcaaatgggctcttggaggcacccccaggggcagcccatttctcaaagtccagaaaattagggtcccagaagggggcagcagcaggctgggagttaggagggagagcagggtgccggccctgccaccaagttgagagctggaggggaggtggggagagaacatcacagagcagccagccctggttcactcctggcagtttcttctcaagctccttccctaggagcatggtggcacgtgcctgtggtctcagctacttgggaggctgaggcgggaggatcgccagagcccaggagtttgaggctgcagtgagctatgagggtgcctctgtgctccatcctaggcaacagagtgagacgctgtttaaaaaggaaaaaatccttccctagagctagtatcctaaagctgcagagctagcccagacctcattggtcccttggtgctgatggcctgaaggggcctgagctgtgggcagatgcagttttctgtgggcttggggaacctctcacgttgctgtgtcctggtgagcagcccgaccaataaacctgcttttctaaaaga

SEQ ID NO: 61895 - DNA, 1834 bp, Homo sapiens
gcctactactactactaccactaaattcgcggccgcgtcgctaaaggggatccttgcccccatgggaggccccctactagaaggacgtgaaagcagcttttgggggaaactgaggcagtggggaagacagagcagaatgagccctcaccctggctgggggtccagcacaggctgtatctgcagagggtcccagaggaacgctggagccaagagaagccctgggaaggaggggtggggaacgacatgcatgtgagggatggcacactgatgtgtttatgcacctgtacacaggagcgcatggccatggctttggaaaggagaatggaaaaatagaagaaggtcggccgggcttggtggcttaagcctgtaaccccagcactttgggaggccgaggtgggcggatcacctgaggtcaggagttcgggaccagcctggcaaacaccccatctctactaagcgaaaacccatctctactaaaattacaaaaattagctgggcatggttgcgcatgcctgtaatcccagctactttggaggctgaggtggggagaattgcttgaacctgggaggtggaggttgcagtgagccaaggtcgcgacactgcactccagcctgggtgacagagtgagactccatctcaacagaaggaaaaaaaaaggaaaataggagaaggtggaaatgggtgaagagagaagtcccctcactagctgcatgagaaatctatcttactgtggttctccatgggcagcaggaccatttttcagaatcaagagggaggacagtgtgagaaggcgatgatccaaagaagacagagaggtcagccccacccgatccctcaaatgggctcttggaggcacccccaggggcagcccatttctcaaagtccagaaaattagggtcccagaagggggcagcagcaggctgggagttaggagggagagcagggtgccggccctgccaccaagttgagagctggaggggaggtggggagagaacatcacagagcagccagccctggttcactcctggcagtttcttctcaagctccttccctaggagcatggtggcacgtgcctgtggtctcagctacttgggaggctgaggcgggaggatcgccagagcccaggagtttgaggctgcagtgagctatgagggtgcctctgtgctccatcctaggcaacagagtgagacgctgtttaaaaaggaaaaaatccttccctagagctagtatcctaaagctgcagagctagcccagacctcattggtttccttgtccttggggtgcttttcctgaatctttgggggtgaagggagtgttgctcccagtccagaggcctgattctgttcggactgggttctcaagacacgaccaggttctcaagacacgagtccccttgttcctccccattaaagggggtttgtcagaagcaagaacagcccctctccccagtcacagcctgaagggaggccccgagagcttcctccttccccccacctgctccttaccttctctgccctgctttttagaactgcagttcattgttttaagggattgggggagggagcctggggacacaaaccttttatacaatacaaagctttgctttttttttttttttcttccttttccctttctcggttctcttctctcctctgaatggctgaagacccctctgccgagggaggttggggattgtgggacaaggtcccttggtgctgatggcctgaaggggcctgagctgtgggcagatgcagttttctgtgggcttggggaacctctcacgttgctgtgtcctggtgagcagcccgaccaataaacctgcttttctaaaaga

SEQ ID NO: 61896 - DNA, 3229 bp, Homo sapiens
acctgattccgttcctcagctcgcattcctccgcccgtcccgctcccgccgccagcggaggccctagtctcccgctccaactattccaaccatcccgggaagggtggggcgctcggctcttgggtccccctccgccgccccgcctcgtcgatctccccttctaccccggtccctccctttctggggtggggccagccaatcagcgatcagactccggagtttggcccgggagctggggagctcaccgatcccccgcccagcagttctggccgctgtcccggtgcgcacggacgtggctcgagtttcctctgctctccgctctcgcccgctagctctcctcccttccgctcctgcttctctccgggtctcccgctccagctccagccccacccggccggtcccgcacggctccgggtagccatggaggaccccacgctctatattgtcgagcggccgcttcccgggtaccccgacgccgaggccccggagccttcctccgctggggctcaggcagcggaggagccgtcgggggccggctcagaagagctgatcaagtcggaccaggtgaacggcgtgctggtgctgagcctcctggacaaaatcatcggggccgtagaccagatccagctgactcaagcacagctggaggagcggcaggcggagatggagggcgcagtgcagagcatccagggcgagctgagcaagctgggcaaggcgcacgccaccacgagcaatacggtgagcaagctgctggagaaggtgcgcaaggtcagcgtcaacgtgaagaccgtgcgcggcagcctggagcgccaggcggggcagatcaagaagctggaggtcaacgaggccgagctgctgcggcgccgcaactttaaagtcatgatctaccaggatgaagtgaagctgccggccaaactgagcatcagcaaatcgctgaaagagtcggaggcgctgccagagaaggagggcgaggagctgggcgagggcgagcggcccgaggaggacgcagcggcgctggagctttcgtcggacgaggcggtggaggttgaggaggttattgaggagtcccgcgcagagcgtatcaagcgcagcggcctgcggcgcgtggacgacttcaagaaggccttctccaaggagaagatggagaagaccaaggtgcgtacccgcgagaacctggagaagacgcgcctcaagaccaaggaaaacctggagaagacgcggcacaccctggagaagcgcatgaacaagctgggcacgcgcctggtgcccgccgagcggcgcgagaaactgaagacgtcgcgggacaagttgcgcaaatccttcacgcccgaccacgtggtgtacgcgcgctccaagaccgcggtctacaaggtgccacccttcaccttccacgtcaagaagatccgcgagggccaggtggaagtgctcaaggccaccgagatggtggaggtgggcgccgacgacgacgagggcggcgcggagcgcggggaggccggcgacctgcggcgcgggagcagccccgacgtgcacgcgctgctggagatcaccgaggagtcggacgccgtgctggtggacaagagcgacagcgactgagccgcccccgctgccacccaccccattcctcgctccttccgaacttcctctttcgcattctctctcggctcgagctggctgagatttttctaaattgaaaacacgcccccctccccacacctccaggaactccactcccagtcttagagctgttaggacccgatggggaggcagcccccgcagtggacagcccccgcttggacacagtccgagtggaatgggaagggaatggtcaatccctgtcctggttgtccaagtcgggatctcagaggaaattgcagtgattccacggttaggcccccctgggggggctgccttcccctcagcctctccccacaccacccacccagctgctgtcattccgctcactgagctcttcttcattctcaccctgatccctgggggactcaaagccaaaactgcccaaagaggaaagattgaatcctaaaggggatccttgcccccatgggaggccccctactagaaggacgtgaaagcagcttttgggggaaactgaggcagtggggaagacagagcagaatgagccctcaccctggctgggggtccagcacaggctgtatctgcagagggtcccagaggaacgctggagccaagagaagccctgggaaggaggggtggggaacgacatgcatgtgagggatggcacactgatgtgtttatgcacctgtacacaggagcgcatggccatggctttggaaaggagaatggaaaaatagaagaaggtcggccgggcttggtggcttaagcctgtaaccccagcactttgggaggccgaggtgggcggatcacctgaggtcaggagttcgggaccagcctggcaaacaccccatctctactaagcgaaaacccatctctactaaaattacaaaaattagctgggcatggttgcgcatgcctgtaatcccagctactttggaggctgaggtggggagaattgcttgaacctgggaggtggaggttgcagtgagccaaggtcgcgacactgcactccagcctgggtgacagagtgagactccatctcaacagaaggaaaaaaaaaggaaaataggagaaggtggaaatgggtgaagagagaagtcccctcactagctgcatgagaaatctatcttactgtggttctccatgggcagcaggaccatttttcagaatcaagagggaggacagtgtgagaaggcgatgatccaaagaagacagagaggtcagccccacccgatccctcaaatgggctcttggaggcacccccaggggcagcccatttctcaaagtccagaaaattagggtcccagaagggggcagcagcaggctgggagttaggagggagagcagggtgccggccctgccaccaagttgagagctggaggggaggtggggagagaacatcacagagcagccagccctggttcactcctggcagtttcttctcaagctccttccctaggagcatggtggcacgtgcctgtggtctcagctacttgggaggctgaggcgggaggatcgccagagcccaggagtttgaggctgcagtgagctatgagggtgcctctgtgctccatcctaggcaacagagtgagacgctgtttaaaaactcagcataagagatacactacgcaccatt

SEQ ID NO: 61897 - DNA, 1418 bp, Homo sapiens
ctcccttccaccagctggcacctcccttccaccagcctaagcgaaaacccatctctactaaaattacaaaaattagctgggcatggttgcgcatgcctgtaatcccagctactttggaggctgaggtggggagaattgcttgaacctgggaggtggaggttgcagtgagccaaggtcgcgacactgcactccagcctgggtgacagagtgagactccatctcaacagaaggaaaaaaaaaggaaaataggagaaggtggaaatgggtgaagagagaagtcccctcactagctgcatgagaaatctatcttactgtggttctccatgggcagcaggaccatttttcagaatcaagagggaggacagtgtgagaaggcgatgatccaaagaagacagagaggtcagccccacccgatccctcaaatgggctcttggaggcacccccaggggcagcccatttctcaaagtccagaaaattagggtcccagaagggggcagcagcaggctgggagttaggagggagagcagggtgccggccctgccaccaagttgagagctggaggggaggtggggagagaacatcacagagcagccagccctggttcactcctggcagtttcttctcaagctccttccctaggagcatggtggcacgtgcctgtggtctcagctacttgggaggctgaggcgggaggatcgccagagcccaggagtttgaggctgcagtgagctatgagggtgcctctgtgctccatcctaggcaacagagtgagacgctgtttaaaaaggaaaaaatccttccctagagctagtatcctaaagctgcagagctagcccagacctcattggtttccttgtccttggggtgcttttcctgaatctttgggggtgaagggagtgttgctcccagtccagaggcctgattctgttcggactgggttctcaagacacgaccaggttctcaagacacgagtccccttgttcctccccattaaagggggtttgtcagaagcaagaacagcccctctccccagtcacagcctgaagggaggccccgagagcttcctccttccccccacctgctccttaccttctctgccctgctttttagaactgcagttcattgttttaagggattgggggagggagcctggggacacaaaccttttatacaatacaaagctttgctttttttttttttttcttccttttccctttctcggttctcttctctcctctgaatggctgaagacccctctgccgagggaggttggggattgtgggacaaggtcccttggtgctgatggcctgaaggggcctgagctgtgggcagatgcagttttctgtgggcttggggaacctctcacgttgctgtgtcctggtgagcagcccgaccaataaacctgcttttctaaaaga

SEQ ID NO: 61898 - DNA, 1329 bp, Homo sapiens
ggacgcgtgggtccggacgcgtgggtcgacccacgcgtggggagaattgcttgaacctgggaggtggaggttgcagtgagccaaggtcgcgacactgcactccagcctgggtgacagagtgagactccatctcaacagaaggaaaaaaaaaggaaaataggagaaggtggaaatgggtgaagagagaagtcccctcactagctgcatgagaaatctatcttactgtggttctccatgggcagcaggaccatttttcagaatcaagagggaggacagtgtgagaaggcgatgatccaaagaagacagagaggtcagccccacccgatccctcaaatgggctcttggaggcacccccaggggcagcccatttctcaaagtccagaaaattagggtcccagaagggggcagcagcaggctgggagttaggagggagagcagggtgccggccctgccaccaagttgagagctggaggggaggtggggagagaacatcacagagcagccagccctggttcactcctggcagtttcttctcaagctccttccctaggagcatggtggcacgtgcctgtggtctcagctacttgggaggctgaggcgggaggatcgccagagcccaggagtttgaggctgcagtgagctatgagggtgcctctgtgctccatcctaggcaacagagtgagacgctgtttaaaaaggaaaaaatccttccctagagctagtatcctaaagctgcagagctagcccagacctcattggtttccttgtccttggggtgcttttcctgaatctttgggggtgaagggagtgttgctcccagtccagaggcctgattctgttcggactgggttctcaagacacgaccaggttctcaagacacgagtccccttgttcctccccattaaagggggtttgtcagaagcaagaacagcccctctccccagtcacagcctgaagggaggccccgagagcttcctccttccccccacctgctccttaccttctctgccctgctttttagaactgcagttcattgttttaagggattgggggagggagcctggggacacaaaccttttatacaatacaaagctttgctttttttttttttttcttccttttccctttctcggttctcttctctcctctgaatggctgaagacccctctgccgagggaggttggggattgtgggacaaggtcccttggtgctgatggcctgaaggggcctgagctgtgggcagatgcagttttctgtgggcttggggaacctctcacgttgctgtgtcctggtgagcagcccgaccaataaacctgcttttctaaaaga

SEQ ID NO: 61899 - DNA, 2669 bp, Homo sapiens
acctgattccgttcctcagctcgcattcctccgcccgtcccgctcccgccgccagcggaggccctagtctcccgctccaactattccaaccatcccgggaagggtggggcgctcggctcttgggtccccctccgccgccccgcctcgtcgatctccccttctaccccggtccctccctttctggggtggggccagccaatcagcgatcagactccggagtttggcccgggagctggggagctcaccgatcccccgcccagcagttctggccgctgtcccggtgcgcacggacgtggctcgagtttcctctgctctccgctctcgcccgctagctctcctcccttccgctcctgcttctctccgggtctcccgctccagctccagccccacccggccggtcccgcacggctccgggtagccatggaggaccccacgctctatattgtcgagcggccgcttcccgggtaccccgacgccgaggccccggagccttcctccgctggggctcaggcagcggaggagccgtcgggggccggctcagaagagctgatcaagtcggaccaggtgaacggcgtgctggtgctgagcctcctggacaaaatcatcggggccgtagaccagatccagctgactcaagcacagctggaggagcggcaggcggagatggagggcgcagtgcagagcatccagggcgagctgagcaagctgggcaaggcgcacgccaccacgagcaatacggtgagcaagctgctggagaaggtgcgcaaggtcagcgtcaacgtgaagaccgtgcgcggcagcctggagcgccaggcggggcagatcaagaagctggaggtcaacgaggccgagctgctgcggcgccgcaactttaaagtcatgatctaccaggatgaagtgaagctgccggccaaactgagcatcagcaaatcgctgaaagagtcggaggcgctgccagagaaggagggcgaggagctgggcgagggcgagcggcccgaggaggacgcagcggcgctggagctttcgtcggacgaggcggtggaggttgaggaggttattgaggagtcccgcgcagagcgtatcaagcgcagcggcctgcggcgcgtggacgacttcaagaaggccttctccaaggagaagatggagaagaccaaggtgcgtacccgcgagaacctggagaagacgcgcctcaagaccaaggaaaacctggagaagacgcggcacaccctggagaagcgcatgaacaagctgggcacgcgcctggtgcccgccgagcggcgcgagaaactgaagacgtcgcgggacaagttgcgcaaatccttcacgcccgaccacgtggtgtacgcgcgctccaagaccgcggtctacaaggtgccacccttcaccttccacgtcaagaagatccgcgagggccaggtggaagtgctcaaggccaccgagatggtggaggtgggcgccgacgacgacgagggcggcgcggagcgcggggaggccggcgacctgcggcgcgggagcagccccgacgtgcacgcgctgctggagatcaccgaggagtcggacgccgtgctggtggacaagagcgacagcgactgagccgcccccgctgccacccaccccattcctcgctccttccgaacttcctctttcgcattctctctcggctcgagctggctgagatttttctaaattgaaaacacgcccccctccccacacctccaggaactccactcccagtcttagagctgttaggacccgatggggaggcagcccccgcagtggacagcccccgcttggacacagtccgagtggaatgggaagggaatggtcaatccctgtcctggttgtccaagtcgggatctcagaggaaattgcagtgattccacggttaggcccccctgggggggctgccttcccctcagcctctccccacaccacccacccagctgctgtcattccgctcactgagctcttcttcattctcaccctgatccctgggggactcaaagccaaaactgcccaaagaggaaagattgaatcggaaaaaatccttccctagagctagtatcctaaagctgcagagctagcccagacctcattggtttccttgtccttggggtgcttttcctgaatctttgggggtgaagggagtgttgctcccagtccagaggcctgattctgttcggactgggttctcaagacacgaccaggttctcaagacacgagtccccttgttcctccccattaaagggggtttgtcagaagcaagaacagcccctctccccagtcacagcctgaagggaggccccgagagcttcctccttccccccacctgctccttaccttctctgccctgctttttagaactgcagttcattgttttaagggattgggggagggagcctggggacacaaaccttttatacaatacaaagctttgctttttttttttttttcttccttttccctttctcggttctcttctctcctctgaatggctgaagacccctctgccgagggaggttggggattgtgggacaaggtcccttggtgctgatggcctgaaggggcctgagctgtgggcagatgcagttttctgtgggcttggggaacctctcacgttgctgtgtcctggtgagcagcccgaccaataaacctgcttttctaaaaga

SEQ ID NO: 61900 - DNA, 1192 bp, Homo sapiens
tgcgaatcgtggtgctgctcctgggctcttaggcacatcatttcagatggaggttgcagctgtcctggggatgtggccaaggcttttggggcaggagctgacttcgtgatgctgggtggcatgctggctttgagtcccccagggatcagggtgagaatgaagaagagctcagtgagcggaatgacagcagctgggtgggtggtgtggggagaggctgaggggaaggcggatttctcaaagtccagaaaattagggtcccagaagggggcagcagcaggctgggagttaggagggagagcagggtgccggccctgccaccaagttgagagctggaggggaggtggggagagaacatcacagagcagccagccctggttcactcctggcagtttcttctcaagctccttccctaggagcatggtggcacgtgcctgtggtctcagctacttgggaggctgaggcgggaggatcgccagagcccaggagtttgaggctgcagtgagctatgagggtgcctctgtgctccatcctaggcaacagagtgagacgctgtttaaaaaggaaaaaatccttccctagagctagtatcctaaagctgcagagctagcccagacctcattggtttccttgtccttggggtgcttttcctgaatctttgggggtgaagggagtgttgctcccagtccagaggcctgattctgttcggactgggttctcaagacacgaccaggttctcaagacacgagtccccttgttcctccccattaaagggggtttgtcagaagcaagaacagcccctctccccagtcacagcctgaagggaggccccgagagcttcctccttccccccacctgctccttaccttctctgccctgctttttagaactgcagttcattgttttaagggattgggggagggagcctggggacacaaaccttttatacaatacaaagctttgctttttttttttttttcttccttttccctttctcggttctcttctctcctctgaatggctgaagacccctctgccgagggaggttggggattgtgggacaaggtcccttggtgctgatggcctgaaggggcctgagctgtgggcagatgcagttttctgtgggcttggggaacctctcacgttgctgtgtcctggtgagcagcccgaccaataaacctgcttttctaaaaga

SEQ ID NO: 61901 - DNA, 960 bp, Homo sapiens
gatctccttgaggatcccaagctctggaaaagggggcagcagcaggctgggagttaggagggagagcagggtgccggccctgccaccaagttgagagctggaggggaggtggggagagaacatcacagagcagccagccctggttcactcctggcagtttcttctcaagctccttccctaggagcatggtggcacgtgcctgtggtctcagctacttgggaggctgaggcgggaggatcgccagagcccaggagtttgaggctgcagtgagctatgagggtgcctctgtgctccatcctaggcaacagagtgagacgctgtttaaaaaggaaaaaatccttccctagagctagtatcctaaagctgcagagctagcccagacctcattggtttccttgtccttggggtgcttttcctgaatctttgggggtgaagggagtgttgctcccagtccagaggcctgattctgttcggactgggttctcaagacacgaccaggttctcaagacacgagtccccttgttcctccccattaaagggggtttgtcagaagcaagaacagcccctctccccagtcacagcctgaagggaggccccgagagcttcctccttccccccacctgctccttaccttctctgccctgctttttagaactgcagttcattgttttaagggattgggggagggagcctggggacacaaaccttttatacaatacaaagctttgctttttttttttttttcttccttttccctttctcggttctcttctctcctctgaatggctgaagacccctctgccgagggaggttggggattgtgggacaaggtcccttggtgctgatggcctgaaggggcctgagctgtgggcagatgcagttttctgtgggcttggggaacctctcacgttgctgtgtcctggtgagcagcccgaccaataaacctgcttttctaaaaga

SEQ ID NO: 61902 - DNA, 807 bp, Homo sapiens
acgggcggctaataatactaaattcgcgggccgttgacgcacgtgcctgtggtctcagctacttgggaggctgaggcgggaggatcgccagagcccaggagtttgaggctgcagtgagctatgagggtgcctctgtgctccatcctaggcaacagagtgagacgctgtttaaaaaggaaaaaatccttccctagagctagtatcctaaagctgcagagctagcccagacctcattggtttccttgtccttggggtgcttttcctgaatctttgggggtgaagggagtgttgctcccagtccagaggcctgattctgttcggactgggttctcaagacacgaccaggttctcaagacacgagtccccttgttcctccccattaaagggggtttgtcagaagcaagaacagcccctctccccagtcacagcctgaagggaggccccgagagcttcctccttccccccacctgctccttaccttctctgccctgctttttagaactgcagttcattgttttaagggattgggggagggagcctggggacacaaaccttttatacaatacaaagctttgctttttttttttttttcttccttttccctttctcggttctcttctctcctctgaatggctgaagacccctctgccgagggaggttggggattgtgggacaaggtcccttggtgctgatggcctgaaggggcctgagctgtgggcagatgcagttttctgtgggcttggggaacctctcacgttgctgtgtcctggtgagcagcccgaccaataaacctgcttttctaaaaga

SEQ ID NO: 61903 - DNA, 2388 bp, Homo sapiens
  misc_feature (2366)..(2366): n is a, c, g, or t
acctgattccgttcctcagctcgcattcctccgcccgtcccgctcccgccgccagcggaggccctagtctcccgctccaactattccaaccatcccgggaagggtggggcgctcggctcttgggtccccctccgccgccccgcctcgtcgatctccccttctaccccggtccctccctttctggggtggggccagccaatcagcgatcagactccggagtttggcccgggagctggggagctcaccgatcccccgcccagcagttctggccgctgtcccggtgcgcacggacgtggctcgagtttcctctgctctccgctctcgcccgctagctctcctcccttccgctcctgcttctctccgggtctcccgctccagctccagccccacccggccggtcccgcacggctccgggtagccatggaggaccccacgctctatattgtcgagcggccgcttcccgggtaccccgacgccgaggccccggagccttcctccgctggggctcaggcagcggaggagccgtcgggggccggctcagaagagctgatcaagtcggaccaggtgaacggcgtgctggtgctgagcctcctggacaaaatcatcggggccgtagaccagatccagctgactcaagcacagctggaggagcggcaggcggagatggagggcgcagtgcagagcatccagggcgagctgagcaagctgggcaaggcgcacgccaccacgagcaatacggtgagcaagctgctggagaaggtgcgcaaggtcagcgtcaacgtgaagaccgtgcgcggcagcctggagcgccaggcggggcagatcaagaagctggaggtcaacgaggccgagctgctgcggcgccgcaactttaaagtcatgatctaccaggatgaagtgaagctgccggccaaactgagcatcagcaaatcgctgaaagagtcggaggcgctgccagagaaggagggcgaggagctgggcgagggcgagcggcccgaggaggacgcagcggcgctggagctttcgtcggacgaggcggtggaggttgaggaggttattgaggagtcccgcgcagagcgtatcaagcgcagcggcctgcggcgcgtggacgacttcaagaaggccttctccaaggagaagatggagaagaccaaggtgcgtacccgcgagaacctggagaagacgcgcctcaagaccaaggaaaacctggagaagacgcggcacaccctggagaagcgcatgaacaagctgggcacgcgcctggtgcccgccgagcggcgcgagaaactgaagacgtcgcgggacaagttgcgcaaatccttcacgcccgaccacgtggtgtacgcgcgctccaagaccgcggtctacaaggtgccacccttcaccttccacgtcaagaagatccgcgagggccaggtggaagtgctcaaggccaccgagatggtggaggtgggcgccgacgacgacgagggcggcgcggagcgcggggaggccggcgacctgcggcgcgggagcagccccgacgtgcacgcgctgctggagatcaccgaggagtcggacgccgtgctggtggacaagagcgacagcgactgagccgcccccgctgccacccaccccattcctcgctccttccgaacttcctctttcgcattctctctcggctcgagctggctgagatttttctaaattgaaaacacgcccccctccccacacctccaggaactccactcccagtcttagagctgttaggacccgatggggaggcagcccccgcagtggacagcccccgcttggacacagtccgagtggaatgggaagggaatggtcaatccctgtcctggttgtccaagtcgggatctcagaggaaattgcagtgattccacggttaggcccccctgggggggctgccttcccctcagcctctccccacaccacccacccagctgctgtcattccgctcactgagctcttcttcattctcaccctgatccctgggggactcaaagccaaaactgcccaaagaggaaagattgaatcagaaaaaaaaaaaacaaaaaaaaaaaaattttgtgggcggctctgggccttggaaaaaggttttttaagacacattggggtggggcgcgcggggcccaagtcaggtcgagtgtgaacccatggggccaaagctgggacacccaaaggaagacaccggggaacaggaacacagtcgctggggatctcccacgcaaatagaaaaaaagagcgccggggggagcaacacggaagcgttctggaacaactccccgagggggcgtgtcacgaacgagcctcaaccggatgcctcaccaacaaggagtgccaaacggagtccggatatccaattnaacgccggcacggagaggagcg

SEQ ID NO: 61904 - DNA, 635 bp, Homo sapiens
tcggtacccgactctctgtggggggcaactgttgccactgctgctgttgttcaagaggcttctagtttccttgtccttggggtgcttttcctgaatctttgggggtgaagggagtgttgctcccagtccagaggcctgattctgttcggactgggttctcaagacacgaccaggttctcaagacacgagtccccttgttcctccccattaaagggggtttgtcagaagcaagaacagcccctctccccagtcacagcctgaagggaggccccgagagcttcctccttccccccacctgctccttaccttctctgccctgctttttagaactgcagttcattgttttaagggattgggggagggagcctggggacacaaaccttttatacaatacaaagctttgctttttttttttttttcttccttttccctttctcggttctcttctctcctctgaatggctgaagacccctctgccgagggaggttggggattgtgggacaaggtcccttggtgctgatggcctgaaggggcctgagctgtgggcagatgcagttttctgtgggcttggggaacctctcacgttgctgtgtcctggtgagcagcccgaccaataaacctgcttttctaaaaga

SEQ ID NO: 61905 - DNA, 373 bp, Homo sapiens
cccctcttaatgtgtgcccaggctgccccccacctgctccttaccttctctgccctgctttttagaactgcagttcattgttttaagggattgggggagggagcctggggacacaaaccttttatacaatacaaagctttgctttttttttttttttcttccttttccctttctcggttctcttctctcctctgaatggctgaagacccctctgccgagggaggttggggattgtgggacaaggtcccttggtgctgatggcctgaaggggcctgagctgtgggcagatgcagttttctgtgggcttggggaacctctcacgttgctgtgtcctggtgagcagcccgaccaataaacctgcttttctaaaaga

SEQ ID NO: 61906 - DNA, 930 bp, Homo sapiens
acctgattccgttcctcagctcgcattcctccgcccgtcccgctcccgccgccagcggaggccctagtctcccgctccaactattccaaccatcccgggaagggtggggcgctcggctcttgggtccccctccgccgccccgcctcgtcgatctccccttctaccccggtccctccctttctggggtggggccagccaatcagcgatcagactccggagtttggcccgggagctggggagctcaccgatcccccgcccagcagttctggccgctgtcccggtgcgcacggacgtggctcgagtttcctctgctctccgctctcgcccgctagctctcctcccttccgctcctgcttctctccgggtctcccgctccagctccagccccacccggccggtcccgcacggctccgggtagccatggaggaccccacgctctatattgtcgagcggccgcttcccgggtaccccgacgccgaggccccggagccttcctccgctggggctcaggcagcggaggagccgtcgggggccggctcagaagagctgatcaagtcggaccaggtgaacggcgtgctggtgctgagcctcctggacaaaatcatcggggccgtagaccagatccagctgactcaagcacagctggaggagcggcaggcggagatggagggcgcagtgcagagcatccagggcgagctgagcaagctgggcaaggcgcacgccaccacgagcaatacggtgagcaagctgctggagaaggtgcgcaaggtcagcgtcaacgtgaagaccgtgcgcggcagcctggagcgccaggcggggcagatcaagaagctggaggtcaacgaggccgagctgctgcggcgccgcaactttaaagtcatgatctaccaggatgaagtgaagctgccgcgcacgcctcgtgccgaattc

SEQ ID NO: 61907 - DNA, 3831 bp, Homo sapiens
acctgattccgttcctcagctcgcattcctccgcccgtcccgctcccgccgccagcggaggccctagtctcccgctccaactattccaaccatcccgggaagggtggggcgctcggctcttgggtccccctccgccgccccgcctcgtcgatctccccttctaccccggtccctccctttctggggtggggccagccaatcagcgatcagactccggagtttggcccgggagctggggagctcaccgatcccccgcccagcagttctggccgctgtcccggtgcgcacggacgtggctcgagtttcctctgctctccgctctcgcccgctagctctcctcccttccgctcctgcttctctccgggtctcccgctccagctccagccccacccggccggtcccgcacggctccgggtagccatggaggaccccacgctctatattgtcgagcggccgcttcccgggtaccccgacgccgaggccccggagccttcctccgctggggctcaggcagcggaggagccgtcgggggccggctcagaagagctgatcaagtcggaccaggtgaacggcgtgctggtgctgagcctcctggacaaaatcatcggggccgtagaccagatccagctgactcaagcacagctggaggagcggcaggcggagatggagggcgcagtgcagagcatccagggcgagctgagcaagctgggcaaggcgcacgccaccacgagcaatacggtgagcaagctgctggagaaggtgcgcaaggtcagcgtcaacgtgaagaccgtgcgcggcagcctggagcgccaggcggggcagatcaagaagctggaggtcaacgaggccgagctgctgcggcgccgcaactttaaagtcatgatctaccaggatgaagtgaagctgccggccaaactgagcatcagcaaatcgctgaaagagtcggaggcgctgccagagaaggagggcgaggagctgggcgagggcgagcggcccgaggaggacgcagcggcgctggagctttcgtcggacgaggcggtggaggttgaggaggttattgaggagtcccgcgcagagcgtatcaagcgcagcggcctgcggcgcgtggacgacttcaagaaggccttctccaaggagaagatggagaagaccaaggtgcgtacccgcgagaacctggagaagacgcgcctcaagaccaaggaaaacctggagaagacgcggcacaccctggagaagcgcatgaacaagctgggcacgcgcctggtgcccgccgagcggcgcgagaaactgaagacgtcgcgggacaagttgcgcaaatccttcacgcccgaccacgtggtgtacgcgcgctccaagaccgcggtctacaaggtgccacccttcaccttccacgtcaagaagatccgcgagggccaggtggaagtgctcaaggccaccgagatggtggaggtgggcgccgacgacgacgagggcggcgcggagcgcggggaggccggcgacctgcggcgcgggagcagccccgacgtgcacgcgctgctggagatcaccgaggagtcggacgccgtgctggtggacaagagcgacagcgactgagccgcccccgctgccacccaccccattcctcgctccttccgaacttcctctttcgcattctctctcggctcgagctggctgagatttttctaaattgaaaacacgcccccctccccacacctccaggaactccactcccagtcttagagctgttaggacccgatggggaggcagcccccgcagtggacagcccccgcttggacacagtccgagtggaatgggaagggaatggtcaatccctgtcctggttgtccaagtcgggatctcagaggaaattgcagtgattccacggttaggcccccctgggggggctgccttcccctcagcctctccccacaccacccacccagctgctgtcattccgctcactgagctcttcttcattctcaccctgatccctgggggactcaaagccaaaactgcccaaagaggaaagattgaatcctaaaggggatccttgcccccatgggaggccccctactagaaggacgtgaaagcagcttttgggggaaactgaggcagtggggaagacagagcagaatgagccctcaccctggctgggggtccagcacaggctgtatctgcagagggtcccagaggaacgctggagccaagagaagccctgggaaggaggggtggggaacgacatgcatgtgagggatggcacactgatgtgtttatgcacctgtacacaggagcgcatggccatggctttggaaaggagaatggaaaaatagaagaaggtcggccgggcttggtggcttaagcctgtaaccccagcactttgggaggccgaggtgggcggatcacctgaggtcaggagttcgggaccagcctggcaaacaccccatctctactaagcgaaaacccatctctactaaaattacaaaaattagctgggcatggttgcgcatgcctgtaatcccagctactttggaggctgaggtggggagaattgcttgaacctgggaggtggaggttgcagtgagccaaggtcgcgacactgcactccagcctgggtgacagagtgagactccatctcaacagaaggaaaaaaaaaggaaaataggagaaggtggaaatgggtgaagagagaagtcccctcactagctgcatgagaaatctatcttactgtggttctccatgggcagcaggaccatttttcagaatcaagagggaggacagtgtgagaaggcgatgatccaaagaagacagagaggtcagccccacccgatccctcaaatgggctcttggaggcacccccaggggcagcccatttctcaaagtccagaaaattagggtcccagaagggggcagcagcaggctgggagttaggagggagagcagggtgccggccctgccaccaagttgagagctggaggggaggtggggagagaacatcacagagcagccagccctggttcactcctggcagtttcttctcaagctccttccctaggagcatggtggcacgtgcctgtggtctcagctacttgggaggctgaggcgggaggatcgccagagcccaggagtttgaggctgcagtgagctatgagggtgcctctgtgctccatcctaggcaacagagtgagacgctgtttaaaaaggaaaaaatccttccctagagctagtatcctaaagctgcagagctagcccagacctcattggtttccttgtccttggggtgcttttcctgaatctttgggggtgaagggagtgttgctcccagtccagaggcctgattctgttcggactgggttctcaagacacgaccaggttctcaagacacgagtccccttgttcctccccattaaagggggtttgtcagaagcaagaacagcccctctccccagtcacagcctgaagggaggccccgagagcttcctccttccccccacctgctccttaccttctctgccctgctttttagaactgcagttcattgttttaagggattgggggagggagcctggggacacaaaccttttatacaatacaaagctttgctttttttttttttttcttccttttccctttctcggttctcttctctcctctgaatggctgaagacccctctgccgagggaggttggggattgtgggacaaggtcccttggtgctgatggcctgaaggggcctgagctgtgggcagatgcagttttctgtgggcttggggaacctctcacgttgctgtgtcctggtgagcagcccgaccaataaacctgcttttctaaaaga

SEQ ID NO: 61908 - DNA, 3886 bp, Homo sapiens
acctgattccgttcctcagctcgcattcctccgcccgtcccgctcccgccgccagcggaggccctagtctcccgctccaactattccaaccatcccgggaagggtggggcgctcggctcttgggtccccctccgccgccccgcctcgtcgatctccccttctaccccggtccctccctttctggggtggggccagccaatcagcgatcagactccggagtttggcccgggagctggggagctcaccgatcccccgcccagcagttctggccgctgtcccggtgcgcacggacgtggctcgagtttcctctgctctccgctctcgcccgctagctctcctcccttccgctcctgcttctctccgggtctcccgctccagctccagccccacccggccggtcccgcacggctccgggtagccatggaggaccccacgctctatattgtcgagcggccgcttcccgggtaccccgacgccgaggccccggagccttcctccgctggggctcaggcagcggaggagccgtcgggggccggctcagaagagctgatcaagtcggaccaggtgaacggcgtgctggtgctgagcctcctggacaaaatcatcggggccgtagaccagatccagctgactcaagcacagctggaggagcggcaggcggagatggagggcgcagtgcagagcatccagggcgagctgagcaagctgggcaaggcgcacgccaccacgagcaatacggtgagcaagctgctggagaaggtgcgcaaggtcagcgtcaacgtgaagaccgtgcgcggcagcctggagcgccaggcggggcagatcaagaagctggaggtcaacgaggccgagctgctgcggcgccgcaactttaaagtcatgatctaccaggatgaagtgaagctgccggccaaactgagcatcagcaaatcgctgaaagagtcggaggcgctgccagagaaggagggcgaggagctgggcgagggcgagcggcccgaggaggacgcagcggcgctggagctttcgtcggacgaggcggtggaggttgaggaggttattgaggagtcccgcgcagagcgtatcaagcgcagcggcctgcggcgcgtggacgacttcaagaaggccttctccaaggagaagatggagaagaccaaggtgcgtacccgcgagaacctggagaagacgcgcctcaagaccaaggaaaacctggagaagacgcggcacaccctggagaagcgcatgaacaagctgggcacgcgcctggtgcccgccgagcggcgcgagaaactgaagacgtcgcgggacaagttgcgcaaatccttcacgcccgaccacgtggtgtacgcgcgctccaagaccgcggtctacaaggtgccacccttcaccttccacgtcaagaagatccgcgagggccaggtggaagtgctcaaggccaccgagatggtggaggtgggcgccgacgacgacgagggcggcgcggagcgcggggaggccggcgacctgcggcgcgggagcagccccgacgtgcacgcgctgctggagatcaccgaggagtcggacgccgtgctggtggacaagagcgacagcgactgagccgcccccgctgccacccaccccattcctcgctccttccgaacttcctctttcgcattctctctcggctcgagctggctgagatttttctaaattgaaaacacgcccccctccccacacctccaggaactccactcccagtcttagagctgttaggacccgatggggaggcagcccccgcagtggacagcccccgcttggacacagtccgagtggaatgggaagggaatggtcaatccctgtcctggttgtccaagtcgggatctcagaggaaattgcagtgattccacggttaggcccccctgggggggctgccttcccctcagcctctccccacaccacccacccagctgctgtcattccgctcactgagctcttcttcattctcaccctgatccctgggggactcaaagccaaaactgcccaaagaggaaagattgaatcctaaaggggatccttgcccccatgggaggccccctactagaaggacgtgaaagcagcttttgggggaaactgaggcagtggggaagacagagcagaatgagccctcaccctggctgggggtccagcacaggctgtatctgcagagggtcccagaggaacgctggagccaagagaagccctgggaaggaggggtggggaacgacatgcatgtgagggatggcacactgatgtgtttatgcacctgtacacaggagcgcatggccatggctttggaaaggagaatggaaaaatagaagaaggtcggccgggcttggtggcttaagcctgtaaccccagcactttgggaggccgaggtgggcggatcacctgaggtcaggagttcgggaccagcctggcaaacaccccatctctactaagcgaaaacccatctctactaaaattacaaaaattagctgggcatggttgcgcatgcctgtaatcccagctactttggaggctgaggtggggagaattgcttgaacctgggaggtggaggttgcagtgagccaaggtcgcgacactgcactccagcctgggtgacagagtgagactccatctcaacagaaggaaaaaaaaaggaaaataggagaaggtggaaatgggtgaagagagaagtcccctcactagctgcatgagaaatctatcttactgtggttctccatgggcagcaggaccatttttcagaatcaagagggaggacagtgtgagaaggcgatgatccaaagaagacagagaggtcagccccacccgatccctcaaatgggctcttggaggcacccccaggggcagcccatttctcaaagtccagaaaattagggtcccagaagggggcagcagcaggctgggagttaggagggagagcagggtgccggccctgccaccaagttgagagctggaggggaggtggggagagaacatcacagagcagccagccctggttcactcctggcagtttcttctcaagctccttccctaggagcatggtggcacgtgcctgtggtctcagctacttgggaggctgaggcgggaggatcgccagagcccaggagtttgaggctgcagtgagctatgagggtgcctctgtgctccatcctaggcaacagagtgagacgctgtttaaaaaggaaaaaatccttccctagagctagtatcctaaagctgcagagctagcccagacctcattggtttccttgtccttggggtgcttttcctgaatctttgggggtgaagggagtgttgctcccagtccagaggcctgattctgttcggactgggttctcaagacacgaccaggttctcaagacacgagtccccttgttcctccccattaaagggggtttgtcagaagcaagaacagcccctctccccagtcacagcctgaagggaggccccgagagcttcctccttccccccacctgctccttaccttctctgccctgctttttagaactgcagttcattgttttaagggattgggggagggagcctggggacacaaaccttttatacaatacaaagctttgctttttttttttttttcttccttttccctttctcggttctcttctctcctctgaatggctgaagacccctctgccgagggaggttggggattgtgggacaaggtcccttggtgctgatggcctgaaggggcctgagctgtgggcagatgcagttttctgtgggcttggggaacctctcacgttgctgtgtcctggtgagcagcccgaccaataaacctgcttttctaaaagaaaaacaataatcactatacacacacaaacacacactcaatcaacacaaaaggggg

SEQ ID NO: 61909 - DNA, 3669 bp, Homo sapiens
acctgattccgttcctcagctcgcattcctccgcccgtcccgctcccgccgccagcggaggccctagtctcccgctccaactattccaaccatcccgggaagggtggggcgctcggctcttgggtccccctccgccgccccgcctcgtcgatctccccttctaccccggtccctccctttctggggtggggccagccaatcagcgatcagactccggagtttggcccgggagctggggagctcaccgatcccccgcccagcagttctggccgctgtcccggtgcgcacggacgtggctcgagtttcctctgctctccgctctcgcccgctagctctcctcccttccgctcctgcttctctccgggtctcccgctccagctccagccccacccggccggtcccgcacggctccgggtagccatggaggaccccacgctctatattgtcgagcggccgcttcccgggtaccccgacgccgaggccccggagccttcctccgctggggctcaggcagcggaggagccgtcgggggccggctcagaagagctgatcaagtcggaccaggtgaacggcgtgctggtgctgagcctcctggacaaaatcatcggggccgtagaccagatccagctgactcaagcacagctggaggagcggcaggcggagatggagggcgcagtgcagagcatccagggcgagctgagcaagctgggcaaggcgcacgccaccacgagcaatacggtgagcaagctgctggagaaggtgcgcaaggtcagcgtcaacgtgaagaccgtgcgcggcagcctggagcgccaggcggggcagatcaagaagctggaggtcaacgaggccgagctgctgcggcgccgcaactttaaagtcatgatctaccaggatgaagtgaagctgccggccaaactgagcatcagcaaatcgctgaaagagtcggaggcgctgccagagaaggagggcgaggagctgggcgagggcgagcggcccgaggaggacgcagcggcgctggagctttcgtcggacgaggcggtggaggttgaggaggttattgaggagtcccgcgcagagcgtatcaagcgcagcggcctgcggcgcgtggacgacttcaagaaggccttctccaaggagaagatggagaagaccaaggtgcgtacccgcgagaacctggagaagacgcgcctcaagaccaaggaaaacctggagaagacgcggcacaccctggagaagcgcatgaacaagctgggcacgcgcctggtgcccgccgagcggcgcgagaaactgaagacgtcgcgggacaagttgcgcaaatccttcacgcccgaccacgtggtgtacgcgcgctccaagaccgcggtctacaaggtgccacccttcaccttccacgtcaagaagatccgcgagggccaggtggaagtgctcaaggccaccgagatggtggaggtgggcgccgacgacgacgagggcggcgcggagcgcggggaggccggcgacctgcggcgcgggagcagccccgacgtgcacgcgctgctggagatcaccgaggagtcggacgccgtgctggtggacaagagcgacagcgactgagccgcccccgctgccacccaccccattcctcgctccttccgaacttcctctttcgcattctctctcggctcgagctggctgagatttttctaaattgaaaacacgcccccctccccacacctccaggaactccactcccagtcttagagctgccttcccctcagcctctccccacaccacccacccagctgctgtcattccgctcactgagctcttcttcattctcaccctgatccctgggggactcaaagccaaaactgcccaaagaggaaagattgaatcctaaaggggatccttgcccccatgggaggccccctactagaaggacgtgaaagcagcttttgggggaaactgaggcagtggggaagacagagcagaatgagccctcaccctggctgggggtccagcacaggctgtatctgcagagggtcccagaggaacgctggagccaagagaagccctgggaaggaggggtggggaacgacatgcatgtgagggatggcacactgatgtgtttatgcacctgtacacaggagcgcatggccatggctttggaaaggagaatggaaaaatagaagaaggtcggccgggcttggtggcttaagcctgtaaccccagcactttgggaggccgaggtgggcggatcacctgaggtcaggagttcgggaccagcctggcaaacaccccatctctactaagcgaaaacccatctctactaaaattacaaaaattagctgggcatggttgcgcatgcctgtaatcccagctactttggaggctgaggtggggagaattgcttgaacctgggaggtggaggttgcagtgagccaaggtcgcgacactgcactccagcctgggtgacagagtgagactccatctcaacagaaggaaaaaaaaaggaaaataggagaaggtggaaatgggtgaagagagaagtcccctcactagctgcatgagaaatctatcttactgtggttctccatgggcagcaggaccatttttcagaatcaagagggaggacagtgtgagaaggcgatgatccaaagaagacagagaggtcagccccacccgatccctcaaatgggctcttggaggcacccccaggggcagcccatttctcaaagtccagaaaattagggtcccagaagggggcagcagcaggctgggagttaggagggagagcagggtgccggccctgccaccaagttgagagctggaggggaggtggggagagaacatcacagagcagccagccctggttcactcctggcagtttcttctcaagctccttccctaggagcatggtggcacgtgcctgtggtctcagctacttgggaggctgaggcgggaggatcgccagagcccaggagtttgaggctgcagtgagctatgagggtgcctctgtgctccatcctaggcaacagagtgagacgctgtttaaaaaggaaaaaatccttccctagagctagtatcctaaagctgcagagctagcccagacctcattggtttccttgtccttggggtgcttttcctgaatctttgggggtgaagggagtgttgctcccagtccagaggcctgattctgttcggactgggttctcaagacacgaccaggttctcaagacacgagtccccttgttcctccccattaaagggggtttgtcagaagcaagaacagcccctctccccagtcacagcctgaagggaggccccgagagcttcctccttccccccacctgctccttaccttctctgccctgctttttagaactgcagttcattgttttaagggattgggggagggagcctggggacacaaaccttttatacaatacaaagctttgctttttttttttttttcttccttttccctttctcggttctcttctctcctctgaatggctgaagacccctctgccgagggaggttggggattgtgggacaaggtcccttggtgctgatggcctgaaggggcctgagctgtgggcagatgcagttttctgtgggcttggggaacctctcacgttgctgtgtcctggtgagcagcccgaccaataaacctgcttttctaaaaga

SEQ ID NO: 61910 - DNA, 3571 bp, Homo sapiens
acctgattccgttcctcagctcgcattcctccgcccgtcccgctcccgccgccagcggaggccctagtctcccgctccaactattccaaccatcccgggaagggtggggcgctcggctcttgggtccccctccgccgccccgcctcgtcgatctccccttctaccccggtccctccctttctggggtggggccagccaatcagcgatcagactccggagtttggcccgggagctggggagctcaccgatcccccgcccagcagttctggccgctgtcccggtgcgcacggacgtggctcgagtttcctctgctctccgctctcgcccgctagctctcctcccttccgctcctgcttctctccgggtctcccgctccagctccagccccacccggccggtcccgcacggctccgggtagccatggaggaccccacgctctatattgtcgagcggccgcttcccgggtaccccgacgccgaggccccggagccttcctccgctggggctcaggcagcggaggagccgtcgggggccggctcagaagagctgatcaagtcggaccaggtgaacggcgtgctggtgctgagcctcctggacaaaatcatcggggccgtagaccagatccagctgactcaagcacagctggaggagcggcaggcggagatggagggcgcagtgcagagcatccagggcgagctgagcaagctgggcaaggcgcacgccaccacgagcaatacggtgagcaagctgctggagaaggtgcgcaaggtcagcgtcaacgtgaagaccgtgcgcggcagcctggagcgccaggcggggcagatcaagaagctggaggtcaacgaggccgagctgctgcggcgccgcaactttaaagtcatgatctaccaggatgaagtgaagctgccggccaaactgagcatcagcaaatcgctgaaagagtcggaggcgctgccagagaaggagggcgaggagctgggcgagggcgagcggcccgaggaggacgcagcggcgctggagctttcgtcggacgaggcggtggaggttgaggaggttattgaggagtcccgcgcagagcgtatcaagcgcagcggcctgcggcgcgtggacgacttcaagaaggccttctccaaggagaagatggagaagaccaaggtgcgtacccgcgagaacctggagaagacgcgcctcaagaccaaggaaaacctggagaagacgcggcacaccctggagaagcgcatgaacaagctgggcacgcgcctggtgcccgccgagcggcgcgagaaactgaagacgtcgcgggacaagttgcgcaaatccttcacgcccgaccacgtggtgtacgcgcgctccaagaccgcggtctacaaggtgccacccttcaccttccacgtcaagaagatccgcgagggccaggtggaagtgctcaaggccaccgagatggtggaggtgggcgccgacgacgacgagggcggcgcggagcgcggggaggccggcgacctgcggcgcgggagcagccccgacgtgcacgcgctgctggagatcaccgaggagtcggacgccgtgctggtggacaagagcgacagcgactgagccgcccccgctgccacccaccccattcctcgctccttccgaacttcctctttcgcattctctctcggctcgagctggctgagatttttctaaattgaaaacacgcccccctccccacacctccaggaactccactcccagtcttagagctgttaggacccgatggggaggcagcccccgcagtggacagcccccgcttggacacagtccgagtggaatgggaagggaatggtcaatccctgtcctggttgtccaagtcgggatctcagaggaaattgcagtgattccacggttaggcccccctgggggggctgccttcccctcagcctctccccacaccacccacccagctgctgtcattccgctcactgagctcttcttcattctcaccctgatccctgggggactcaaagccaaaactgcccaaagaggaaagattgaatcctaaaggggatccttgcccccatgggaggccccctactagaaggacgtgaaagcagcttttgggggaaactgaggcagtggggaagacagagcagaatgagccctcaccctggctgggggtccagcacaggctgtatctgcagagggtcccagaggaacgctggagccaagagaagccctgggaaggaggggtggggaacgacatgcatgtgagggatggcacactgatgtgtttatgcacctgtacacaggagcgcatggccatggctttggaaaggagaatggaaaaatagaagaaggtcggccgggcttggtggcttaagcctgtaaccccagcactttgggaggccgaggtgggcggatcacctgaggtcaggagttcgggaccagcctggcaaacaccccatctctactaagcgaaaacccatctctactaaaattacaaaaattagctgggcatggttgcgcatgcctgtaatcccagctactttggaggctgaggtggggagaattgcttgaacctgggaggtggaggttgcagtgagccaaggtcgcgacactgcactccagcctgggtgacagagtgagactccatctcaacagaaggaaaaaaaaaggaaaataggagaaggtggaaatgggtgaagagagaagtcccctcactagctgcatgagaaatctatcttactgtggttctccatgggcagcaggaccatttttcagaatcaagagggaggacagtgtgagaaggcgatgatccaaagaagacagagaggtcagccccacccgatccctcaaatgggctcttggaggcacccccaggggcagcccatttctcaaagtccagaaaattagggtcccagaagggggcagcagcaggctgggagttaggagggagagcagggtgccggccctgccaccaagttgagagctggaggggaggtggggagagaacatcacagagcagccagccctggttcactcctggcagtttcttctcaagctccttccctaggagcatggtggcacgtgcctgtggtctcagctacttgggaggctgaggcgggaggatcgccagagcccaggagtttgaggctgcagtgagctatgagggtgcctctgtgctccatcctaggcaacagagtgagacgctgtttaaaaaggaaaaaatccttccctagagctagtatcctaaagctgcagagctagcccagacctcattggtttccttgtccttggggtgcttttcctgaatctttgggggtgaagggagtgttgctcccagtccagaggcctgattctgttcggactgggttctcaagacacgaccaggttctcaagacacgagtccccttgttcctccccattaaagggggtttgtcagaagcaagaacagcccctctccccaatgcgccggcgcttggggggtttaggctgaaggagaatgtccagtttcatctgtacatcagcacctctccctgtggagatgccagaatcttcccaccacgagccgcacaacgagccacacaaagcg

SEQ ID NO: 61911 - DNA, 3391 bp, Homo sapiens
acctgattccgttcctcagctcgcattcctccgcccgtcccgctcccgccgccagcggaggccctagtctcccgctccaactattccaaccatcccgggaagggtggggcgctcggctcttgggtccccctccgccgccccgcctcgtcgatctccccttctaccccggtccctccctttctggggtggggccagccaatcagcgatcagactccggagtttggcccgggagctggggagctcaccgatcccccgcccagcagttctggccgctgtcccggtgcgcacggacgtggctcgagtttcctctgctctccgctctcgcccgctagctctcctcccttccgctcctgcttctctccgggtctcccgctccagctccagccccacccggccggtcccgcacggctccgggtagccatggaggaccccacgctctatattgtcgagcggccgcttcccgggtaccccgacgccgaggccccggagccttcctccgctggggctcaggcagcggaggagccgtcgggggccggctcagaagagctgatcaagtcggaccaggtgaacggcgtgctggtgctgagcctcctggacaaaatcatcggggccgtagaccagatccagctgactcaagcacagctggaggagcggcaggcggagatggagggcgcagtgcagagcatccagggcgagctgagcaagctgggcaaggcgcacgccaccacgagcaatacggtgagcaagctgctggagaaggtgcgcaaggtcagcgtcaacgtgaagaccgtgcgcggcagcctggagcgccaggcggggcagatcaagaagctggaggtcaacgaggccgagctgctgcggcgccgcaactttaaagtcatgatctaccaggatgaagtgaagctgccggccaaactgagcatcagcaaatcgctgaaagagtcggaggcgctgccagagaaggagggcgaggagctgggcgagggcgagcggcccgaggaggacgcagcggcgctggagctttcgtcggacgaggcggtggaggttgaggaggttattgaggagtcccgcgcagagcgtatcaagcgcagcggcctgcggcgcgtggacgacttcaagaaggccttctccaaggagaagatggagaagaccaaggtgcgtacccgcgagaacctggagaagacgcgcctcaagaccaaggaaaacctggagaagacgcggcacaccctggagaagcgcatgaacaagctgggcacgcgcctggtgcccgccgagcggcgcgagaaactgaagacgtcgcgggacaagttgcgcaaatccttcacgcccgaccacgtggtgtacgcgcgctccaagaccgcggtctacaaggtgccacccttcaccttccacgtcaagaagatccgcgagggccaggtggaagtgctcaaggccaccgagatggtggaggtgggcgccgacgacgacgagggcggcgcggagcgcggggaggccggcgacctgcggcgcgggagcagccccgacgtgcacgcgctgctggagatcaccgaggagtcggacgccgtgctggtggacaagagcgacagcgactgagccgcccccgctgccacccaccccattcctcgctccttccgaacttcctctttcgcattctctctcggctcgagctggctgagatttttctaaattgaaaacacgcccccctccccacacctccaggaactccactcccagtcttagagctgttaggacccgatggggaggcagcccccgcagtggacagcccccgcttggacacagtccgagtggaatgggaagggaatggtcaatccctgtcctggttgtccaagtcgggatctcagaggaaattgcagtgattccacggttaggcccccctgggggggctgccttcccctcagcctctccccacaccacccacccagctgctgtcattccgctcactgagctcttcttcattctcaccctgatccctgggggactcaaagccaaaactgcccaaagaggaaagattgaatcctaaaggggatccttgcccccatgggaggccccctactagaaggacgtgaaagcagcttttgggggaaactgaggcagtggggaagacagagcagaatgagccctcaccctggctgggggtccagcacaggctgtatctgcagagggtcccagaggaacgctggagccaagagaagccctgggaaggaggggtggggaacgacatgcatgtgagggatggcacactgatgtgtttatgcacctgtacacaggagcgcatggccatggctttggaaaggagaatggaaaaatagaagaaggtcggccgggcttggtggcttaagcctgtaaccccagcactttgggaggccgaggtgggcggatcacctgaggtcaggagttcgggaccagcctggcaaacaccccatctctactaagcgaaaacccatctctactaaaattacaaaaattagctgggcatggttgcgcatgcctgtaatcccagctactttggaggctgaggtggggagaattgcttgaacctgggaggtggaggttgcagtgagccaaggtcgcgacactgcactccagcctgggtgacagagtgagactccatctcaacagaaggaaaaaaaaaggaaaataggagaaggtggaaatgggtgaagagagaagtcccctcactagctgcatgagaaatctatcttactgtggttctccatgggcagcaggaccatttttcagaatcaagagggaggacagtgtgagaaggcgatgatccaaagaagacagagaggtcagccccacccgatccctcaaatgggctcttggaggcacccccaggggcagcccatttctcaaagtccagaaaattagggtcccagaagggggcagcagcaggctgggagttaggagggagagcagggtgccggccctgccaccaagttgagagctggaggggaggtggggagagaacatcacagagcagccagccctggttcactcctggcagtttcttctcaagctccttccctaggagcatggtggcacgtgcctgtggtctcagctacttgggaggctgaggcgggaggatcgccagagcccaggagtttgaggctgcagtgagctatgagggtgcctctgtgctccatcctaggcaacagagtgagacgctgtttaaaaattcgtctcagacaaacaaaaaaattagccgggcatggttggcaggtgcctgtaatcccagctactcagggggctgaggcagggggaatggcttgaacccaggaggcagaggttgcagtgagccaaggtcataccagtgcactccaggcgggtgacagagcaagactgcgtctcaaaaaaaaacaaaacacag

SEQ ID NO: 61912 - DNA, 3006 bp, Homo sapiens
acctgattccgttcctcagctcgcattcctccgcccgtcccgctcccgccgccagcggaggccctagtctcccgctccaactattccaaccatcccgggaagggtggggcgctcggctcttgggtccccctccgccgccccgcctcgtcgatctccccttctaccccggtccctccctttctggggtggggccagccaatcagcgatcagactccggagtttggcccgggagctggggagctcaccgatcccccgcccagcagttctggccgctgtcccggtgcgcacggacgtggctcgagtttcctctgctctccgctctcgcccgctagctctcctcccttccgctcctgcttctctccgggtctcccgctccagctccagccccacccggccggtcccgcacggctccgggtagccatggaggaccccacgctctatattgtcgagcggccgcttcccgggtaccccgacgccgaggccccggagccttcctccgctggggctcaggcagcggaggagccgtcgggggccggctcagaagagctgatcaagtcggaccaggtgaacggcgtgctggtgctgagcctcctggacaaaatcatcggggccgtagaccagatccagctgactcaagcacagctggaggagcggcaggcggagatggagggcgcagtgcagagcatccagggcgagctgagcaagctgggcaaggcgcacgccaccacgagcaatacggtgagcaagctgctggagaaggtgcgcaaggtcagcgtcaacgtgaagaccgtgcgcggcagcctggagcgccaggcggggcagatcaagaagctggaggtcaacgaggccgagctgctgcggcgccgcaactttaaagtcatgatctaccaggatgaagtgaagctgccggccaaactgagcatcagcaaatcgctgaaagagtcggaggcgctgccagagaaggagggcgaggagctgggcgagggcgagcggcccgaggaggacgcagcggcgctggagctttcgtcggacgaggcggtggaggttgaggaggttattgaggagtcccgcgcagagcgtatcaagcgcagcggcctgcggcgcgtggacgacttcaagaaggccttctccaaggagaagatggagaagaccaaggtgcgtacccgcgagaacctggagaagacgcgcctcaagaccaaggaaaacctggagaagacgcggcacaccctggagaagcgcatgaacaagctgggcacgcgcctggtgcccgccgagcggcgcgagaaactgaagacgtcgcgggacaagttgcgcaaatccttcacgcccgaccacgtggtgtacgcgcgctccaagaccgcggtctacaaggtgccacccttcaccttccacgtcaagaagatccgcgagggccaggtggaagtgctcaaggccaccgagatggtggaggtgggcgccgacgacgacgagggcggcgcggagcgcggggaggccggcgacctgcggcgcgggagcagccccgacgtgcacgcgctgctggagatcaccgaggagtcggacgccgtgctggtggacaagagcgacagcgactgagccgcccccgctgccacccaccccattcctcgctccttccgaacttcctctttcgcattctctctcggctcgagctggctgagatttttctaaattgaaaacacgcccccctccccacacctccaggaactccactcccagtcttagagctgttaggacccgatggggaggcagcccccgcagtggacagcccccgcttggacacagtccgagtggaatgggaagggaatggtcaatccctgtcctggttgtccaagtcgggatctcagaggaaattgcagtgattccacggttaggcccccctgggggggctgccttcccctcagcctctccccacaccacccacccagctgctgtcattccgctcactgagctcttcttcattctcaccctgatccctgggggactcaaagccaaaactgcccaaagaggaaagattgaatcctaaaggggatccttgcccccatgggaggccccctactagaaggacgtgaaagcagcttttgggggaaactgaggcagtggggaagacagagcagaatgagccctcaccctggctgggggtccagcacaggctgtatctgcagagggtcccagaggaacgctggagccaagagaagccctgggaaggaggggtggggaacgacatgcatgtgagggatggcacactgatgtgtttatgcacctgtacacaggagcgcatggccatggctttggaaaggagaatggaaaaatagaagaaggtcggccgggcttggtggcttaagcctgtaaccccagcactttgggaggccgaggtgggcggatcacctgaggtcaggagttcgggaccagcctggcaaacaccccatctctactaagcgaaaacccatctctactaaaattacaaaaattagctgggcatggttgcgcatgcctgtaatcccagctactttggaggctgaggtggggagaattgcttgaacctgggaggtggaggttgcagtgagccaaggtcgcgacactgcactccagcctgggtgacagagtgagactccatctcaacagaaggaaaaaaaaaggaaaataggagaaggtggaaatgggtgaagagagaagtcccctcactagctgcatgagaaatctatcttactgtggttctccatgggcagcaggaccatttttcagaatcaagagggaggacagtgtgagaaggcgatgatccaaagaagacagagaggtcagccccacccgatccctcaaatgggctcttggaggcacccccaggggcagcccataggagtctaaaagtttaaggtcccatatgttcccatcaaccgtcagccagtaatgcctcatagcagtatacctggccagccaacaattagatagctttaatactcttctgaagggaccgtcatcataactgttaga

SEQ ID NO: 61913 - DNA, 2855 bp, Homo sapiens
acctgattccgttcctcagctcgcattcctccgcccgtcccgctcccgccgccagcggaggccctagtctcccgctccaactattccaaccatcccgggaagggtggggcgctcggctcttgggtccccctccgccgccccgcctcgtcgatctccccttctaccccggtccctccctttctggggtggggccagccaatcagcgatcagactccggagtttggcccgggagctggggagctcaccgatcccccgcccagcagttctggccgctgtcccggtgcgcacggacgtggctcgagtttcctctgctctccgctctcgcccgctagctctcctcccttccgctcctgcttctctccgggtctcccgctccagctccagccccacccggccggtcccgcacggctccgggtagccatggaggaccccacgctctatattgtcgagcggccgcttcccgggtaccccgacgccgaggccccggagccttcctccgctggggctcaggcagcggaggagccgtcgggggccggctcagaagagctgatcaagtcggaccaggtgaacggcgtgctggtgctgagcctcctggacaaaatcatcggggccgtagaccagatccagctgactcaagcacagctggaggagcggcaggcggagatggagggcgcagtgcagagcatccagggcgagctgagcaagctgggcaaggcgcacgccaccacgagcaatacggtgagcaagctgctggagaaggtgcgcaaggtcagcgtcaacgtgaagaccgtgcgcggcagcctggagcgccaggcggggcagatcaagaagctggaggtcaacgaggccgagctgctgcggcgccgcaactttaaagtcatgatctaccaggatgaagtgaagctgccggccaaactgagcatcagcaaatcgctgaaagagtcggaggcgctgccagagaaggagggcgaggagctgggcgagggcgagcggcccgaggaggacgcagcggcgctggagctttcgtcggacgaggcggtggaggttgaggaggttattgaggagtcccgcgcagagcgtatcaagcgcagcggcctgcggcgcgtggacgacttcaagaaggccttctccaaggagaagatggagaagaccaaggtgcgtacccgcgagaacctggagaagacgcgcctcaagaccaaggaaaacctggagaagacgcggcacaccctggagaagcgcatgaacaagctgggcacgcgcctggtgcccgccgagcggcgcgagaaactgaagacgtcgcgggacaagttgcgcaaatccttcacgcccgaccacgtggtgtacgcgcgctccaagaccgcggtctacaaggtgccacccttcaccttccacgtcaagaagatccgcgagggccaggtggaagtgctcaaggccaccgagatggtggaggtgggcgccgacgacgacgagggcggcgcggagcgcggggaggccggcgacctgcggcgcgggagcagccccgacgtgcacgcgctgctggagatcaccgaggagtcggacgccgtgctggtggacaagagcgacagcgactgagccgcccccgctgccacccaccccattcctcgctccttccgaacttcctctttcgcattctctctcggctcgagctggctgagatttttctaaattgaaaacacgcccccctccccacacctccaggaactccactcccagtcttagagctgttaggacccgatggggaggcagcccccgcagtggacagcccccgcttggacacagtccgagtggaatgggaagggaatggtcaatccctgtcctggttgtccaagtcgggatctcagaggaaattgcagtgattccacggttaggcccccctgggggggctgccttcccctcagcctctccccacaccacccacccagctgctgtcattccgctcactgagctcttcttcattctcaccctgatccctgggggactcaaagccaaaactgcccaaagaggaaagattgaatcctaaaggggatccttgcccccatgggaggccccctactagaaggacgtgaaagcagcttttgggggaaactgaggcagtggggaagacagagcagaatgagccctcaccctggctgggggtccagcacaggctgtatctgcagagggtcccagaggaacgctggagccaagagaagccctgggaaggaggggtggggaacgacatgcatgtgagggatggcacactgatgtgtttatgcacctgtacacaggagcgcatggccatggctttggaaaggagaatggaaaaatagaagaaggtcggccgggcttggtggcttaagcctgtaaccccagcactttgggaggccgaggtgggcggatcacctgaggtcaggagttcgggaccagcctggcaaacaccccatctctactaagcgaaaacccatctctactaaaattacaaaaattagctgggcatggttgcgcatgcctgtaatcccagctactttggaggctgaggtggggagaattgcttgaacctgggaggtggaggttgcagtgagccaaggtcgcgacactgcactccagcctgggtgacagagtgagactccatctcaacagaaggaaaaaaaaaggaaaataggagaaggtggaaatgggtgaagagagaagtcccctcactagctgcatgagaaatctatcttactgtggttctccatgggcagcaggaccatttttcagaatcaagagggaggacagtgtgagaaggcgatgatcctctcacgttgctgtgtcctggtgagcagcccgaccaataaacctgcttttctaaaaga

SEQ ID NO: 61914 - DNA, 2664 bp, Homo sapiens
acctgattccgttcctcagctcgcattcctccgcccgtcccgctcccgccgccagcggaggccctagtctcccgctccaactattccaaccatcccgggaagggtggggcgctcggctcttgggtccccctccgccgccccgcctcgtcgatctccccttctaccccggtccctccctttctggggtggggccagccaatcagcgatcagactccggagtttggcccgggagctggggagctcaccgatcccccgcccagcagttctggccgctgtcccggtgcgcacggacgtggctcgagtttcctctgctctccgctctcgcccgctagctctcctcccttccgctcctgcttctctccgggtctcccgctccagctccagccccacccggccggtcccgcacggctccgggtagccatggaggaccccacgctctatattgtcgagcggccgcttcccgggtaccccgacgccgaggccccggagccttcctccgctggggctcaggcagcggaggagccgtcgggggccggctcagaagagctgatcaagtcggaccaggtgaacggcgtgctggtgctgagcctcctggacaaaatcatcggggccgtagaccagatccagctgactcaagcacagctggaggagcggcaggcggagatggagggcgcagtgcagagcatccagggcgagctgagcaagctgggcaaggcgcacgccaccacgagcaatacggtgagcaagctgctggagaaggtgcgcaaggtcagcgtcaacgtgaagaccgtgcgcggcagcctggagcgccaggcggggcagatcaagaagctggaggtcaacgaggccgagctgctgcggcgccgcaactttaaagtcatgatctaccaggatgaagtgaagctgccggccaaactgagcatcagcaaatcgctgaaagagtcggaggcgctgccagagaaggagggcgaggagctgggcgagggcgagcggcccgaggaggacgcagcggcgctggagctttcgtcggacgaggcggtggaggttgaggaggttattgaggagtcccgcgcagagcgtatcaagcgcagcggcctgcggcgcgtggacgacttcaagaaggccttctccaaggagaagatggagaagaccaaggtgcgtacccgcgagaacctggagaagacgcgcctcaagaccaaggaaaacctggagaagacgcggcacaccctggagaagcgcatgaacaagctgggcacgcgcctggtgcccgccgagcggcgcgagaaactgaagacgtcgcgggacaagttgcgcaaatccttcacgcccgaccacgtggtgtacgcgcgctccaagaccgcggtctacaaggtgccacccttcaccttccacgtcaagaagatccgcgagggccaggtggaagtgctcaaggccaccgagatggtggaggtgggcgccgacgacgacgagggcggcgcggagcgcggggaggccggcgacctgcggcgcgggagcagccccgacgtgcacgcgctgctggagatcaccgaggagtcggacgccgtgctggtggacaagagcgacagcgactgagccgcccccgctgccacccaccccattcctcgctccttccgaacttcctctttcgcattctctctcggctcgagctggctgagatttttctaaattgaaaacacgcccccctccccacacctccaggaactccactcccagtcttagagctgttaggacccgatggggaggcagcccccgcagtggacagcccccgcttggacacagtccgagtggaatgggaagggaatggtcaatccctgtcctggttgtccaagtcgggatctcagaggaaattgcagtgattccacggttaggcccccctgggggggctgccttcccctcagcctctccccacaccacccacccagctgctgtcattccgctcactgagctcttcttcattctcaccctgatccctgggggactcaaagccaaaactgcccaaagaggaaagattgaatcctaaaggggatccttgcccccatgggaggccccctactagaaggacgtgaaagcagcttttgggggaaactgaggcagtggggaagacagagcagaatgagccctcaccctggctgggggtccagcacaggctgtatctgcagagggtcccagaggaacgctggagccaagagaagccctgggaaggaggggtggggaacgacatgcatgtgagggatggcacactgatgtgtttatgcacctgtacacaggagcgcatggccatggctttggaaaggagaatggaaaaatagaagaaggtcggccgggcttggtggcttaagcctgtaaccccagcactttgggaggccgaggtgggcggatcacctgaggtcaggagttcgggaccagcctggcaaacaccccatctctactaagcgaaaacccatctctactaaaattacaaaaattagctgggcatggttgcgcatgcctgtaatcccagctactttggaggctgaggtggggagaattgcttgaacctgggaggtggaggttgcagtgagccaaggtcgcgacactgcactccagcctgggtgacagagtgagactccagtcgacgcggccgcgaatttagtagtagtaggc

SEQ ID NO: 61915 - DNA, 1356 bp, Homo sapiens
acctgattccgttcctcagctcgcattcctccgcccgtcccgctcccgccgccagcggaggccctagtctcccgctccaactattccaaccatcccgggaagggtggggcgctcggctcttgggtccccctccgccgccccgcctcgtcgatctccccttctaccccggtccctccctttctggggtggggccagccaatcagcgatcagactccggagtttggcccgggagctggggagctcaccgatcccccgcccagcagttctggccgctgtcccggtgcgcacggacgtggctcgagtttcctctgctctccgctctcgcccgctagctctcctcccttccgctcctgcttctctccgggtctcccgctccagctccagccccacccggccggtcccgcacggctccgggtagccatggaggaccccacgctctatattgtcgagcggccgcttcccgggtaccccgacgccgaggccccggagccttcctccgctggggctcaggcagcggaggagccgtcgggggccggctcagaagagctgatcaagtcggaccaggtgaacggcgtgctggtgctgagcctcctggacaaaatcatcggggccgtagaccagatccagctgactcaagcacagctggaggagcggcaggcggagatggagggcgcagtgcagagcatccagggcgagctgagcaagctgggcaaggcgcacgccaccacgagcaatacggtgagcaagctgctggagaaggtgcgcaaggtcagcgtcaacgtgaagaccgtgcgcggcagcctggagcgccaggcggggcagatcaagaagctggaggtcaacgaggccgagctgctgcggcgccgcaactttaaagtcatgatctaccaggatgaagtgaagctgccggccaaactgagcatcagcaaatcgctgaaagagtcggaggcgctgccagagaaggagggcgaggagctgggcgagggcgagcggcccgaggaggacgcagcggcgctggagctttcgtcggacgaggcggtggaggttgaggaggttattgaggagtcccgcgcagagcgtatcaagcgcagcggcctgcggcgcgtggacgacttcaagaaggccttctccaaggagaagatggagaagaccaaggtgcgtacccgcgagaacctggagaagacgcgcctcaagaccaaggaaaacctggagaagacgcggcacaccctggagaagcgcatgaacaagctgggcacgcgcctggtgcccgccgagcggcgcgagaaactgaagacgtcgcgggacaagttgcgcaaatccttcacgcccgaccaataaacctgctttttttaaaga

SEQ ID NO: 61916 - DNA, 936 bp, Homo sapiens
  misc_feature (924)..(924): n is a, c, g, or t
  misc_feature (926)..(926): n is a, c, g, or t
acctgattccgttcctcagctcgcattcctccgcccgtcccgctcccgccgccagcggaggccctagtctcccgctccaactattccaaccatcccgggaagggtggggcgctcggctcttgggtccccctccgccgccccgcctcgtcgatctccccttctaccccggtccctccctttctggggtggggccagccaatcagcgatcagactccggagtttggcccgggagctggggagctcaccgatcccccgcccagcagttctggccgctgtcccggtgcgcacggacgtggctcgagtttcctctgctctccgctctcgcccgctagctctcctcccttccgctcctgcttctctccgggtctcccgctccagctccagccccacccggccggtcccgcacggctccgggtagccatggaggaccccacgctctatattgtcgagcggccgcttcccgggtaccccgacgccgaggccccggagccttcctccgctggggctcaggcagcggaggagccgtcgggggccggctcagaagagctgatcaagtcggaccaggtgaacggcgtgctggtgctgagcctcctggacaaaatcatcggggccgtagaccagatccagctgactcaagcacagctggaggagcggcaggcggagatggagggcgcagtgcagagcatccagggcgagctgagcaagctgggcaaggcgcacgccaccacgagcaatacggtgagcaagctgctggagaaggtgcgcaaggtcagcgtcaacgtgaagaccgtgcgcggcagcctggagcgccaggcggggcagatcaagaagctggaggtcaacgaggccgagctgctgcggcgccgcaactttaaagtcatgatctaccagcctggcaaacaccccatctctctaagcgatccnancggggtgagc

SEQ ID NO: 61917 - DNA, 343 bp, Homo sapiens
atgcaggggatggcgaggaagagaaggaaaacaaacagtgtaggtggaaagtctcaggctcttcccagtaaacaggcattttcaaatatcaaagactcccctgcattaatgctacagagtatttctgtacactttgaagtgatacactcatttgtaaaccaaattataatgttgtgatattatagcccaggatggcaggtgttcagaaagcataccacttattaaaatggccatatgaaagcctagtacattttctgttctattgattccagtctcatttctactgcttctactttcctctgctcctcactgaactgcccacctgctcccagacccacaatca

SEQ ID NO: 61918 - DNA, 891 bp, Homo sapiens
atccattttcatatgtgagagaattcctatgtgtactattacatttgtatcctcttatcttagtcatatcaggctgctgtaacaaaaataccatagacagaatgacttaaacaacgaagatttatttcgcacagttgtggagtttgaaaaatcaagaccaaggcactatcatattcatggtctgatgtgggccccagcccgtggtgcatagactgctcttttctctctctgtcctcacatgatagaaggggcaagggagccttctggggctctttaataaaaacactaatctcattcgtgaggactccacccagattacctagtcacttcccaaaggccccaccttcaaatagcatcacattggggattaggatctcaatatactaattttggggagagataaacagtccatagcagctcagttcaaccaagttgcattgattatggggctctcatgagaatttacaatgctgaatgatctcaaaaaatcattatgttttgatatgtgctgcctaactggttgactctataagacataaacaatcaaacacattttttcattggtccagctatgtagttttgcatttaggtccactgagagtaaatgcagagaaaagtaaaaggtagtaatagaagtctatgtgcaaccattgtggttatcaaagcaatgcaagtttctaagtgataattagagggggattttcttggggtatataaatagataaaaattgaatttcctaactggaagctggccaggagtggtttgtaacagctgtattctcttgaaaaaaacactacagtcattagaacaagagaagggaagggagagagttctaccaaataacatctcagttttggttcatttattaaactttattctcatctcataag

SEQ ID NO: 61919 - DNA, 3826 bp, Homo sapiens
gagcagctgcaccatcccggcgttcgcgtgtgccgccgctttcctcctccatctcttttcctccgcctccgccggcgcgatgggcgaaccgctgacggacagcgagaagcggaagcagatcagcgtgcgcggcctggcggggctaggcgacgtggccgaggtgcggaagagcttcaaccggcacttgcacttcacgctggtcaaggaccgcaatgtggccacgccccgcgactacttcttcgcgctggcgcacacggtgcgcgaccacctcgtgggccgctggatccgcacgcagcagcactactacgagcgcgaccccaagcgaatttattatctttccctggaattctacatgggtcgcacgctgcagaacacgatggtgaacctgggccttcagaatgcctgcgatgaagccatctatcagttggggttagacttggaggaactcgaggagatagaagaagatgctggccttgggaatggaggcctggggaggctggcagcgtgtttccttgactcaatggctaccttgggcctggcagcatacggctatggaatccgctatgaatttgggatttttaaccagaagattgtcaatggctggcaggtagaggaggccgatgactggctgcgctacggcaacccctgggagaaagcgcggcctgagtatatgcttcccgtgcacttctacggacgcgtggagcacacccccgacggcgtgaagtggctggacacacaggtggtgctggccatgccctacgacaccccagtgcccggctacaagaacaacaccgtcaacaccatgcggctgtggtccgccaaggctcccaacgacttcaagctgcaggacttcaacgtgggagactacatcgaggcggtcctggaccggaacttggctgagaacatctccagggtcctgtatccaaatgataacttctttgaggggaaggagctgcggctgaagcaggagtacttcgtggtggccgccacgctccaggacatcatccgccgcttcaagtcgtccaagttcggctgccgggaccctgtgagaacctgtttcgagacgttcccagacaaggtggccatccagctgaacgacacccaccccgccctctccatccctgagctcatgcggatcctggtggacgtggagaaggtggactgggacaaggcctgggaaatcacgaagaagacctgtgcgtacaccaaccacactgtgctgcctgaggccttggagcgctggcccgtgtccatgtttgagaagctgctgccgcggcacctggagataatctatgccatcaaccagcggcacctggaccacgtggccgcgctgtttcccggcgatgtggaccgcctgcgcaggatgtctgtgatcgaggagggggactgcaagcggatcaacatggcccacctgtgtgtgattgggtcccatgctgtcaatggtgtggcgaggatccactcggagatcgtgaaacagtcggtctttaaggatttttatgaactggagccagagaagttccagaataagaccaatggcatcaccccccgccggtggctgctgctgtgcaacccggggctggccgataccatcgtggagaaaattggggaggagttcctgactgacctgagccagctgaagaagctgctgccgctggtcagtgacgaggtgttcatcagggacgtggccaaggtcaaacaggagaacaagctcaagttctcggccttcctggagaaggagtacaaggtgaagatcaacccctcctccatgttcgacgtgcatgtgaagaggatccacgagtacaagcggcagctgctcaactgcctgcacgtcgtcaccctgtacaatcgaatcaagagagacccggccaaggcttttgtgcccaggactgttatgattgggggcaaggcagcgcccggttaccacatggccaagctgatcatcaagttggtcacctccatcggcgacgtcgtcaatcatgacccagttgtgggtgacaggttgaaagtgatcttcctggagaactaccgtgtgtccttggctgagaaagtgatcccggccgctgatctgtcgcagcagatctccactgcaggcaccgaggcctcaggcacaggcaacatgaagttcatgctcaacggggccctcaccatcggcaccatggacggcgccaacgtggagatggccgaggaggccggggccgagaacctcttcatcttcggcctgcgggtggaggatgtcgaggccttggaccggaaagggtacaatgccaggagtactacgaccacctgcccgagctgaagcaggccgtggaccagatcagcagtggctttttttctcccaaggagccagactgcttcaaggacatcgtgaacatgctgatgcaccatgacaggttcaaggtgtttgcagactatgaagcctacatgcagtgccaggcacaggtggaccaactgtaccggaaccccaaggagtggaccaagaaggtcatcaggaacatcgcctgctcgggcaagttctccagtgaccggaccatcacggagtatgcacgggagatctggggtgtggagccctccgaccctgcagcttcagcacctgccccacccagagtgggagtcaggtggagccacctgctgggctcccccagaactttgcacacatcttgctatgtattagccgatgtctttagtgttgagcctctggattctggggtctgggccagtggccatagtgaagcctgggaatgagtgttactgcagcatctgggctgccagccacagggaagggccaagccccatgtagccccagtcatcctgcccagccctgcctcctggccatgccgggaggggtcggatcctctaggcatcgccttcacagccccctgccccctgccctctgtcctggctctgcacctggtatatgggtcatggacccagatggggctttccctttgtagccatccaatgggcattgtgtgggtgcttggaacccgggatgactgagggggacactggagtgggtgcttgtgtctgctgtctcagaggccttggtcaggatgaagttggctgacacagcttagcttggttttgcttattcaaaagagaaaataactacacatggaaatgaaactagctgaagccttttcttgttttagcaactgaaaattgtacttggtcacttttgtgcttgaggaggcccattttctgcctggcagggggcaggtctgtgccctcccgctgactcctgctgtgtcctgaggtgcatttcctgttgtacacacaagggccaggctccattctccctccctttccaccagtgccacagcctcgtctggaaaaaggaccaggggtcccggaggaacccatttgtgctctgcttggacagcaggcctggcactgggaggtgggggtgagcccctcacagccttgcccctccccagggctggcaacctgccttccattgcccaagagagagggcagggaacaggctactgtccttccctgtggaattgccgagaaatctagcaccttgcatgctggatctgggctgcggggaggctctttttctccctggcctccagtgcccaccaggaggatctgcgcacggtgcacagcccaccagagcactacagccttttattgagtggggtggggcaagtgctgggctgtggtcgtgccctgacagcatcttccccaggcagcggctctgtggaggaggccatactcccctagttggccactggggccaccaccctgaccaccactgtgcccctcattgttactaccttgtgagataaaaactgattaaacctttgtggctgtggttggctga

SEQ ID NO: 61920 - DNA, 379 bp, Homo sapiens
caggacttaaccaggctgagatggagacctaggctgtaatggagaccaggctgagaaaggtaaccctggaagcctgtgttggacagaaaactcactcctgccggggaacgggcgttgtactggccctgggcctttcatcctcagccagttcagctctgcctggacacccagacctagccagccgggctgcaggcgagcagggaacggctttagggagtgctccccgtgcagtgcggaggactcacagtgcgtcccggggcgccttgcatgtcacaggcagtgtcatcccccaacagggcacccttactgccgcgcctgcctggcctgccctctgtatcctccctcccctgccctctcctcctgcccctcagccgtgcct

SEQ ID NO: 61921 - DNA, 2549 bp, Homo sapiens
  misc_feature (13)..(13): n is a, c, g, or t
tcgccccgagtantatatgtgaccagccccgccgacgcgtgaaaattggggaggagttcctgactgacctgagccagctgaagaagctgctgccgctggtcagtgacgaggtgttcatcagggacgtggccaaggtcaaacaggagaacaagctcaagttctcggccttcctggagaaggagtacaaggtgaagatcaacccctcctccatgttcgacgtgcatgtgaagaggatccacgagtacaagcggcagctgctcaactgcctgcacgtcgtcaccctgtacaatcgaatcaagagagacccggccaaggcttttgtgcccaggactgttatgattgggggcaaggcagcgcccggttaccacatggccaagctgatcatcaagttggtcacctccatcggcgacgtcgtcaatcatgacccagttgtgggtgacaggttgaaagtgatcttcctggagaactaccgtgtgtccttggctgagaaagtgatcccggccgctgatctgtcgcagcagatctccactgcaggcaccgaggcctcaggcacaggcaacatgaagttcatgctcaacggggccctcaccatcggcaccatggacggcgccaacgtggagatggccgaggaggccggggccgagaacctcttcatcttcggcctgcgggtggaggatgtcgaggccttggaccggaaagggtacaatgccaggagtactacgaccacctgcccgagctgaagcaggccgtggaccagatcagcagtggctttttttctcccaaggagccagactgcttcaaggacatcgtgaacatgctgatgcaccatgacaggttcaaggtgtttgcagactatgaagcctacatgcagtgccaggcacaggtggaccaactgtaccggaaccccaaggagtggaccaagaaggtcatcaggaacatcgcctgctcgggcaagttctccagtgaccggaccatcacggagtatgcacgggagatctggggtgtggagccctccgacctgcagatcccgccccccaacatcccccgggactaggcacaccctgccttggcgggaccagcgggcatttgttttcttgctgactttgcacctccttttttccccaaacactttgccagccgctggtggtccctgcttttctgagtaccatgtttccaggaggggccatgggggtcagggtggttttgagagagcagggtaaggaaggaatgtgctagaagtgctcctagtttcttgtaaaggaagccagagttgacagtacaaagggtcgtggccagccctgcagcttcagcacctgccccacccagagtgggagtcaggtggagccacctgctgggctcccccagaactttgcacacatcttgctatgtattagccgatgtctttagtgttgagcctctggattctggggtctgggccagtggccatagtgaagcctgggaatgagtgttactgcagcatctgggctgccagccacagggaagggccaagccccatgtagccccagtcatcctgcccagccctgcctcctggccatgccgggaggggtcggatcctctaggcatcgccttcacagccccctgccccctgccctctgtcctggctctgcacctggtatatgggtcatggacccagatggggctttccctttgtagccatccaatgggcattgtgtgggtgcttggaacccgggatgactgagggggacactggagtgggtgcttgtgtctgctgtctcagaggccttggtcaggatgaagttggctgacacagcttagcttggttttgcttattcaaaagagaaaataactacacatggaaatgaaactagctgaagccttttcttgttttagcaactgaaaattgtacttggtcacttttgtgcttgaggaggcccattttctgcctggcagggggcaggtctgtgccctcccgctgactcctgctgtgtcctgaggtgcatttcctgttgtacacacaagggccaggctccattctccctccctttccaccagtgccacagcctcgtctggaaaaaggaccaggggtcccggaggaacccatttgtgctctgcttggacagcaggcctggcactgggaggtgggggtgagcccctcacagccttgcccctccccagggctggcaacctgccttccattgcccaagagagagggcagggaacaggctactgtccttccctgtggaattgccgagaaatctagcaccttgcatgctggatctgggctgcggggaggctctttttctccctggcctccagtgcccaccaggaggatctgcgcacggtgcacagcccaccagagcactacagccttttattgagtggggtggggcaagtgctgggctgtggtcgtgccctgacagcatcttccccaggcagcggctctgtggaggaggccatactcccctagttggccactggggccaccaccctgaccaccactgtgcccctcattgttactaccttgtgagataaaaactgattaaacctttgtggctgtggttggctga

SEQ ID NO: 61922 - DNA, 2481 bp, Homo sapiens
tgaggccttaagtagggtcaggtgaaaccacacatgccatctgaagtcagagctgtgccttgctggcccgagcacagaggcctgtgctccctttctgcgccctcacacagcttcttctgcccgggccccgtcctgggatgcccatgtctgcccgtctgtccctctcccacttagctctgccttgtcctgtctggtcttgcttgcgtttttccttttccatcttcgaggtcccagccaaggtgctccatttcacttcctgcccctccggccgtctgtttttcaaaagctctgcccaggatttcacagtgagccaagttctgagtggccctctccactaggaatgtggcatcagccactatgtcctagcagatctgctagtgatgacatttctttaacagtcaaaggagcaggtgggattggctttagactgacttcacatctctgctcgagcaggtccctgctcaagggcctcgtaaccacccatggccactggctgctgccctggaccgtgcaggccttgagctcccagggccatcctggggcaggggctgtgccaggcaccaacatggcttgttctccaaggtggcccacctggggcgctggctgctgactcctggcccatcgcctcacaggtacaatgccaggagtactacgaccacctgcccgagctgaagcaggccgtggaccagatcagcagtggctttttttctcccaaggagccagactgcttcaaggacatcgtgaacatgctgatgcaccatgacaggttcaaggtgtttgcagactatgaagcctacatgcagtgccaggcacaggtggaccaactgtaccggaaccccaaggagtggaccaagaaggtcatcaggaacatcgcctgctcgggcaagttctccagtgaccggaccatcacggagtatgcacgggagatctggggtgtggagccctccgacctgcagatcccgccccccaacatcccccgggactaggcacaccctgccttggcgggaccagcgggcatttgttttcttgctgactttgcacctccttttttccccaaacactttgccagccgctggtggtccctgcttttctgagtaccatgtttccaggaggggccatgggggtcagggtggttttgagagagcagggtaaggaaggaatgtgctagaagtgctcctagtttcttgtaaaggaagccagagttgacagtacaaagggtcgtggccagccctgcagcttcagcacctgccccacccagagtgggagtcaggtggagccacctgctgggctcccccagaactttgcacacatcttgctatgtattagccgatgtctttagtgttgagcctctggattctggggtctgggccagtggccatagtgaagcctgggaatgagtgttactgcagcatctgggctgccagccacagggaagggccaagccccatgtagccccagtcatcctgcccagccctgcctcctggccatgccgggaggggtcggatcctctaggcatcgccttcacagccccctgccccctgccctctgtcctggctctgcacctggtatatgggtcatggacccagatggggctttccctttgtagccatccaatgggcattgtgtgggtgcttggaacccgggatgactgagggggacactggagtgggtgcttgtgtctgctgtctcagaggccttggtcaggatgaagttggctgacacagcttagcttggttttgcttattcaaaagagaaaataactacacatggaaatgaaactagctgaagccttttcttgttttagcaactgaaaattgtacttggtcacttttgtgcttgaggaggcccattttctgcctggcagggggcaggtctgtgccctcccgctgactcctgctgtgtcctgaggtgcatttcctgttgtacacacaagggccaggctccattctccctccctttccaccagtgccacagcctcgtctggaaaaaggaccaggggtcccggaggaacccatttgtgctctgcttggacagcaggcctggcactgggaggtgggggtgagcccctcacagccttgcccctccccagggctggcaacctgccttccattgcccaagagagagggcagggaacaggctactgtccttccctgtggaattgccgagaaatctagcaccttgcatgctggatctgggctgcggggaggctctttttctccctggcctccagtgcccaccaggaggatctgcgcacggtgcacagcccaccagagcactacagccttttattgagtggggtggggcaagtgctgggctgtggtcgtgccctgacagcatcttccccaggcagcggctctgtggaggaggccatactcccctagttggccactggggccaccaccctgaccaccactgtgcccctcattgttactaccttgtgagataaaaactgattaaacctttgtggctgtggttggctga

SEQ ID NO: 61923 - DNA, 1795 bp, Homo sapiens
catgcagtgccaggcacagttggtccacctgtgcctggcactgcatgtaggcttcatagtctgcaaacaccttgaacctgtcatggtgcatcagcatgttcacgatgtccttgaagcagtctggctccttgggaccaactgtaccggaaccccaaggagtggaccaagaaggtcatcaggaacatcgcctgctcgggcaagttctccagtgaccggaccatcacggagtatgcacgggagatctggggtgtggagccctccgacctgcagatcccgccccccaacatcccccgggactaggcacaccctgccttggcgggaccagcgggcatttgttttcttgctgactttgcacctccttttttccccaaacactttgccagccgctggtggtccctgcttttctgagtaccatgtttccaggaggggccatgggggtcagggtggttttgagagagcagggtaaggaaggaatgtgctagaagtgctcctagtttcttgtaaaggaagccagagttgacagtacaaagggtcgtggccagccctgcagcttcagcacctgccccacccagagtgggagtcaggtggagccacctgctgggctcccccagaactttgcacacatcttgctatgtattagccgatgtctttagtgttgagcctctggattctggggtctgggccagtggccatagtgaagcctgggaatgagtgttactgcagcatctgggctgccagccacagggaagggccaagccccatgtagccccagtcatcctgcccagccctgcctcctggccatgccgggaggggtcggatcctctaggcatcgccttcacagccccctgccccctgccctctgtcctggctctgcacctggtatatgggtcatggacccagatggggctttccctttgtagccatccaatgggcattgtgtgggtgcttggaacccgggatgactgagggggacactggagtgggtgcttgtgtctgctgtctcagaggccttggtcaggatgaagttggctgacacagcttagcttggttttgcttattcaaaagagaaaataactacacatggaaatgaaactagctgaagccttttcttgttttagcaactgaaaattgtacttggtcacttttgtgcttgaggaggcccattttctgcctggcagggggcaggtctgtgccctcccgctgactcctgctgtgtcctgaggtgcatttcctgttgtacacacaagggccaggctccattctccctccctttccaccagtgccacagcctcgtctggaaaaaggaccaggggtcccggaggaacccatttgtgctctgcttggacagcaggcctggcactgggaggtgggggtgagcccctcacagccttgcccctccccagggctggcaacctgccttccattgcccaagagagagggcagggaacaggctactgtccttccctgtggaattgccgagaaatctagcaccttgcatgctggatctgggctgcggggaggctctttttctccctggcctccagtgcccaccaggaggatctgcgcacggtgcacagcccaccagagcactacagccttttattgagtggggtggggcaagtgctgggctgtggtcgtgccctgacagcatcttccccaggcagcggctctgtggaggaggccatactcccctagttggccactggggccaccaccctgaccaccactgtgcccctcattgttactaccttgtgagataaaaactgattaaacctttgtggctgtggttggctga

SEQ ID NO: 61924 - DNA, 3781 bp, Homo sapiens
  misc_feature (3764)..(3764): n is a, c, g, or t
  misc_feature (3768)..(3768): n is a, c, g, or t
  misc_feature (3772)..(3772): n is a, c, g, or t
gagcagctgcaccatcccggcgttcgcgtgtgccgccgctttcctcctccatctcttttcctccgcctccgccggcgcgatgggcgaaccgctgacggacagcgagaagcggaagcagatcagcgtgcgcggcctggcggggctaggcgacgtggccgaggtgcggaagagcttcaaccggcacttgcacttcacgctggtcaaggaccgcaatgtggccacgccccgcgactacttcttcgcgctggcgcacacggtgcgcgaccacctcgtgggccgctggatccgcacgcagcagcactactacgagcgcgaccccaagcgaatttattatctttccctggaattctacatgggtcgcacgctgcagaacacgatggtgaacctgggccttcagaatgcctgcgatgaagccatctatcagttggggttagacttggaggaactcgaggagatagaagaagatgctggccttgggaatggaggcctggggaggctggcagcgtgtttccttgactcaatggctaccttgggcctggcagcatacggctatggaatccgctatgaatttgggatttttaaccagaagattgtcaatggctggcaggtagaggaggccgatgactggctgcgctacggcaacccctgggagaaagcgcggcctgagtatatgcttcccgtgcacttctacggacgcgtggagcacacccccgacggcgtgaagtggctggacacacaggtggtgctggccatgccctacgacaccccagtgcccggctacaagaacaacaccgtcaacaccatgcggctgtggtccgccaaggctcccaacgacttcaagctgcaggacttcaacgtgggagactacatcgaggcggtcctggaccggaacttggctgagaacatctccagggtcctgtatccaaatgataacttctttgaggggaaggagctgcggctgaagcaggagtacttcgtggtggccgccacgctccaggacatcatccgccgcttcaagtcgtccaagttcggctgccgggaccctgtgagaacctgtttcgagacgttcccagacaaggtggccatccagctgaacgacacccaccccgccctctccatccctgagctcatgcggatcctggtggacgtggagaaggtggactgggacaaggcctgggaaatcacgaagaagacctgtgcgtacaccaaccacactgtgctgcctgaggccttggagcgctggcccgtgtccatgtttgagaagctgctgccgcggcacctggagataatctatgccatcaaccagcggcacctggaccacgtggccgcgctgtttcccggcgatgtggaccgcctgcgcaggatgtctgtgatcgaggagggggactgcaagcggatcaacatggcccacctgtgtgtgattgggtcccatgctgtcaatggtgtggcgaggatccactcggagatcgtgaaacagtcggtctttaaggatttttatgaactggagccagagaagttccagaataagaccaatggcatcaccccccgccggtggctgctgctgtgcaacccggggctggccgataccatcgtggagaaaattggggaggagttcctgactgacctgagccagctgaagaagctgctgccgctggtcagtgacgaggtgttcatcagggacgtggccaaggtcaaacaggagaacaagctcaagttctcggccttcctggagaaggagtacaaggtgaagatcaacccctcctccatgttcgacgtgcatgtgaagaggatccacgagtacaagcggcagctgctcaactgcctgcacgtcgtcaccctgtacaatcgaatcaagagagacccggccaaggcttttgtgcccaggactgttatgattgggggcaaggcagcgcccggttaccacatggccaagctgatcatcaagttggtcacctccatcggcgacgtcgtcaatcatgacccagttgtgggtgacaggttgaaagtgatcttcctggagaactaccgtgtgtccttggctgagaaagtgatcccggccgctgatctgtcgcagcagatctccactgcaggcaccgaggcctcaggcacaggcaacatgaagttcatgctcaacggggccctcaccatcggcaccatggacggcgccaacgtggagatggccgaggaggccggggccgagaacctcttcatcttcggcctgcgggtggaggatgtcgaggccttggaccggaaagggtacaatgccaggagtactacgaccacctgcccgagctgaagcaggccgtggaccagatcagcagtggctttttttctcccaaggagccagactgcttcaaggacatcgtgaacatgctgatgcaccatgacaggttcaaggtgtttgcagactatgaagcctacatgcagtgccaggcacaggtggaccaactgtaccggaaccccaaggagtggaccaagaaggtcatcaggaacatcgcctgctcgggcaagttctccagtgaccggaccatcacggagtatgcacgggagatctggggtgtggagccctccgacctgcagatcccgccccccaacatcccccgggactaggcacaccctgccttggcgggaccagcgggcatttgttttcttgctgactttgcacctccttttttccccaaacactttgccagccgctggtggtccctgcttttctgagtaccatgtttccaggaggggccatgggggtcagggtggttttgagagagcagggtaaggaaggaatgtgctagaagtgctcctagtttcttgtaaaggaagccagagttgacagtacaaagggtcgtggccagccctgcagcttcagcacctgccccacccagagtgggagtcaggtggagccacctgctgggctcccccagaactttgcacacatcttgctatgtattagccgatgtctttagtgttgagcctctggattctggggtctgggccagtggccatagtgaagcctgggaatgagtgttactgcagcatctgggctgccagccacagggaagggccaagccccatgtagccccagtcatcctgcccagccctgcctcctggccatgccgggaggggtcggatcctctaggcatcgccttcacagccccctgccccctgccctctgtcctggctctgcacctggtatatgggtcatggacccagatggggctttccctttgtagccatccaatgggcattgtgtgggtgcttggaacccgggatgactgagggggaacccatttgtgctctgcttggacagcaggcctggcactgggaggtgggggtgagcccctcacagccttgcccctccccagggctggcaacctgccttccattgcccaagagagagggcagggaacaggctactgtccttccctgtggaattgccgagaaatctagcaccttgcatgctggatctgggctgcggggaggctctttttctccctggcctccagtgcccaccaggaggatctgcgcacggtgcacagcccaccagagcactacagccttttattgagtggggtggggcaagtgctgggctgtggtcgtgccctgacagcatcttccccaggcagcggctctgtggaggaggccatactcccctagttggccactggggccaccaccctgaccaccactgtgcccctcattgttactaccttgtgagataaaaactgattaaacctttgtggctgtggttggctgaaaaaaaaaanaaanaaanaaaaaaaac

SEQ ID NO: 61925 - DNA, 3416 bp, Homo sapiens
gagcagctgcaccatcccggcgttcgcgtgtgccgccgctttcctcctccatctcttttcctccgcctccgccggcgcgatgggcgaaccgctgacggacagcgagaagcggaagcagatcagcgtgcgcggcctggcggggctaggcgacgtggccgaggtgcggaagagcttcaaccggcacttgcacttcacgctggtcaaggaccgcaatgtggccacgccccgcgactacttcttcgcgctggcgcacacggtgcgcgaccacctcgtgggccgctggatccgcacgcagcagcactactacgagcgcgaccccaagcgaatttattatctttccctggaattctacatgggtcgcacgctgcagaacacgatggtgaacctgggccttcagaatgcctgcgatgaagccatctatcagttggggttagacttggaggaactcgaggagatagaagaagatgctggccttgggaatggaggcctggggaggctggcagcgtgtttccttgactcaatggctaccttgggcctggcagcatacggctatggaatccgctatgaatttgggatttttaaccagaagattgtcaatggctggcaggtagaggaggccgatgactggctgcgctacggcaacccctgggagaaagcgcggcctgagtatatgcttcccgtgcacttctacggacgcgtggagcacacccccgacggcgtgaagtggctggacacacaggtggtgctggccatgccctacgacaccccagtgcccggctacaagaacaacaccgtcaacaccatgcggctgtggtccgccaaggctcccaacgacttcaagctgcaggacttcaacgtgggagactacatcgaggcggtcctggaccggaacttggctgagaacatctccagggtcctgtatccaaatgataacttctttgaggggaaggagctgcggctgaagcaggagtacttcgtggtggccgccacgctccaggacatcatccgccgcttcaagtcgtccaagttcggctgccgggaccctgtgagaacctgtttcgagacgttcccagacaaggtggccatccagctgaacgacacccaccccgccctctccatccctgagctcatgcggatcctggtggacgtggagaaggtggactgggacaaggcctgggaaatcacgaagaagacctgtgcgtacaccaaccacactgtgctgcctgaggccttggagcgctggcccgtgtccatgtttgagaagctgctgccgcggcacctggagataatctatgccatcaaccagcggcacctggaccacgtggccgcgctgtttcccggcgatgtggaccgcctgcgcaggatgtctgtgatcgaggagggggactgcaagcggatcaacatggcccacctgtgtgtgattgggtcccatgctgtcaatggtgtggcgaggatccactcggagatcgtgaaacagtcggtctttaaggatttttatgaactggagccagagaagttccagaataagaccaatggcatcaccccccgccggtggctgctgctgtgcaacccggggctggccgataccatcgtggagaaaattggggaggagttcctgactgacctgagccagctgaagaagctgctgccgctggtcagtgacgaggtgttcatcagggacgtggccaaggtcaaacaggagaacaagctcaagttctcggccttcctggagaaggagtacaaggtgaagatcaacccctcctccatgttcgacgtgcatgtgaagaggatccacgagtacaagcggcagctgctcaactgcctgcacgtcgtcaccctgtacaatcgaatcaagagagacccggccaaggcttttgtgcccaggactgttatgattgggggcaaggcagcgcccggttaccacatggccaagctgatcatcaagttggtcacctccatcggcgacgtcgtcaatcatgacccagttgtgggtgacaggttgaaagtgatcttcctggagaactaccgtgtgtccttggctgagaaagtgatcccggccgctgatctgtcgcagcagatctccactgcaggcaccgaggcctcaggcacaggcaacatgaagttcatgctcaacggggccctcaccatcggcaccatggacggcgccaacgtggagatggccgaggaggccggggccgagaacctcttcatcttcggcctgcgggtggaggatgtcgaggccttggaccggaaagggtacaatgccaggagtactacgaccacctgcccgagctgaagcaggccgtggaccagatcagcagtggctttttttctcccaaggagccagactgcttcaaggacatcgtgaacatgctgatgcaccatgacaggttcaaggtgtttgcagactatgaagcctacatgcagtgccaggcacaggtggaccaactgtaccggaaccccaaggagtggaccaagaaggtcatcaggaacatcgcctgctcgggcaagttctccagtgaccggaccatcacggagtatgcacgggagatctggggtgtggagccctccgacctgcagatcccgccccccaacatcccccgggactaggcacaccctgccttggcgggaccagcgggcatttgttttcttgctgactttgcacctccttttttccccaaacactttgccagccgctggtggtccctgcttttctgagtaccatgtttccaggaggggccatgggggtcagggtggttttgagagagcagggtaaggaaggaatgtgctagaagtgctcctagtttcttgtaaaggaagccagagttgacagtacaaagggtcgtggccagccctgcagcttcagcacctgccccacccagagtgggagtcaggtggagccacctgctgggctcccccagaactttgcacacatcttgctatgtattagccgatgtctttagtgttgagcctctggattctggggtctgggccagtggccatagtgaagcctgggaatgagtgttactgcaacctgccttccattgcccaagagagagggcagggaacaggctactgtccttccctgtggaattgccgagaaatctagcaccttgcatgctggatctgggctgcggggaggctctttttctccctggcctccagtgcccaccaggaggatctgcgcacggtgcacagcccaccagagcactacagccttttattgagtggggtggggcaagtgctgggctgtggtcgtgccctgacagcatcttccccaggcagcggctctgtggaggaggccatactcccctagttggccactggggccaccaccctgaccaccactgtgcccctcattgttactaccttgtgagataaaaactgattaaacctttgtggctgtggttggctga

SEQ ID NO: 61926 - DNA, 3003 bp, Homo sapiens
gagcagctgcaccatcccggcgttcgcgtgtgccgccgctttcctcctccatctcttttcctccgcctccgccggcgcgatgggcgaaccgctgacggacagcgagaagcggaagcagatcagcgtgcgcggcctggcggggctaggcgacgtggccgaggtgcggaagagcttcaaccggcacttgcacttcacgctggtcaaggaccgcaatgtggccacgccccgcgactacttcttcgcgctggcgcacacggtgcgcgaccacctcgtgggccgctggatccgcacgcagcagcactactacgagcgcgaccccaagcgaatttattatctttccctggaattctacatgggtcgcacgctgcagaacacgatggtgaacctgggccttcagaatgcctgcgatgaagccatctatcagttggggttagacttggaggaactcgaggagatagaagaagatgctggccttgggaatggaggcctggggaggctggcagcgtgtttccttgactcaatggctaccttgggcctggcagcatacggctatggaatccgctatgaatttgggatttttaaccagaagattgtcaatggctggcaggtagaggaggccgatgactggctgcgctacggcaacccctgggagaaagcgcggcctgagtatatgcttcccgtgcacttctacggacgcgtggagcacacccccgacggcgtgaagtggctggacacacaggtggtgctggccatgccctacgacaccccagtgcccggctacaagaacaacaccgtcaacaccatgcggctgtggtccgccaaggctcccaacgacttcaagctgcaggacttcaacgtgggagactacatcgaggcggtcctggaccggaacttggctgagaacatctccagggtcctgtatccaaatgataacttctttgaggggaaggagctgcggctgaagcaggagtacttcgtggtggccgccacgctccaggacatcatccgccgcttcaagtcgtccaagttcggctgccgggaccctgtgagaacctgtttcgagacgttcccagacaaggtggccatccagctgaacgacacccaccccgccctctccatccctgagctcatgcggatcctggtggacgtggagaaggtggactgggacaaggcctgggaaatcacgaagaagacctgtgcgtacaccaaccacactgtgctgcctgaggccttggagcgctggcccgtgtccatgtttgagaagctgctgccgcggcacctggagataatctatgccatcaaccagcggcacctggaccacgtggccgcgctgtttcccggcgatgtggaccgcctgcgcaggatgtctgtgatcgaggagggggactgcaagcggatcaacatggcccacctgtgtgtgattgggtcccatgctgtcaatggtgtggcgaggatccactcggagatcgtgaaacagtcggtctttaaggatttttatgaactggagccagagaagttccagaataagaccaatggcatcaccccccgccggtggctgctgctgtgcaacccggggctggccgataccatcgtggagaaaattggggaggagttcctgactgacctgagccagctgaagaagctgctgccgctggtcagtgacgaggtgttcatcagggacgtggccaaggtcaaacaggagaacaagctcaagttctcggccttcctggagaaggagtacaaggtgaagatcaacccctcctccatgttcgacgtgcatgtgaagaggatccacgagtacaagcggcagctgctcaactgcctgcacgtcgtcaccctgtacaatcgaatcaagagagacccggccaaggcttttgtgcccaggactgttatgattgggggcaaggcagcgcccggttaccacatggccaagctgatcatcaagttggtcacctccatcggcgacgtcgtcaatcatgacccagttgtgggtgacaggttgaaagtgatcttcctggagaactaccgtgtgtccttggctgagaaagtgatcccggccgctgatctgtcgcagcagatctccactgcaggcaccgaggcctcaggcacaggcaacatgaagttcatgctcaacggggccctcaccatcggcaccatggacggcgccaacgtggagatggccgaggaggccggggccgagaacctcttcatcttcggcctgcgggtggaggatgtcgaggccttggaccggaaagggtacaatgccaggagtactacgaccacctgcccgagctgaagcaggccgtggaccagatcagcagtggctttttttctcccaaggagccagactgcttcaaggacatcgtgaacatgctgatgcaccatgacaggttcaaggtgtttgcagactatgaagcctacatgcagtgccaggcacaggtggaccaactgtaccggaaccccaaggagtggaccaagaaggtcatcaggaacatcgcctgctcgggcaagttctccagtgaccggaccatcacggagtatgcacgggagatctggggtgtggagccctccgacctgcagatcccgccccccaacatcccccgggactaggcacaccctgccttggcgggaccagcgggcatttgttttcttgctgactttgcacctccttttttccccaaacactttgccagccgctggtggtccctgcttttctgagtaccatgtttccaggaggggccatgggggtcagggtggttttgagagagcagggtaaggaaggaatgtgctagaagtgctcctagtttcttgtaaaggaagccagagttgacagtacaaagggtcgtgccctgacagcatcttccccaggcagcggctctgtggaggaggccatactcccctagttggccactggggccaccaccctgaccaccactgtgcccctcattgttactaccttgtgagataaaaactgattaaacctttgtggctgtggttggctga

SEQ ID NO: 61927 - DNA, 1708 bp, Homo sapiens
tgaggccttaagtagggtcaggtgaaaccacacatgccatctgaagtcagagctgtgccttgctggcccgagcacagaggcctgtgctccctttctgcgccctcacacagcttcttctgcccgggccccgtcctgggatgcccatgtctgcccgtctgtccctctcccacttagctctgccttgtcctgtctggtcttgcttgcgtttttccttttccatcttcgaggtcccagccaaggtgctccatttcacttcctgcccctccggccgtctgtttttcaaaagctctgcccaggatttcacagtgagccaagttctgagtggccctctccactaggaatgtggcatcagccactatgtcctagcagatctgctagtgatgacatttctttaacagtcaaaggagcaggtgggattggctttagactgacttcacatctctgctcgagcaggtccctgctcaagggcctcgtaaccacccatggccactggctgctgccctggaccgtgcaggccttgagctcccagggccatcctggggcaggggctgtgccaggcaccaacatggcttgttctccaaggtggcccacctggggcgctggctgctgactcctggcccatcgcctcacaggagccagactgcttcaaggacatcgtgaacatgctgatgcaccatgacaggttcaaggtgtttgcagactatgaagcctacatgcagtgccaggcacaggtggaccaactgtaccggaaccccaaggagtggaccaagaaggtcatcaggaacatcgcctgctcgggcaagttctccagtgaccggaccatcacggagtatgcacgggagatctggggtgtggagccctccgacctgcagatcccgccccccaacatcccccgggactaggcacaccctgccttggcgggaccagcgggcatttgttttcttgctgactttgcacctccttttttccccaaacactttgccagccgctggtggtccctgcttttctgagtaccatgtttccaggaggggccatgggggtcagggtggttttgagagagcagggtaaggaaggaatgtgctagaagtgctcctagtttcttgtaaaggaagccagagttgacagtacaaagggtcgtggccagccctgcagcttcagcacctgccccacccagagtgggagtcaggtggagccacctgctgggctcccccagaactttgcacacatcttgctatgtattagccgatgtctttagtgttgagcctctggattctggggtctgggccagtggccatagtgaagcctgggaatgagtgttactgcaacctgccttccattgcccaagagagagggcagggaacaggctactgtccttccctgtggaattgccgagaaatctagcaccttgcatgctggatctgggctgcggggaggctctttttctccctggcctccagtgcccaccaggaggatctgcgcacggtgcacagcccaccagagcactacagccttttattgagtggggtggggcaagtgctgggctgtggtcgtgccctgacagcatcttccccaggcagcggctctgtggaggaggccatactcccctagttggccactggggccaccaccctgaccaccactgtgcccctcattgttactaccttgtgagataaaaactgattaaacctttgtggctgtggttggctga

SEQ ID NO: 61928 - DNA, 4105 bp, Homo sapiens
gagcagctgcaccatcccggcgttcgcgtgtgccgccgctttcctcctccatctcttttcctccgcctccgccggcgcgatgggcgaaccgctgacggacagcgagaagcggaagcagatcagcgtgcgcggcctggcggggctaggcgacgtggccgaggtgcggaagagcttcaaccggcacttgcacttcacgctggtcaaggaccgcaatgtggccacgccccgcgactacttcttcgcgctggcgcacacggtgcgcgaccacctcgtgggccgctggatccgcacgcagcagcactactacgagcgcgaccccaagcgaatttattatctttccctggaattctacatgggtcgcacgctgcagaacacgatggtgaacctgggccttcagaatgcctgcgatgaagccatctatcagttggggttagacttggaggaactcgaggagatagaagaagatgctggccttgggaatggaggcctggggaggctggcagcgtgtttccttgactcaatggctaccttgggcctggcagcatacggctatggaatccgctatgaatttgggatttttaaccagaagattgtcaatggctggcaggtagaggaggccgatgactggctgcgctacggcaacccctgggagaaagcgcggcctgagtatatgcttcccgtgcacttctacggacgcgtggagcacacccccgacggcgtgaagtggctggacacacaggtggtgctggccatgccctacgacaccccagtgcccggctacaagaacaacaccgtcaacaccatgcggctgtggtccgccaaggctcccaacgacttcaagctgcaggacttcaacgtgggagactacatcgaggcggtcctggaccggaacttggctgagaacatctccagggtcctgtatccaaatgataacttctttgaggggaaggagctgcggctgaagcaggagtacttcgtggtggccgccacgctccaggacatcatccgccgcttcaagtcgtccaagttcggctgccgggaccctgtgagaacctgtttcgagacgttcccagacaaggtggccatccagctgaacgacacccaccccgccctctccatccctgagctcatgcggatcctggtggacgtggagaaggtggactgggacaaggcctgggaaatcacgaagaagacctgtgcgtacaccaaccacactgtgctgcctgaggccttggagcgctggcccgtgtccatgtttgagaagctgctgccgcggcacctggagataatctatgccatcaaccagcggcacctggaccacgtggccgcgctgtttcccggcgatgtggaccgcctgcgcaggatgtctgtgatcgaggagggggactgcaagcggatcaacatggcccacctgtgtgtgattgggtcccatgctgtcaatggtgtggcgaggatccactcggagatcgtgaaacagtcggtctttaaggatttttatgaactggagccagagaagttccagaataagaccaatggcatcaccccccgccggtggctgctgctgtgcaacccggggctggccgataccatcgtggagaaaattggggaggagttcctgactgacctgagccagctgaagaagctgctgccgctggtcagtgacgaggtgttcatcagggacgtggccaaggtcaaacaggagaacaagctcaagttctcggccttcctggagaaggagtacaaggtgaagatcaacccctcctccatgttcgacgtgcatgtgaagaggatccacgagtacaagcggcagctgctcaactgcctgcacgtcgtcaccctgtacaatcgaatcaagagagacccggccaaggcttttgtgcccaggactgttatgattgggggcaaggcagcgcccggttaccacatggccaagctgatcatcaagttggtcacctccatcggcgacgtcgtcaatcatgacccagttgtgggtgacaggttgaaagtgatcttcctggagaactaccgtgtgtccttggctgagaaagtgatcccggccgctgatctgtcgcagcagatctccactgcaggcaccgaggcctcaggcacaggcaacatgaagttcatgctcaacggggccctcaccatcggcaccatggacggcgccaacgtggagatggccgaggaggccggggccgagaacctcttcatcttcggcctgcgggtggaggatgtcgaggccttggaccggaaagggtacaatgccaggagtactacgaccacctgcccgagctgaagcaggccgtggaccagatcagcagtggctttttttctcccaaggagccagactgcttcaaggacatcgtgaacatgctgatgcaccatgacaggttcaaggtgtttgcagactatgaagcctacatgcagtgccaggcacaggtggaccaactgtaccggaaccccaaggagtggaccaagaaggtcatcaggaacatcgcctgctcgggcaagttctccagtgaccggaccatcacggagtatgcacgggagatctggggtgtggagccctccgacctgcagatcccgccccccaacatcccccgggactaggcacaccctgccttggcgggaccagcgggcatttgttttcttgctgactttgcacctccttttttccccaaacactttgccagccgctggtggtccctgcttttctgagtaccatgtttccaggaggggccatgggggtcagggtggttttgagagagcagggtaaggaaggaatgtgctagaagtgctcctagtttcttgtaaaggaagccagagttgacagtacaaagggtcgtggccagccctgcagcttcagcacctgccccacccagagtgggagtcaggtggagccacctgctgggctcccccagaactttgcacacatcttgctatgtattagccgatgtctttagtgttgagcctctggattctggggtctgggccagtggccatagtgaagcctgggaatgagtgttactgcagcatctgggctgccagccacagggaagggccaagccccatgtagccccagtcatcctgcccagccctgcctcctggccatgccgggaggggtcggatcctctaggcatcgccttcacagccccctgccccctgccctctgtcctggctctgcacctggtatatgggtcatggacccagatggggctttccctttgtagccatccaatgggcattgtgtgggtgcttggaacccgggatgactgagggggacactggagtgggtgcttgtgtctgctgtctcagaggccttggtcaggatgaagttggctgacacagcttagcttggttttgcttattcaaaagagaaaataactacacatggaaatgaaactagctgaagccttttcttgttttagcaactgaaaattgtacttggtcacttttgtgcttgaggaggcccattttctgcctggcagggggcaggtctgtgccctcccgctgactcctgctgtgtcctgaggtgcatttcctgttgtacacacaagggccaggctccattctccctccctttccaccagtgccacagcctcgtctggaaaaaggaccaggggtcccggaggaacccatttgtgctctgcttggacagcaggcctggcactgggaggtgggggtgagcccctcacagccttgcccctccccagggctggcaacctgccttccattgcccaagagagagggcagggaacaggctactgtccttccctgtggaattgccgagaaatctagcaccttgcatgctggatctgggctgcggggaggctctttttctccctggcctccagtgcccaccaggaggatctgcgcacggtgcacagcccaccagagcactacagccttttattgagtggggtggggcaagtgctgggctgtggtcgtgccctgacagcatcttccccaggcagcggctctgtggaggaggccatactcccctagttggccactggggccaccaccctgaccaccactgtgcccctcattgttactaccttgtgagataaaaactgattaaacctttgtggctgtggttggctga

SEQ ID NO: 61929 - DNA, 4050 bp, Homo sapiens
gagcagctgcaccatcccggcgttcgcgtgtgccgccgctttcctcctccatctcttttcctccgcctccgccggcgcgatgggcgaaccgctgacggacagcgagaagcggaagcagatcagcgtgcgcggcctggcggggctaggcgacgtggccgaggtgcggaagagcttcaaccggcacttgcacttcacgctggtcaaggaccgcaatgtggccacgccccgcgactacttcttcgcgctggcgcacacggtgcgcgaccacctcgtgggccgctggatccgcacgcagcagcactactacgagcgcgaccccaagcgaatttattatctttccctggaattctacatgggtcgcacgctgcagaacacgatggtgaacctgggccttcagaatgcctgcgatgaagccatctatcagttggggttagacttggaggaactcgaggagatagaagaagatgctggccttgggaatggaggcctggggaggctggcagcgtgtttccttgactcaatggctaccttgggcctggcagcatacggctatggaatccgctatgaatttgggatttttaaccagaagattgtcaatggctggcaggtagaggaggccgatgactggctgcgctacggcaacccctgggagaaagcgcggcctgagtatatgcttcccgtgcacttctacggacgcgtggagcacacccccgacggcgtgaagtggctggacacacaggtggtgctggccatgccctacgacaccccagtgcccggctacaagaacaacaccgtcaacaccatgcggctgtggtccgccaaggctcccaacgacttcaagctgcaggacttcaacgtgggagactacatcgaggcggtcctggaccggaacttggctgagaacatctccagggtcctgtatccaaatgataacttctttgaggggaaggagctgcggctgaagcaggagtacttcgtggtggccgccacgctccaggacatcatccgccgcttcaagtcgtccaagttcggctgccgggaccctgtgagaacctgtttcgagacgttcccagacaaggtggccatccagctgaacgacacccaccccgccctctccatccctgagctcatgcggatcctggtggacgtggagaaggtggactgggacaaggcctgggaaatcacgaagaagacctgtgcgtacaccaaccacactgtgctgcctgaggccttggagcgctggcccgtgtccatgtttgagaagctgctgccgcggcacctggagataatctatgccatcaaccagcggcacctggaccacgtggccgcgctgtttcccggcgatgtggaccgcctgcgcaggatgtctgtgatcgaggagggggactgcaagcggatcaacatggcccacctgtgtgtgattgggtcccatgctgtcaatggtgtggcgaggatccactcggagatcgtgaaacagtcggtctttaaggatttttatgaactggagccagagaagttccagaataagaccaatggcatcaccccccgccggtggctgctgctgtgcaacccggggctggccgataccatcgtggagtggtcagtgacgaggtgttcatcagggacgtggccaaggtcaaacaggagaacaagctcaagttctcggccttcctggagaaggagtacaaggtgaagatcaacccctcctccatgttcgacgtgcatgtgaagaggatccacgagtacaagcggcagctgctcaactgcctgcacgtcgtcaccctgtacaatcgaatcaagagagacccggccaaggcttttgtgcccaggactgttatgattgggggcaaggcagcgcccggttaccacatggccaagctgatcatcaagttggtcacctccatcggcgacgtcgtcaatcatgacccagttgtgggtgacaggttgaaagtgatcttcctggagaactaccgtgtgtccttggctgagaaagtgatcccggccgctgatctgtcgcagcagatctccactgcaggcaccgaggcctcaggcacaggcaacatgaagttcatgctcaacggggccctcaccatcggcaccatggacggcgccaacgtggagatggccgaggaggccggggccgagaacctcttcatcttcggcctgcgggtggaggatgtcgaggccttggaccggaaagggtacaatgccaggagtactacgaccacctgcccgagctgaagcaggccgtggaccagatcagcagtggctttttttctcccaaggagccagactgcttcaaggacatcgtgaacatgctgatgcaccatgacaggttcaaggtgtttgcagactatgaagcctacatgcagtgccaggcacaggtggaccaactgtaccggaaccccaaggagtggaccaagaaggtcatcaggaacatcgcctgctcgggcaagttctccagtgaccggaccatcacggagtatgcacgggagatctggggtgtggagccctccgacctgcagatcccgccccccaacatcccccgggactaggcacaccctgccttggcgggaccagcgggcatttgttttcttgctgactttgcacctccttttttccccaaacactttgccagccgctggtggtccctgcttttctgagtaccatgtttccaggaggggccatgggggtcagggtggttttgagagagcagggtaaggaaggaatgtgctagaagtgctcctagtttcttgtaaaggaagccagagttgacagtacaaagggtcgtggccagccctgcagcttcagcacctgccccacccagagtgggagtcaggtggagccacctgctgggctcccccagaactttgcacacatcttgctatgtattagccgatgtctttagtgttgagcctctggattctggggtctgggccagtggccatagtgaagcctgggaatgagtgttactgcagcatctgggctgccagccacagggaagggccaagccccatgtagccccagtcatcctgcccagccctgcctcctggccatgccgggaggggtcggatcctctaggcatcgccttcacagccccctgccccctgccctctgtcctggctctgcacctggtatatgggtcatggacccagatggggctttccctttgtagccatccaatgggcattgtgtgggtgcttggaacccgggatgactgagggggacactggagtgggtgcttgtgtctgctgtctcagaggccttggtcaggatgaagttggctgacacagcttagcttggttttgcttattcaaaagagaaaataactacacatggaaatgaaactagctgaagccttttcttgttttagcaactgaaaattgtacttggtcacttttgtgcttgaggaggcccattttctgcctggcagggggcaggtctgtgccctcccgctgactcctgctgtgtcctgaggtgcatttcctgttgtacacacaagggccaggctccattctccctccctttccaccagtgccacagcctcgtctggaaaaaggaccaggggtcccggaggaacccatttgtgctctgcttggacagcaggcctggcactgggaggtgggggtgagcccctcacagccttgcccctccccagggctggcaacctgccttccattgcccaagagagagggcagggaacaggctactgtccttccctgtggaattgccgagaaatctagcaccttgcatgctggatctgggctgcggggaggctctttttctccctggcctccagtgcccaccaggaggatctgcgcacggtgcacagcccaccagagcactacagccttttattgagtggggtggggcaagtgctgggctgtggtcgtgccctgacagcatcttccccaggcagcggctctgtggaggaggccatactcccctagttggccactggggccaccaccctgaccaccactgtgcccctcattgttactaccttgtgagataaaaactgattaaacctttgtggctgtggttggctga

SEQ ID NO: 61930 - DNA, 4140 bp, Homo sapiens
gagcagctgcaccatcccggcgttcgcgtgtgccgccgctttcctcctccatctcttttcctccgcctccgccggcgcgatgggcgaaccgctgacggacagcgagaagcggaagcagatcagcgtgcgcggcctggcggggctaggcgacgtggccgaggtgcggaagagcttcaaccggcacttgcacttcacgctggtcaaggaccgcaatgtggccacgccccgcgactacttcttcgcgctggcgcacacggtgcgcgaccacctcgtgggccgctggatccgcacgcagcagcactactacgagcgcgaccccaagcgaatttattatctttccctggaattctacatgggtcgcacgctgcagaacacgatggtgaacctgggccttcagaatgcctgcgatgaagccatctatcagttggggttagacttggaggaactcgaggagatagaagaagatgctggccttgggaatggaggcctggggaggctggcagcgtgtttccttgactcaatggctaccttgggcctggcagcatacggctatggaatccgctatgaatttgggatttttaaccagaagattgtcaatggctggcaggtagaggaggccgatgactggctgcgctacggcaacccctgggagaaagcgcggcctgagtatatgcttcccgtgcacttctacggacgcgtggagcacacccccgacggcgtgaagtggctggacacacaggtggtgctggccatgccctacgacaccccagtgcccggctacaagaacaacaccgtcaacaccatgcggctgtggtccgccaaggctcccaacgacttcaagctgcaggacttcaacgtgggagactacatcgaggcggtcctggaccggaacttggctgagaacatctccagggtcctgtatccaaatgataacttctttgaggggaaggagctgcggctgaagcaggagtacttcgtggtggccgccacgctccaggacatcatccgccgcttcaagtcgtccaagttcggctgccgggaccctgtgagaacctgtttcgagacgttcccagacaaggtggccatccagctgaacgacacccaccccgccctctccatccctgagctcatgcggatcctggtggacgtggagaaggtggactgggacaaggcctgggaaatcacgaagaagacctgtgcgtacaccaaccacactgtgctgcctgaggccttggagcgctggcccgtgtccatgtttgagaagctgctgccgcggcacctggagataatctatgccatcaaccagcggcacctggaccacgtggccgcgctgtttcccggcgatgtggaccgcctgcgcaggatgtctgtgatcgaggagggggactgcaagcggatcaacatggcccacctgtgtgtgattgggtcccatgctgtcaatggtgtggcgaggatccactcggagatcgtgaaacagtcggtctttaaggatttttatgaactggagccagagaagttccagaataagaccaatggcatcaccccccgccggtggctgctgctgtgcaacccggggctggccgataccatcgtggagaaaattggggaggagttcctgactgacctgagccagctgaagaagctgctgccgctggtcagtgacgaggtgttcatcagggacgtggccaaggtcaaacaggagaacaagctcaagttctcggccttcctggagaaggagtacaaggtgaagatcaacccctcctccatgttcgacgtgcatgtgaagaggatccacgagtacaagcggcagctgctcaactgcctgcacgtcgtcaccctgtacaatcgaatcaagagagacccggccaaggcttttgtgcccaggactgttatgattgggggcaaggcagcgcccggttaccacatggccaagctgatcatcaagttggtcacctccatcggcgacgtcgtcaatcatgacccagttgtgggtgacaggttgaaagtgatcttcctggagaactaccgtgtgtccttggctgagaaagtgatcccggccgctgatctgtcgcagcagatctccactgcaggcaccgaggcctcaggcacaggcaacatgaagttcatgctcaacggggccctcaccatcggcaccatggacggcgccaacgtggagatggccgaggaggccggggccgagaacctcttcatcttcggcctgcgggtggaggatgtcgaggccttggaccggaaagggtacaatgccaggagtactacgaccacctgcccgagctgaagcaggccgtggaccagatcagcagtggctttttttctcccaaggagccagactgcttcaaggacatcgtgaacatgctgatgcaccatgacaggttcaaggtgtttgcagactatgaagcctacatgcagtgccaggcacaggtggaccaactgtaccggaaccccaaggagtggaccaagaaggtcatcaggaacatcgcctgctcgggcaagttctccagtgaccggaccatcacggagtatgcacgggagatctggggtgtggagccctccgacctgcagatcccgccccccaacatcccccgggactaggcacaccctgccttggcgggaccagcgggcatttgttttcttgctgactttgcacctccttttttccccaaacactttgccagccgctggtggtccctgcttttctgagtaccatgtttccaggaggggccatgggggtcagggtggttttgagagagcagggtaaggaaggaatgtgctagaagtgctcctagtttcttgtaaaggaagccagagttgacagtacaaagggtcgtggccagccctgcagcttcagcacctgccccacccagagtgggagtcaggtggagccacctgctgggctcccccagaactttgcacacatcttgctatgtattagccgatgtctttagtgttgagcctctggattctggggtctgggccagtggccatagtgaagcctgggaatgagtgttactgcagcatctgggctgccagccacagggaagggccaagccccatgtagccccagtcatcctgcccagccctgcctcctggccatgccgggaggggtcggatcctctaggcatcgccttcacagccccctgccccctgccctctgtcctggctctgcacctggtatatgggtcatggacccagatggggctttccctttgtagccatccaatgggcattgtgtgggtgcttggaacccgggatgactgagggggacactggagtgggtgcttgtgtctgctgtctcagaggccttggtcaggatgaagttggctgacacagcttagcttggttttgcttattcaaaagagaaaataactacacatggaaatgaaactagctgaagccttttcttgttttagcaactgaaaattgtacttggtcacttttgtgcttgaggaggcccattttctgcctggcagggggcaggtctgtgccctcccgctgactcctgctgtgtcctgaggtgcatttcctgttgtacacacaagggccaggctccattctccctccctttccaccagtgccacagcctcgtctggaaaaaggaccaggggtcccggaggaacccatttgtgctctgcttggacagcaggcctggcactgggaggtgggggtgagcccctcacagccttgcccctccccagggctggcaacctgccttccattgcccaagagagagggcagggaacaggctactgtccttccctgtggaattgccgagaaatctagcaccttgcatgctggatctgggctgcggggaggctctttttctccctggcctccagtgcccaccaggaggatctgcgcacggtgcacagcccaccagagcactacagccttttattgagtggggtggggcaagtgctgggctgtggtcgtgccctgacagcatcttccccaggcagcggctctgtggaggaggccatactcccctagttggccactggggccaccaccctgaccaccactgtgcccctcattgttactaccttgtgagataaaaactgattaaacctttgtggctgtggttggctgaaaaaaacaaaaggggggcggaaaaaacccacgggc

SEQ ID NO: 61931 - DNA, 4265 bp, Homo sapiens
gagcagctgcaccatcccggcgttcgcgtgtgccgccgctttcctcctccatctcttttcctccgcctccgccggcgcgatgggcgaaccgctgacggacagcgagaagcggaagcagatcagcgtgcgcggcctggcggggctaggcgacgtggccgaggtgcggaagagcttcaaccggcacttgcacttcacgctggtcaaggaccgcaatgtggccacgccccgcgactacttcttcgcgctggcgcacacggtgcgcgaccacctcgtgggccgctggatccgcacgcagcagcactactacgagcgcgaccccaagcgaatttattatctttccctggaattctacatgggtcgcacgctgcagaacacgatggtgaacctgggccttcagaatgcctgcgatgaagccatctatcagttggggttagacttggaggaactcgaggagatagaagaagatgctggccttgggaatggaggcctggggaggctggcagcgtgtttccttgactcaatggctaccttgggcctggcagcatacggctatggaatccgctatgaatttgggatttttaaccagaagattgtcaatggctggcaggtagaggaggccgatgactggctgcgctacggcaacccctgggagaaagcgcggcctgagtatatgcttcccgtgcacttctacggacgcgtggagcacacccccgacggcgtgaagtggctggacacacaggtggtgctggccatgccctacgacaccccagtgcccggctacaagaacaacaccgtcaacaccatgcggctgtggtccgccaaggctcccaacgacttcaagctgcaggacttcaacgtgggagactacatcgaggcggtcctggaccggaacttggctgagaacatctccagggtcctgtatccaaatgataacttctttgaggggaaggagctgcggctgaagcaggagtacttcgtggtggccgccacgctccaggacatcatccgccgcttcaagtcgtccaagttcggctgccgggaccctgtgagaacctgtttcgagacgttcccagacaaggtggccatccagctgaacgacacccaccccgccctctccatccctgagctcatgcggatcctggtggacgtggagaaggtggactgggacaaggcctgggaaatcacgaagaagacctgtgcgtacaccaaccacactgtgctgcctgaggccttggagcgctggcccgtgtccatgtttgagaagctgctgccgcggcacctggagataatctatgccatcaaccagcggcacctggaccacgtggccgcgctgtttcccggcgatgtggaccgcctgcgcaggatgtctgtgatcgaggagggggactgcaagcggatcaacatggcccacctgtgtgtgattgggtcccatgctgtcaatggtgtggcgaggatccactcggagatcgtgaaacagtcggtctttaaggatttttatgaactggagccagagaagttccagaataagaccaatggcatcaccccccgccggtggctgctgctgtgcaacccggggctggccgataccatcgtggagaaaattggggaggagttcctgactgacctgagccagctgaagaagctgctgccgctggtcagtgacgaggtgttcatcagggacgtggccaaggtcaaacaggagaacaagctcaagttctcggccttcctggagaaggagtacaaggtgaagatcaacccctcctccatgttcgacgtgcatgtgaagaggatccacgagtacaagcggcagctgctcaactgcctgcacgtcgtcaccctgtacaatcgaatcaagagagacccggccaaggcttttgtgcccaggactgttatgattgggggcaaggcagcgcccggttaccacatggccaagctgatcatcaagttggtcacctccatcggcgacgtcgtcaatcatgacccagttgtgggtgacaggttgaaagtgatcttcctggagaactaccgtgtgtccttggctgagaaagtgatcccggccgctgatctgtcgcagcagatctccactgcaggcaccgaggcctcaggcacaggcaacatgaagttcatgctcaacggggccctcaccatcggcaccatggacggcgccaacgtggagatggccgaggaggccggggccgagaacctcttcatcttcggcctgcgggtggaggatgtcgaggccttggaccggaaagggtacaatgccaggagtactacgaccacctgcccgagctgaagcaggccgtggaccagatcagcagtggctttttttctcccaaggagccagactgcttcaaggacatcgtgaacatgctgatgcaccatgacaggttcaaggtgtttgcagactatgaagcctacatgcagtgccaggcacaggtggaccaactgtaccggaaccccaaggagtggaccaagaaggtcatcaggaacatcgcctgctcgggcaagttctccagtgaccggaccatcacggagtatgcacgggagatctggggtgtggagccctccgacctgcagatcccgccccccaacatcccccgggactaggcacaccctgccttggcgggaccagcgggcatttgttttcttgctgactttgcacctccttttttccccaaacactttgccagccgctggtggtccctgcttttctgagtaccatgtttccaggaggggccatgggggtcagggtggttttgagagagcagggtaaggaaggaatgtgctagaagtgctcctagtttcttgtaaaggaagccagagttgacagtacaaagggtcgtggccagccctgcagcttcagcacctgccccacccagagtgggagtcaggtggagccacctgctgggctcccccagaactttgcacacatcttgctatgtattagccgatgtctttagtgttgagcctctggattctggggtctgggccagtggccatagtgaagcctgggaatgagtgttactgcagcatctgggctgccagccacagggaagggccaagccccatgtagccccagtcatcctgcccagccctgcctcctggccatgccgggaggggtcggatcctctaggcatcgccttcacagccccctgccccctgccctctgtcctggctctgcacctggtatatgggtcatggacccagatggggctttccctttgtagccatccaatgggcattgtgtgggtgcttggaacccgggatgactgagggggacactggagtgggtgcttgtgtctgctgtctcagaggccttggtcaggatgaagttggctgacacagcttagcttggttttgcttattcaaaagagaaaataactacacatggaaatgaaactagctgaagccttttcttgttttagcaactgaaaattgtacttggtcacttttgtgcttgaggaggcccattttctgcctggcagggggcaggtctgtgccctcccgctgactcctgctgtgtcctgaggtgcatttcctgttgtacacacaagggccaggctccattctccctccctttccaccagtgccacagcctcgtctggaaaaaggaccaggggtcccggaggaacccatttgtgctctgcttggacagcaggcctggcactgggaggtgggggtgagcccctcacagccttgcccctccccagggctggcaacctgccttccattgcccaagagagagggcagggaacaggctactgtccttccctgtggaattgccgagaaatctagcaccttgcatgctggatctgggctgcggggaggctctttttctccctggcctccagtgcccaccaggaggatctgcgcacggtgcacagcccaccagagcactacagccttttattgagtggggtggggcaagtgctgggctgtggtcgtgccctgacagcatcttccccaggcagcggctctgtggaggaggccatactcccctagttggccactggggccaccaccctgaccaccactgtgcccctcattgttactaccttgtgagataaaaactgattaaacctttgtggctgtggttggctgaaaaaaaaaaaaatatttaagaaaaaacaaaatttaactataaaataaaaattaattttaaaattatggaaataaaatttctaaaaaacttgagataacaaatctgaggggggggcccgtacccccatttccccctatagggggccatttcacatttccat

SEQ ID NO: 61932 - DNA, 3814 bp, Homo sapiens
  misc_feature (3797)..(3797): n is a, c, g, or t
  misc_feature (3801)..(3801): n is a, c, g, or t
  misc_feature (3805)..(3805): n is a, c, g, or t
gagcagctgcaccatcccggcgttcgcgtgtgccgccgctttcctcctccatctcttttcctccgcctccgccggcgcgatgggcgaaccgctgacggacagcgagaagcggaagcagatcagcgtgcgcggcctggcggggctaggcgacgtggccgaggtgcggaagagcttcaaccggcacttgcacttcacgctggtcaaggaccgcaatgtggccacgccccgcgactacttcttcgcgctggcgcacacggtgcgcgaccacctcgtgggccgctggatccgcacgcagcagcactactacgagcgcgaccccaagcgaatttattatctttccctggaattctacatgggtcgcacgctgcagaacacgatggtgaacctgggccttcagaatgcctgcgatgaagccatctatcagttggggttagacttggaggaactcgaggagatagaagaagatgctggccttgggaatggaggcctggggaggctggcagcgtgtttccttgactcaatggctaccttgggcctggcagcatacggctatggaatccgctatgaatttgggatttttaaccagaagattgtcaatggctggcaggtagaggaggccgatgactggctgcgctacggcaacccctgggagaaagcgcggcctgagtatatgcttcccgtgcacttctacggacgcgtggagcacacccccgacggcgtgaagtggctggacacacaggtggtgctggccatgccctacgacaccccagtgcccggctacaagaacaacaccgtcaacaccatgcggctgtggtccgccaaggctcccaacgacttcaagctgcaggacttcaacgtgggagactacatcgaggcggtcctggaccggaacttggctgagaacatctccagggtcctgtatccaaatgataacttctttgaggggaaggagctgcggctgaagcaggagtacttcgtggtggccgccacgctccaggacatcatccgccgcttcaagtcgtccaagttcggctgccgggaccctgtgagaacctgtttcgagacgttcccagacaaggtggccatccagctgaacgacacccaccccgccctctccatccctgagctcatgcggatcctggtggacgtggagaaggtggactgggacaaggcctgggaaatcacgaagaagacctgtgcgtacaccaaccacactgtgctgcctgaggccttggagcgctggcccgtgtccatgtttgagaagctgctgccgcggcacctggagataatctatgccatcaaccagcggcacctggaccacgtggccgcgctgtttcccggcgatgtggaccgcctgcgcaggatgtctgtgatcgaggagggggactgcaagcggatcaacatggcccacctgtgtgtgattgggtcccatgctgtcaatggtgtggcgaggatccactcggagatcgtgaaacagtcggtctttaaggatttttatgaactggagccagagaagttccagaataagaccaatggcatcaccccccgccggtggctgctgctgtgcaacccggggctggccgataccatcgtggagaaaattggggaggagttcctgactgacctgagccagctgaagaagctgctgccgctggtcagtgacgaggtgttcatcagggacgtggccaaggtcaaacaggagaacaagctcaagttctcggccttcctggagaaggagtacaaggtgaagatcaacccctcctccatgttcgacgtgcatgtgaagaggatccacgagtacaagcggcagctgctcaactgcctgcacgtcgtcaccctgtacaatcgaatcaagagagacccggccaaggcttttgtgcccaggactgttatgattgggggcaaggcagcgcccggttaccacatggccaagctgatcatcaagttggtcacctccatcggcgacgtcgtcaatcatgacccagttgtgggtgacaggttgaaagtgatcttcctggagaactaccgtgtgtccttggctgagaaagtgatcccggccgctgatctgtcgcagcagatctccactgcaggcaccgaggcctcaggcacaggcaacatgaagttcatgctcaacggggccctcaccatcggcaccatggacggcgccaacgtggagatggccgaggaggccggggccgagaacctcttcatcttcggcctgcgggtggaggatgtcgaggccttggaccggaaagggtacaatgccaggagtactacgaccacctgcccgagctgaagcaggccgtggaccagatcagcagtggctttttttctcccaaggagccagactgcttcaaggacatcgtgaacatgctgatgcaccatgacaggttcaaggtgtttgcagactatgaagcctacatgcagtgccaggcacaggtggaccaactgtaccggaaccccaaggagtggaccaagaaggtcatcaggaacatcgcctgctcgggcaagttctccagtgaccggaccatcacggagtatgcacgggagatctggggtgtggagccctccgacctgcagatcccgccccccaacatcccccgggactaggcacaccctgccttggcgggaccagcgggcatttgttttcttgctgactttgcacctccttttttccccaaacactttgccagccgctggtggtccctgcttttctgagtaccatgtttccaggaggggccatgggggtcagggtggttttgagagagcagggtaaggaaggaatgtgctagaagtgctcctagtttcttgtaaaggaagccagagttgacagtacaaagggtcgtggccagccctgcagcttcagcacctgccccacccagagtgggagtcaggtggagccacctgctgggctcccccagaactttgcacacatcttgctatgtattagccgatgtctttagtgttgagcctctggattctggggtctgggccagtggccatagtgaagcctgggaatgagtgttactgcagcatctgggctgccagccacagggaagggccaagccccatgtagccccagtcatcctgcccagccctgcctcctggccatgccgggaggggtcggatcctctaggcatcgccttcacagccccctgccccctgccctctgtcctggctctgcacctggtatatgggtcatggacccagatggggctttccctttgtagccatccaatgggcattgtgtgggtgcttggaacccgggatgactgagggggacactggagtgggtgcttgtgtctgctgtctcagaggccttggtcaggatgaagttggctgacacagcttagcttggttttgcttattcaaaagagaaaataactacacatggaaatgaaactagctgaagccttttcttgttttagcaactgaaaattgtacttggtcacttttgtgcttgaggaggcccattttctgcctggcagggggcaggtctgtgccctcccgctgactcctgctgtgtcctgaggtgcatttcctgttgtacacacaagggccaggctccattctccctccctttccaccagtgccacagcctcgtctggaaaaaggaccaggggtcccggaggaacccatttgtgctctgcttggacagcaggcctggcactgggaggtgggggtgagcccctcacagccttgcccctccccagggctggcaacctgccttccattgcccaagagagagggcagggaacaggctactgtccttccctgtggaattgccaaaaaaaaanaaanaaanaaaaaaaac

SEQ ID NO: 61933 - DNA, 2869 bp, Homo sapiens
gagcagctgcaccatcccggcgttcgcgtgtgccgccgctttcctcctccatctcttttcctccgcctccgccggcgcgatgggcgaaccgctgacggacagcgagaagcggaagcagatcagcgtgcgcggcctggcggggctaggcgacgtggccgaggtgcggaagagcttcaaccggcacttgcacttcacgctggtcaaggaccgcaatgtggccacgccccgcgactacttcttcgcgctggcgcacacggtgcgcgaccacctcgtgggccgctggatccgcacgcagcagcactactacgagcgcgaccccaagcgaatttattatctttccctggaattctacatgggtcgcacgctgcagaacacgatggtgaacctgggccttcagaatgcctgcgatgaagccatctatcagttggggttagacttggaggaactcgaggagatagaagaagatgctggccttgggaatggaggcctggggaggctggcagcgtgtttccttgactcaatggctaccttgggcctggcagcatacggctatggaatccgctatgaatttgggatttttaaccagaagattgtcaatggctggcaggtagaggaggccgatgactggctgcgctacggcaacccctgggagaaagcgcggcctgagtatatgcttcccgtgcacttctacggacgcgtggagcacacccccgacggcgtgaagtggctggacacacaggtggtgctggccatgccctacgacaccccagtgcccggctacaagaacaacaccgtcaacaccatgcggctgtggtccgccaaggctcccaacgacttcaagctgcaggacttcaacgtgggagactacatcgaggcggtcctggaccggaacttggctgagaacatctccagggtcctgtatccaaatgataacttctttgaggggaaggagctgcggctgaagcaggagtacttcgtggtggccgccacgctccaggacatcatccgccgcttcaagtcgtccaagttcggctgccgggaccctgtgagaacctgtttcgagacgttcccagacaaggtggccatccagctgaacgacacccaccccgccctctccatccctgagctcatgcggatcctggtggacgtggagaaggtggactgggacaaggcctgggaaatcacgaagaagacctgtgcgtacaccaaccacactgtgctgcctgaggccttggagcgctggcccgtgtccatgtttgagaagctgctgccgcggcacctggagataatctatgccatcaaccagcggcacctggaccacgtggccgcgctgtttcccggcgatgtggaccgcctgcgcaggatgtctgtgatcgaggagggggactgcaagcggatcaacatggcccacctgtgtgtgattgggtcccatgctgtcaatggtgtggcgaggatccactcggagatcgtgaaacagtcggtctttaaggatttttatgaactggagccagagaagttccagaataagaccaatggcatcaccccccgccggtggctgctgctgtgcaacccggggctggccgataccatcgtggagaaaattggggaggagttcctgactgacctgagccagctgaagaagctgctgccgctggtcagtgacgaggtgttcatcagggacgtggccaaggtcaaacaggagaacaagctcaagttctcggccttcctggagaaggagtacaaggtgaagatcaacccctcctccatgttcgacgtgcatgtgaagaggatccacgagtacaagcggcagctgctcaactgcctgcacgtcgtcaccctgtacaatcgaatcaagagagacccggccaaggcttttgtgcccaggactgttatgattgggggcaaggcagcgcccggttaccacatggccaagctgatcatcaagttggtcacctccatcggcgacgtcgtcaatcatgacccagttgtgggtgacaggttgaaagtgatcttcctggagaactaccgtgtgtccttggctgagaaagtgatcccggccgctgatctgtcgcagcagatctccactgcaggcaccgaggcctcaggcacaggcaacatgaagttcatgctcaacggggccctcaccatcggcaccatggacggcgccaacgtggagatggccgaggaggccggggccgagaacctcttcatcttcggcctgcgggtggaggatgtcgaggccttggaccggaaagggtacaatgccaggagtactacgaccacctgcccgagctgaagcaggccgtggaccagatcagcagtggctttttttctcccaaggagccagactgcttcaaggacatcgtgaacatgctgatgcaccatgacaggttcaaggtgtttgcagactatgaagcctacatgcagtgccaggcacaggtggaccaactgtaccggaaccccaaggagtggaccaagaaggtcatcaggaacatcgcctgctcgggcaagttctccagtgaccggaccatcacggagtatgcacgggagatctggggtgtggagccctccgacctgcagatcccgccccccaacatcccccgggactaggcacaccctgccttggcgggaccagcgggcatttgttttcttgctgactttgcacctccttttttccccaaacactttgccagccgctggtggtccctgcttttctgagtaccatgtttcccaggcagcggctctgtggaggaggccatactcccctagttggccactggggccaccaccctgaccaccactgtgcccctcattgttactaccttgtgagataaaaactgattaaacctttgtggctgtggttggctga

SEQ ID NO: 61934 - DNA, 620 bp, Homo sapiens
ggtgtgagccaccatgcctggccctaaactgtacaataggtttttaatatatttatagggttgtacaatcatcaacacaatcaacttagaacctttccgtggccccaaaaagaaacgctgcacctgttagccagcattccccaatccctccgtccctcctagtcttgaatgactaccatcctacttttttatttctctagttttgcctatggagtcataatgtataatgtgtggtccattgtgactggcatcttctacttagattaatgttctttgaattttattgtgttatagcgtatatcagtacttcatttgtttttatgttgaataataatgtatgaataccacattttatccttgagttgatggaaacgtgtgttacttctgctttatggttgttatgaacaatgctgctgtgaacatttcatgtacaagtttttgtatggacaggtgttctcagtttctgttagatacatactgaggagaagaattgctgggttatattgtaactaggttttaactgtttaaggaactgccagacttttccaaagtggctgcagcatttgacattaccaccagcagtctgtgaggattccagtttctccacatttgagccaata

SEQ ID NO: 61935 - DNA, 421 bp, Homo sapiens
ttcttgaaactctgaacaggaagccttctgttgactcatccctgcttttcagactggaaagcacttgtaattttatctgccatgtatagtctctaaaaatttattttgaagatatgctgtatcaaaagcaatttaagaaagtaggaaggtaggaaatataacaaccaaaaccaaacagtgacactaaatatatacatatatatagctgtacactagacttaacctaaactgaccagctagatgattttgatgcagtaaagacaagttaagaaaatttgtctttactgtcaacaagacagtaaacttgtctctatgtcaacaagaaaaaaggcaattagaaattcttggaaaaacagaaatttgcaaatgaagtcccaatttaatatgaggtaaactgaaatgtgacagaattctgcataat

SEQ ID NO: 61936 - DNA, 561 bp, Homo sapiens
gtaccacgcaatgatgggtgccagtgaggtggcccagaccctcgccaaggagacttttgcatccaccgcctcccagctccacagcaatgttgtcaactatgtccagcagatcgtggcacccaagggcagttagaggctcgtgtgcatggcccctgcctcttcaggctctccaggctttcagaataattgtttgttcccaaattcctgttccctgatcaacttcctggagtttatatcccctcaggataatctattctctagcttaggtatctgtgactcttgggcctctgctctggtgggaacttacttctctatagcccactgagccccgagacagagaacctgcccacagctctccccgctacaggctgcaggcactgcagggcagcgggtattctcctccccacctaagtctctgggaagaagtggagaggactgatgctcttcttttttctctttcctttttcttgctgattttatgcaaagggctggcattctgattgttcttttttcaggtttaatccttattttaataaagttttcaagaaaaaagttaaaaaa

SEQ ID NO: 61937 - DNA, 342 bp, Homo sapiens
cacagccacacctgtccccaccctgacactgagcccccaaggctgatgctagggttaagcactgcccactgtttctggagtgaggtgcaggcaggggagggttctgagtctggaagggccctgatctgactcaggtgttcacaaggtctctgggtggggaacagactgggggagcagggagaggagcctagaggccagggaagaggctgccaggatggtccagtcaggaggggatggagttcagccagaggtggtgggagaaatgtacaactgtagaaggtgaaactgacagagtccatggctgagtgcttctgtgtggggcgtgagggcaagggaagggct

SEQ ID NO: 61938 - DNA, 830 bp, Homo sapiens
ctagaagtgtgactgaaataggagaaccacgtccaggggttcaggggggattcctctgaaatcgcagctggaagcatttcgtaatagttctggtactgcacccatagatactgtcacctctactctttcttccaatcaccattagcagatgccacaggattcctacttctgaaagtttttgggccccgcaggtggaagaccggagaagccaataaagtttaaggctacattttattccatccacaaatttggtgaaggaggaaatgtttacaattctgccatgccatgaataggagttttccaccgggtgtacactgctgttaacaaggtgtaaatacttgtccagtaaagagaccgtacggtactgctgatggacgtcccaacacaatgccagatgcaaaaacttctttggtgattgcttttgataacactgagtggctaaaggtcttctttcacatctttgcccacctcaaatcctgaaggcaaggtctctggaatttgaggctgtgccctcacatgcctccaaggcaccaacaaagcaaaatgaagagtctgcactgcttatcagttgacccaacactcagtccacattggaggggaaggggtggtgggctgaggatgtcttcttcctgtccaggatgcaatatggtcaaggatgaaaggaaagagatgctgggagcaagtctgcattgaagatgtatttctgttgctttactaccaaccctggttataaatgatgaaactataatgggtctgtaatagctactttcccatatagctcttgtctgtacatacataaaattaaaaataatagaatacttccattacta

SEQ ID NO: 61939 - DNA, 883 bp, Homo sapiens
ctagaagtgtgactgaaataggagaaccacgtccaggggttcaggggggattcctctgaaatcgcagctggaagcatttcgtaatagttctggtactgcacccatagatactgtcacctctactctttcttccaatcaccattagcagatgccacaggattcctacttctgaaagtttttgggccccgcaggtggaagaccggagaagccaataaagtttaaggctacattttattccatccacaaatttggtgaaggaggaaatgtttacaattctgccatgccatgaataggagttttccaccgggtgtacactgctgttaacaaggtgtaaatacttgtccagtaaagagaccgtacggtactgctgatggacgtcccaacacaatgccagatgcaaaaacttctttggtgattgcttttgataacactgagtggctaaaggtcttctttcacatctttgcccacctcaaatcctgaaggcaaggtctctggaatttgaggctgtgccctcacatgcctccaaggcaccaacaaagcaaaatgaagagtctgcactgcttatcagttgacccaacactcagtccacattggaggggaaggggtggtgggctgaggatgtcttcttcctgtccaggatgcaatatggtcaaggatgaaaggaaagagatgctgggagcaagtctgcattgaagatgtatttctgttgctttactaccaaccctggttataaatgatgaaactataatgggtctgtaatagctactttcccatatagctcttgtctgtacatacataaaattaaaaataatagaatacttccattactaacatgtggtgacaagcattcttcatttaccatttttattccaaaaacatgatt

SEQ ID NO: 61940 - DNA, 710 bp, Homo sapiens
aacctcaggagtcatcaaattaaagagtagcatgaaagagaaaaagagaaccggttcgaatatggaagaaatgatgctggggaggcttttttctgactctgctgtgaactcaaattattaaagagcttacaaatgatcaaaacccataaaatcagttgctgatggcattctaccttacagtttcccataaagtgtatataaggtttttggaggttggggagatgctactgataaggactgcaagccagttcacttacattttgagtccacacagaagttgtataccagtcggaaactctgctttgccatctgaaaatacgatgagtacagtccagtagatggcattactaggattaactaaaggatgtcaaagcaactagtctagtgcctggcagaagtagttggagctcagtaaatgttagtcgtggtctctcctttatccctcccccagtggaaggtatggtgtcagagacatgaaccatgtcttattcatctttctgtggatgacatctagaaaaggaattcagggtgagcaaatatcagtgcatcttccctgaatgaatcaatgaatcaatgaatgtgtttccatggctctaacagcactgggaaatccagacatcagaaagagttatgaggcaagaatatgttgcaaacgtaagactgttggggaattgaagtggtcttcattaataaatttatagaaaatcaaa

SEQ ID NO: 61941 - DNA, 346 bp, Homo sapiens
atcaagcagtcccttttttcttaaagtgatagaagacatttgacagtgcttcagcatttgtcgtagatggctgtacacgtatcatgatggcaaaagctgtagagaaacctgagtctacattggaagccacaaagagcaaagagtcagtgatgtctagggtagaatggattggcacagcccacatgtgggtagatgatgaaactggtgacaatgcaagcaagacccagcagaccttggagtaacaggtcagacaggtggcagtcagaggagacagaagttgtccttaaggagaaacatttccatcttggggcttgagaggatctatggcagtaaaggctatttcaaa

SEQ ID NO: 61942 - DNA, 536 bp, Homo sapiens
cttagaagacaaaaaaaaaaaaatcacacaaaaaatctcccttgttgcgattcttctgtgaaggtacagtgtgtatgtgtgtatgtgtgtatgtgtgtgcgtgtctctgtcccagaccctgtgtcccccacactgccccctgtccttcggtgcttcccagagacccctctgagctggcctgtggggcacgggaagccccctggatgggaggcggggccacaggtcggctagagggtctccaccaggcccactgaacagaaccccacggctgccagaatgttccctgagcccacactgtggccagtgggacagtcctggtggctgacatcagcgtccatgcttggctcagggcctggggcggggtcctgggtagagtcctagccccagagccccagcccctcatgtcttgccgcccttcctccatgtgtttgtaaatactctggcatcctttggccctgagaaggtttttaaatgtgttatttacttctctaaacatgacgattgctataaaaataaacaaaagtttagaaaaatga

SEQ ID NO: 61943 - DNA, 523 bp, Homo sapiens
aataagcagtacgagctggtgggaattcggccgaggcgtcttctgtgaaggtacagtgtgtatgtgtgtatgtgtgtatgtgtgtgcgtgtctctgtcccagaccctgtgtcccccacactgccccctgtccttcggtgcttcccagagacccctctgagctggcctgtggggcacgggaagccccctggatgggaggcggggccacaggtcggctagagggtctccaccaggcccactgaacagaaccccacggctgccagaatgttccctgagcccacactgtggccagtgggacagtcctggtggctgacatcagcgtccatgcttggctcagggcctggggcggggtcctgggtagagtcctagccccagagccccagcccctcatgtcttgccgcccttcctccatgtgtttgtaaatactctggcatcctttggccctgagaaggtttttaaatgtgttatttacttctctaaacatgacgattgctataaaaataaacaaaagtttagaaaaatga

SEQ ID NO: 61944 - DNA, 508 bp, Homo sapiens
cacgcgtcgcggacgcgtgggtctgtctctctctctgtctctctctctctgtgggggtgtgtatgtgtgtgcgtgtctctgtcccagaccctgtgtcccccacactgccccctgtccttcggtgcttcccagagacccctctgagctggcctgtggggcacgggaagccccctggatgggaggcggggccacaggtcggctagagggtctccaccaggcccactgaacagaaccccacggctgccagaatgttccctgagcccacactgtggccagtgggacagtcctggtggctgacatcagcgtccatgcttggctcagggcctggggcggggtcctgggtagagtcctagccccagagccccagcccctcatgtcttgccgcccttcctccatgtgtttgtaaatactctggcatcctttggccctgagaaggtttttaaatgtgttatttacttctctaaacatgacgattgctataaaaataaacaaaagtttagaaaaatga

SEQ ID NO: 61945 - DNA, 242 bp, Homo sapiens
tttaaaaggcctcaaccttgtgtccccttttagccactgtactatttctttgctactaatgtgagccacagtttttgaaaacataacctacacttatgactgacatttcctgactagtcactcttccttttttaaaaaatatatgtagtcatattaaacatatataacattttataagtgatcttaaattattctaatatcagaaaggacaggctagcttatcctactataacaaacaatcc

SEQ ID NO: 61946 - DNA, 254 bp, Homo sapiens
actgcacccaccccaaggccatggcagggtatggagatgtcatttattataagatggacagataagctggaccaataatttacagattccagcagagggtgaggacacccagatgcgccaggactgtaggaaatcacaatgatggcaacgccttggccttcctggggacagggagccctatttccaaatatagtcacattctgaggagccgggggttataacatcaagtctgcccttgacctcacacaagccag

SEQ ID NO: 61947 - DNA, 364 bp, Homo sapiens
atagatagatagatagatagatagaaaggaggaaatattggaacatttaattgaattttttaacaggttatagatgcttggtaatcaagaacatattagttgctgagatgtgcagaatttaattgagtagagcaacgactcctggagagttcttcaacaggctccaaatgtatgggttttgttgaattactgggttttgttgaattactgggggtcctgtcagagtattagagttcaccaaactcctcttacttctggagaattcagctgtattactttatggttagacttgtcaaagaacaggtcaacactctggctgaattctagacttttatatgcaaaaaagcttttccctggggaagga

SEQ ID NO: 61948 - DNA, 432 bp, Homo sapiens
gtcttaaggggaaaaaactctagttcaggatttgagccctgaacagatagttttatagggatattagtgtaacgaaaaagaaaaaactctggctggaatgaccatcaaaggatatctggccgagtgtgttgttgctcgtgtagtcccagctactcaggaggctgagacaggaggatcacttgagcccagaagtttgacgctataacgagctctgccaattgggtgtccacactaagttcggtatcgatatggtgacctcctgggaggagggaccaccaagatgcctaaaaaggggtgaaccagcccaggtcagaaacagagcaggtgaaaacccctgtgctgattagcagtgagatcatgcctgtgaagaacacactgcgctccagcagcaacataaaaagaccctgtcttttatttaaaaaaaaaaaaaaa

SEQ ID NO: 61949 - DNA, 319 bp, Homo sapiens
caaaggatttttaaaaaacaagttttgtagctcgatattttctataaggtatggagtaaagaaactctcaagctttgctgatgacaatgtatcgttatccactaaaatataaaatgtataactaacactgtgatttctactcgtaaaaatgtatcttgtaggtgtatttgtttgtgaacaatgtgtataaggatatccactgctaaagactgaaaaccacctaacgcccatcactgaggatgttcaggttttggacaggttaaataaactactgggaacccatagagtagaatactatgtggcctttaaacagaatgag

SEQ ID NO: 61950 - DNA, 553 bp, Homo sapiens
gtccagcttcttcaccttagcaaataaaaatacaggacagccagttaaatttgaatttcagataaacaatgattttttaaaaatgtatataccatgcaacatttggaccatacttctcctaaacaaatttgttatttatctaaaattcaaatttaactgggcctcctgtatagtatctgacaaccatatatatataaaaacatgacctcaaaagtggcctatccagtaaaaaggaaataaaggaaatatggcataggaagtttcattgccaggattaaaaatatcctatatattttctgctttaaaaaaatcaccatcttgaagtcactcacatgtacccaagccaacttcacagagatctgatgaaattcattcttcctgtgtcctaaaagtagaaatggcatgacaaaaatgtaacatcatttttatataaacataattgggtctcggttattagatatatagacaactctacacacattgaatagttgatgcacattatttttaagcacacatgaattattaataaaatatgccatatatgaagctgtaa

SEQ ID NO: 61951 - DNA, 2597 bp, Homo sapiens
  misc_feature (2591)..(2592): n is a, c, g, or t
  misc_feature (2594)..(2596): n is a, c, g, or t
atgcatctgctcccagccctggcaggggtcctggccacactcgtcctcgcccagccctgtgagggcactgacccagcctcccctggggcagtggagacctcggtcctgcgagactgcatagcagaggccaagttgctggtggatgctgcctacaattggacccagaagagcatcaagcagcggcttcgcagcggttcagccagccccatggacctcctgtcctacttcaaacaaccggtagcagccaccaggacagttgttcgggccgcagattatatgcatgtggctttggggctgcttgaagagaagttacaaccccagcggtccggacccttcaatgtcactgatgtgctaacagaaccacagctgcggctgctgtcccaggccagtggctgtgctctccgggaccaggccgagcgctgcagcgacaagtaccgcaccatcactggacggtgcaacaacaagaggagacccttgctaggggcctccaaccaggctctggctcgctggctgcccgccgagtatgaggatgggctgtcgctccccttcggctggacccccagcaggaggcgcaatggcttccttctccctcttgtccgggctgtctccaaccagattgtgcgcttccccaatgagagactgacctccgaccgtggccgagccctcatgttcatgcagtggggccagttcattgaccatgacctggacttctccccggagtccccggccagagtggccttcactgcaggcgttgactgtgagaggacctgcgcccagctgcccccctgctttcccatcaagatcccacccaatgacccccgcatcaagaaccagcgtgactgcatccctttcttccgctcggcaccctcatgcccccaaaacaagaacagagtccgcaaccagatcaacgcgctcacctcctttgtggacgccagcatggtgtatggcagtgaggtctccctctcgctgcggctccgcaaccggaccaactacctggggctgctggccatcaaccagcgctttcaagacaacggccgggccctgctgcccttcgacaacctgcacgatgacccctgtctcctcaccaaccgctcggcgcgcatcccctgcttcctggcaggtgacacccgatcaacggaaacccccaaactggcagccatgcacaccctctttatgcgagagcacaaccggctggccaccgagctgagacgcctgaatccccggtggaatggagacaaactgtacaatgaggctcggaagatcatgggggccatggtccagatcatcacctaccgagactttctgcccctggttctgggcaaggcccgggccaggagaaccctggggcactacagggggtactgctccaatgtggacccacgggtggccaatgtcttcaccctggccttccgctttggccacacaatgctccagcccttcatgttccgcttggacagtcagtaccgggcctccgcacccaactcgcatgtcccacttagctctgccttctttgccagctggcggatcgtgtatgaagggggcatcgaccccatcctccggggcctcatggccacccctgccaagctgaaccgtcaggatgccatgttagtggatgagctccgggaccggctgtttcggcaagtgaggaggattgggctggacctggcagctctcaacatgcaacgaagccgggaccacggccttccagggtacaatgcttggaggcgcttctgtgggctctcccagccccggaatttggcacagcttagccgggtgctgaaaaaccaggacttggcaaggaagttcctgaatttgtatggaacacctgacaacattgacatctggattggggccatcgctgagcctcttttgccgggggctcgagtggggcctcttctggcttgtctgttcgagaaccagttcagaagagcccgagacggagacaggttctggtggcagaaacgaggtgttttcaccaaaagacagcgcaaggccctgagcagaatttccttgtctcgaattatatgtgacaataccggtatcaccacggtttcaagggacatcttcagagccaacatctaccctcggggctttgtgaactgcagccgtatccccaggttgaacctatcagcctggcgagggacatgaggcttctgcaggagtctatcccaagtctccaacttttggagacaaggggaaggggaggaccatgaggctgccttgtctccctggagcaagtgcaggctgctgacgcttctgctggctacagctcagagctgggttccccagccaggagtgaaggctgggggctcctatcagcaatggaccttcccgccttgggagcctcttaggtattaggctatgaatcagcgccacgtgcaaaggcttgggagccaagccatgtggtcttgcaccccaggcaagaaaagtcagctggagggtttacagcactttctactgtttcccagccctccctcccctccctcaccatgactaagagaccactcggtcctagcctccagacaccccacaatactcctctgagcctgaggccaggcagcatgctctgcttctaccaataaagcactgcnnannnc

SEQ ID NO: 61952 - DNA, 408 bp, Homo sapiens
agaggccctgattgtcccccttccactaaggtggtcctgtagttgaccaggtgtgggctgcatggtagctcttttccaggattctacagcctggagtaacatatagctctctctgctatatcccgaagtccctgcggatcagcccccgagggccttccagcttccgtctcccaatactaagttcacttcttgtatctcacggcagagaggagatttagcattccttggagacctgaaaggatgcagtgagcttaagaattttcaagagcttatcaatcggtcagcccttgttcatctctgagcagatgtgtggtggtattgtagtagacctttagtaggcactctgccgaataactagagtggcacttatggtttagtccatttcaccctggtatttcatcaaccaga

SEQ ID NO: 61953 - DNA, 597 bp, Homo sapiens
gtttacatcatattactacacaactattattcactatcaagccaaataatataattatgcttcttttctagtataattgtttagctgagtattaaaagttgccttagttttcatttactagataactatgacaccattaatatttcctctaaatgctccaatgttttattccgtagctgtcaataacattttccatgcactcactcactccagtttcttcttttccttgatgtcctccctttcagagcctgctgaacaggctgctttcttggccagttgcacagttgtcttctgggacttttcatcaatattatatccactatttttgggcagctatgttgtgctctttctgggtttgctggtctgaagatgtccttatttttcttttatgcttgattcatagtttggctggctataaattctagtctcactcagaattttgacaatattgctttatggttttctagtatccactgttgctgttgagaagtcatgtgttaatttgacttcaactttgctttttctctcttgatgctcttagaaaagtcttttatcaccagtgttctaagatttcatgatgataaagcttggcattaa

SEQ ID NO: 61954 - DNA, 401 bp, Homo sapiens
ttttgactgtaacctcatgaaagaccctgagccagaatcacccagcaaagctgattccagattccttgtcctcaaaaaatgtgtgagataataaatgttgtcgttagctgctgagtttaagggtaacttatttgcagcaatagataactaatactatttttttccttttttttctgactccaacttgtatgactaaagtactaaatttaaaaagtataaaaagagataagctgggtgtggtggctcacacctgtaatcccaacactttggcaggctgaggcaggaagattgcttgaatccaggagtttgagaccagcctgggcaacatggcaaaaccccgattcaacaacaaatacaaaaatgagctgggcatggtggtgtgtccctgcagtcccagttac

SEQ ID NO: 61955 - DNA, 5077 bp, Homo sapiens
  misc_feature (3067)..(3067): n is a, c, g, or t
atatggtcgatgcaaaaacttcacgtttcttcggaatagccagagaccaaagtgcgacatggagactagaagcagccggcgctggtcagccgcctcgttctgttttattaccttggactccaggaggatcagctgcgcctggtgacatagagcagcttttcctctccagaagctcctcacctttaaacagagtatcctctgggtgctgaaaagaaagaaagacagaaagagagaaagagagagagagagagaaagagagaatgcaagcctaattggttgcatggatgcagggccaaagggctaggttttggggtactagggagtgaggtacaaggccagcttgcccagtcccagctctgccctccaggaacatgaggtgcaaaggtacccaaatgggggcttgcttgtatttggggcctgtgggaagaaagcaagcttcaaagaagcccagtggggagctctagggtgcattttgacaaggtggaggtgcccttgccaccatcccagcccacccccagctacatgggcaagggcagcgagggccccctgctattttggcagggcccagctttggctgggaacccccgggcctgggcactggtagaaagcatggcggttactcattgcctaatttgattcaagctggccagattctggtaacttttgggtgaccctgatgaagacaaagccaggacggcggcctttgtatggcagatccctgctcccgccggctgcaggcagggcgggcaggcaggaaccctcctcgcctggggcactctgcccaactcagaggcgagttcacccacccacctttcattgctctgtaccccaataggaggattcattctcccttgagctgtgcctacttggtgtcggggggcgggggttgcattcagctgggggtgagtggaagggccacggaaggttggcaaaatcagtggcagacaaaagctgggattacctgaggggaatggggtgctggggactggaactacattaatatctggcaggggctctcaaatgtgccatagcaagctacttgattacacgtatgttatttagttaaatttgtgaaaattatgagatgctcaccaacccggtgataaacttgctccctcgccattggctggcctggtcacatggctgcccaactttattcagttgacagcaagtaggagggccctatggaaggagaaaaaaagacaacacgagaaaaattagtattttctaccttctgaaattaatggtcatgagttcgtatatggtgaactccaagtatgtggaccccaagttccctccgtgcgaggagtatttgcagggcggctacctaggcgagcagggcgccgactactacggcggcggcgcgcagggcgcagacttccagcccccggggctctacccacggcccgacttcggtgagcagcctttcggaggcagcggccccgggcctggctcggcgctgcctgcgcggggtcacggacaagagccaggcggccccggcggtcactacgccgctccaggagagccttgcccagctcccccggcgcctccgccggcgcccctgcctggcgcccgggcctacagtcagtccgaccccaagcagccgccctccgggacggcactcaagcagccggccgtggtctacccctggatgaagaaggtgcacgtgaattcggtgaaccccaactacaccggtggggaacccaagcggtcccgaacggcctacacccggcagcaagtcctagaactggaaaaagaatttcattttaacaggtatctgacaaggcgccgtcggattgaaatcgctcacaccctgtgtctgtcggagcgccagatcaagatctggttccagaaccggaggatgaagtggaaaaaagatcataagctgcccaacactaaaggcaggtcatcgtcctcatcttcctcctcatcttgctcctcctcagtcgcccccagccagcatttacagccgatggccaaagaccaccacacggacctgacgaccttatagaagtggggaccctgggcccatctctccctgcgcaccaggctgagccgaagctgcgggggcaggccgggcctgctgtcacctcgctgggctctaaggtactgtggggtggacctgggacaagcaggccgccctcggactaggttagcatcctgcccgagggcagccccctccctagagcgggatggggatgggagggggggcgggattctctctctaagtatattatatggcaggagctactgagaacataaaatcttggcgagtcattaaacttatgaaaatcaccgctcttggattttgaatttgcaaatgaaggttggatgctttatcccactgtgaatttggacattctcccccactccacccctccagggtgctttgtggcttaataatgtgggggagttgaggcagaaggttggccacccctgtgctaggtgctttcagtggaagccagagagctgggtcaggatttctggactttctgggttgtctatggaatttcatgtgattaaaaaatatatattttgctcccagtggccccacctccaaagaaatgggtctaagaaggaagtaaaaatgggttattttatgtttagatatttgcttaaatatttatttgttgggaaatgtggtacagaaataactgacaccttcatgccaaaaatcttaaaaaggtgaaaggggctgaacttcagggagcagaatcagagatatgtgcacttacttctgaactccacccctccccactctctggaaatgtatataggggggccttaacccttccagaaggaagcaaaggattcactcaaagttgcattcttgaaaatatatttccacatgtgtttttttcagcactgtgcttacaaccagttctgggtgattaaaggaaagggaaaaaaaccaacaaatggtccaacattttccttctggggaaagaaaacaaaacctctatgcactgggtcattagataatgactgaattttctgttccaactggattccaaatgccctaaataccctcatatagcagtgttttacaggaattagtgtatggccngtgtaggggaggggctgtgcagtggggagaaagtgggaaggtgaggaactcttgctttaagaaggaaaaaaaaaaaaccctaattgaatctagaagtccacaaaagttagccttagagtttttttccccctgaagttttaatttttttaaaaaccaaatctaaggaagttttcctcagctcattaattagaagcagaatttgtaaaagtataaaagttttcaagcactcgtctttgccttgagaatagtggttttttaaagaatcactctcaacaggggagatgtcctctagtcgtttttcttctgcctctcctgggaagggttcaaagttcatttttctaaaatgctgaccctcaagcataaggaggaagaagtcaaagttaatggccagagttcatatactcagatgaaaccagtcttcccaaggcctcaggctccaaaaaaggttgtagctatcaaaaagtgaccaaagtgggaaagggagaaaggataagcttaaaatttaattttaagatccagaaggggggtatttttttcagtacttcaaaaacactttagaaggtttctgttgtaatttaaaaaatatatttaagtgggagggaaaaaagagtttctctgtaggcttgttctttggctgtgtctcctgagagctgagggcaggtattcactgcagtccctaggctgaaattccgcttctctgaagtgtcttccaagccttggtcttttgtattagaccctggggactgctctttgtttctccttggggtgagcctggctctcagacttgcacatggcaatacttgaatgtcaccacgtcgggatattaaagatggatattcgtgcattattcacatcattgtttctatgacaaaaagcacagagttcatacatagtcaagacgtcttttttctgacgccctcacgttgagaagctgaaaaggtattttaccgaagttcgggtaaattacagaatcaggttcatccagaggacaaattttctatttgattagctgtatttcagccgggaggactgacctctaaacccctaaccttttggactctaactacccttctcttcttttttcctctctaacatggagagcagtctttggatgtaccatttgaaaggagccgctatccttaggcaagttggaaagttgctaagctgctttcctaaaacccaaatctgtctatacattgaaccttctctttgagaaggggaaaaaggtatatattttcacaacatccaattacatatatataatagagatttgttgtatagattttcccccacctcagaagttcaggttactcacccccagtttcataccaaatgccacacaggcttaactgactgcatccctgccccagaggaaagccaagaaacatgttttcatgaggaaaacccaagctccttctcaaacatagccccactactttggaaagtaacttaatcagagaaacaacttctttgtttataagtctcagctctccttctcagcttggagggattcttttgaaatgttaatggagcctggatggcccagagtgcagcccccaaccctgaggtcccagtcggaccccagcatccatttgggcccacaggagtgggccagggaaggggtagggccccgtaaccacttagggcagggaaggaaatgggtttccatctgagaacgtgctttggagaaagctaggtgtggaaaagctccaatgcccatttgctattatttgtttccagtttgttcctttaaatatgagccagaagtgtttgtgttggtgttttaaaaacaaaaacaaaaaccgtgttggggtcctgactgggggagggggagagtgaagtgtttgctgaggacattgctcctctgactcccatctcactttgtccatcgcagccttttgttgggagatgacactgtcagtcagcccatgatgtctgttcacacgagatgcttttttaatagaattgaccaatgttttgctgccactgattaaagtattatttatacta

SEQ ID NO: 61956 - DNA, 2561 bp, Homo sapiens
  misc_feature (551)..(551): n is a, c, g, or t
aaagcaagagttcctcaccttccgcactttggccccacctccaaagaaatgggtctaagaaggaagtaaaaatgggttattttatgtttagatatttgcttaaatatttatttgttgggaaatgtggtacagaaataactgacaccttcatgccaaaaatcttaaaaaggtgaaaggggctgaacttcagggagcagaatcagagatatgtgcacttacttctgaactccacccctccccactctctggaaatgtatataggggggccttaacccttccagaaggaagcaaaggattcactcaaagttgcattcttgaaaatatatttccacatgtgtttttttcagcactgtgcttacaaccagttctgggtgattaaaggaaagggaaaaaaaccaacaaatggtccaacattttccttctggggaaagaaaacaaaacctctatgcactgggtcattagataatgactgaattttctgttccaactggattccaaatgccctaaataccctcatatagcagtgttttacaggaattagtgtatggccngtgtaggggaggggctgtgcagtggggagaaagtgggaaggtgaggaactcttgctttaagaaggaaaaaaaaaaaaccctaattgaatctagaagtccacaaaagttagccttagagtttttttccccctgaagttttaatttttttaaaaaccaaatctaaggaagttttcctcagctcattaattagaagcagaatttgtaaaagtataaaagttttcaagcactcgtctttgccttgagaatagtggttttttaaagaatcactctcaacaggggagatgtcctctagtcgtttttcttctgcctctcctgggaagggttcaaagttcatttttctaaaatgctgaccctcaagcataaggaggaagaagtcaaagttaatggccagagttcatatactcagatgaaaccagtcttcccaaggcctcaggctccaaaaaaggttgtagctatcaaaaagtgaccaaagtgggaaagggagaaaggataagcttaaaatttaattttaagatccagaaggggggtatttttttcagtacttcaaaaacactttagaaggtttctgttgtaatttaaaaaatatatttaagtgggagggaaaaaagagtttctctgtaggcttgttctttggctgtgtctcctgagagctgagggcaggtattcactgcagtccctaggctgaaattccgcttctctgaagtgtcttccaagccttggtcttttgtattagaccctggggactgctctttgtttctccttggggtgagcctggctctcagacttgcacatggcaatacttgaatgtcaccacgtcgggatattaaagatggatattcgtgcattattcacatcattgtttctatgacaaaaagcacagagttcatacatagtcaagacgtcttttttctgacgccctcacgttgagaagctgaaaaggtattttaccgaagttcgggtaaattacagaatcaggttcatccagaggacaaattttctatttgattagctgtatttcagccgggaggactgacctctaaacccctaaccttttggactctaactacccttctcttcttttttcctctctaacatggagagcagtctttggatgtaccatttgaaaggagccgctatccttaggcaagttggaaagttgctaagctgctttcctaaaacccaaatctgtctatacattgaaccttctctttgagaaggggaaaaaggtatatattttcacaacatccaattacatatatataatagagatttgttgtatagattttcccccacctcagaagttcaggttactcacccccagtttcataccaaatgccacacaggcttaactgactgcatccctgccccagaggaaagccaagaaacatgttttcatgaggaaaacccaagctccttctcaaacatagccccactactttggaaagtaacttaatcagagaaacaacttctttgtttataagtctcagctctccttctcagcttggagggattcttttgaaatgttaatggagcctggatggcccagagtgcagcccccaaccctgaggtcccagtcggaccccagcatccatttgggcccacaggagtgggccagggaaggggtagggccccgtaaccacttagggcagggaaggaaatgggtttccatctgagaacgtgctttggagaaagctaggtgtggaaaagctccaatgcccatttgctattatttgtttccagtttgttcctttaaatatgagccagaagtgtttgtgttggtgttttaaaaacaaaaacaaaaaccgtgttggggtcctgactgggggagggggagagtgaagtgtttgctgaggacattgctcctctgactcccatctcactttgtccatcgcagccttttgttgggagatgacactgtcagtcagcccatgatgtctgttcacacgagatgcttttttaatagaattgaccaatgttttgctgccactgattaaagtattatttatacta

SEQ ID NO: 61957 - DNA, 5392 bp, Homo sapiens
  misc_feature (3067)..(3067): n is a, c, g, or t
atatggtcgatgcaaaaacttcacgtttcttcggaatagccagagaccaaagtgcgacatggagactagaagcagccggcgctggtcagccgcctcgttctgttttattaccttggactccaggaggatcagctgcgcctggtgacatagagcagcttttcctctccagaagctcctcacctttaaacagagtatcctctgggtgctgaaaagaaagaaagacagaaagagagaaagagagagagagagagaaagagagaatgcaagcctaattggttgcatggatgcagggccaaagggctaggttttggggtactagggagtgaggtacaaggccagcttgcccagtcccagctctgccctccaggaacatgaggtgcaaaggtacccaaatgggggcttgcttgtatttggggcctgtgggaagaaagcaagcttcaaagaagcccagtggggagctctagggtgcattttgacaaggtggaggtgcccttgccaccatcccagcccacccccagctacatgggcaagggcagcgagggccccctgctattttggcagggcccagctttggctgggaacccccgggcctgggcactggtagaaagcatggcggttactcattgcctaatttgattcaagctggccagattctggtaacttttgggtgaccctgatgaagacaaagccaggacggcggcctttgtatggcagatccctgctcccgccggctgcaggcagggcgggcaggcaggaaccctcctcgcctggggcactctgcccaactcagaggcgagttcacccacccacctttcattgctctgtaccccaataggaggattcattctcccttgagctgtgcctacttggtgtcggggggcgggggttgcattcagctgggggtgagtggaagggccacggaaggttggcaaaatcagtggcagacaaaagctgggattacctgaggggaatggggtgctggggactggaactacattaatatctggcaggggctctcaaatgtgccatagcaagctacttgattacacgtatgttatttagttaaatttgtgaaaattatgagatgctcaccaacccggtgataaacttgctccctcgccattggctggcctggtcacatggctgcccaactttattcagttgacagcaagtaggagggccctatggaaggagaaaaaaagacaacacgagaaaaattagtattttctaccttctgaaattaatggtcatgagttcgtatatggtgaactccaagtatgtggaccccaagttccctccgtgcgaggagtatttgcagggcggctacctaggcgagcagggcgccgactactacggcggcggcgcgcagggcgcagacttccagcccccggggctctacccacggcccgacttcggtgagcagcctttcggaggcagcggccccgggcctggctcggcgctgcctgcgcggggtcacggacaagagccaggcggccccggcggtcactacgccgctccaggagagccttgcccagctcccccggcgcctccgccggcgcccctgcctggcgcccgggcctacagtcagtccgaccccaagcagccgccctccgggacggcactcaagcagccggccgtggtctacccctggatgaagaaggtgcacgtgaattcggtgaaccccaactacaccggtggggaacccaagcggtcccgaacggcctacacccggcagcaagtcctagaactggaaaaagaatttcattttaacaggtatctgacaaggcgccgtcggattgaaatcgctcacaccctgtgtctgtcggagcgccagatcaagatctggttccagaaccggaggatgaagtggaaaaaagatcataagctgcccaacactaaaggcaggtcatcgtcctcatcttcctcctcatcttgctcctcctcagtcgcccccagccagcatttacagccgatggccaaagaccaccacacggacctgacgaccttatagaagtggggaccctgggcccatctctccctgcgcaccaggctgagccgaagctgcgggggcaggccgggcctgctgtcacctcgctgggctctaaggtactgtggggtggacctgggacaagcaggccgccctcggactaggttagcatcctgcccgagggcagccccctccctagagcgggatggggatgggagggggggcgggattctctctctaagtatattatatggcaggagctactgagaacataaaatcttggcgagtcattaaacttatgaaaatcaccgctcttggattttgaatttgcaaatgaaggttggatgctttatcccactgtgaatttggacattctcccccactccacccctccagggtgctttgtggcttaataatgtgggggagttgaggcagaaggttggccacccctgtgctaggtgctttcagtggaagccagagagctgggtcaggatttctggactttctgggttgtctatggaatttcatgtgattaaaaaatatatattttgctcccagtggccccacctccaaagaaatgggtctaagaaggaagtaaaaatgggttattttatgtttagatatttgcttaaatatttatttgttgggaaatgtggtacagaaataactgacaccttcatgccaaaaatcttaaaaaggtgaaaggggctgaacttcagggagcagaatcagagatatgtgcacttacttctgaactccacccctccccactctctggaaatgtatataggggggccttaacccttccagaaggaagcaaaggattcactcaaagttgcattcttgaaaatatatttccacatgtgtttttttcagcactgtgcttacaaccagttctgggtgattaaaggaaagggaaaaaaaccaacaaatggtccaacattttccttctggggaaagaaaacaaaacctctatgcactgggtcattagataatgactgaattttctgttccaactggattccaaatgccctaaataccctcatatagcagtgttttacaggaattagtgtatggccngtgtaggggaggggctgtgcagtggggagaaagtgggaaggtgaggaactcttgctttaagaaggaaaaaaaaaaaaccctaattgaatctagaagtccacaaaagttagccttagagtttttttccccctgaagttttaatttttttaaaaaccaaatctaaggaagttttcctcagctcattaattagaagcagaatttgtaaaagtataaaagttttcaagcactcgtctttgccttgagaatagtggttttttaaagaatcactctcaacaggggagatgtcctctagtcgtttttcttctgcctctcctgggaagggttcaaagttcatttttctaaaatgctgaccctcaagcataaggaggaagaagtcaaagttaatggccagagttcatatactcagatgaaaccagtcttcccaaggcctcaggctccaaaaaaggttgtagctatcaaaaagtgaccaaagtgggaaagggagaaaggataagcttaaaatttaattttaagatccagaaggggggtatttttttcagtacttcaaaaacactttagaaggtttctgttgtaatttaaaaaatatatttaagtgggagggaaaaaagagtttctctgtaggcttgttctttggctgtgtctcctgagagctgagggcaggtattcactgcagtccctaggctgaaattccgcttctctgaagtgtcttccaagccttggtcttttgtattagaccctggggactgctctttgtttctccttggggtgagcctggctctcagacttgcacatggcaatacttgaatgtcaccacgtcgggatattaaagatggatattcgtgcattattcacatcattgtttctatgacaaaaagcacagagttcatacatagtcaagacgtcttttttctgacgccctcacgttgagaagctgaaaaggtattttaccgaagttcgggtaaattacagaatcaggttcatccagaggacaaattttctatttgattagctgtatttcagccgggaggactgacctctaaacccctaaccttttggactctaactacccttctcttcttttttcctctctaacatggagagcagtctttggatgtaccatttgaaaggagccgctatccttaggcaagttggaaagttgctaagctgctttcctaaaacccaaatctgtctatacattgaaccttctctttgagaaggggaaaaaggtatatattttcacaacatccaattacatatatataatagagatttgttgtatagattttcccccacctcagaagttcaggttactcacccccagtttcataccaaatgccacacaggcttaactgactgcatccctgccccagaggaaagccaagaaacatgttttcatgaggaaaacccaagctccttctcaaacatagccccactactttggaaagtaacttaatcagagaaacaacttctttgtttataagtctcagctctccttctcagcttggagggattcttttgaaatgttaatggagcctggatggcccagagtgcagcccccaaccctgaggtcccagtcggaccccagcatccatttgggcccacaggagtgggccagggaaggggtagggccccgtaaccacttagggcagggaaggaaatgggtttccatctgagaacgtgctttggagaaagctaggtgtggaaaagctccaatgcccatttgctattatttgtttccagtttgttcctttaaatatgagccagaagtgtttgtgttggtgttttaaaaacaaaaacaaaaaccgtgttggggtcctgactgggggagggggagagtgaagtgtttgctgaggacattgctcctctgactcccatctcactttgtccatcgcagccttttgttgggagatgacactgtcagtcagcccatgatgtctgttcacacgagatgcttttttaatagaattgaccaatgttttgctgccactgattaaagtattatttatactaattgttgcttgtagttttgatgtaattcattgatctatatttaaaataataaaaggtgtagcaaaatctccctcctgtttggtgccttaacagaagcattcatcctttgttaagtcttctaaaagctaacatttaacataaacaagttattattttctgcaataaattaggcaccattttttggggggtgcctaaagtgtgaaggttaaaccatgtaaggcttagcaattctattattaccacctccttaatgtacacacactcccagttggccaccatattttgtgagcattgggaagcctggggttgaattca

SEQ ID NO: 61958 - DNA, 2870 bp, Homo sapiens
gaggagctgagaggaacaggaagtgtcaggactttacgacccgcgcctccagctgaggtttctagacgtgacccagggcagactggtagcaaagcccccacgcccagccaggagcaccgccgaggactccagcacaccgagggacatgctgggcctgcgccccccactgctcgccctggtggggctgctctccctcgggtgcgtcctctctcaggagtgcacgaagttcaaggtcagcagctgccgggaatgcatcgagtcggggcccggctgcacctggtgccagaagctgaacttcacagggccgggggatcctgactccattcgctgcgacacccggccacagctgctcatgaggggctgtgcggctgacgacatcatggaccccacaagcctcgctgaaacccaggaagaccacaatgggggccagaagcagctgtccccacaaaaagtgacgctttacctgcgaccaggccaggcagcagcgttcaacgtgaccttccggcgggccaagggctaccccatcgacctgtactatctgatggacctctcctactccatgcttgatgacctcaggaatgtcaagaagctaggtggcgacctgctccgggccctcaacgagatcaccgagtccggccgcattggcttcgggtccttcgtggacaagaccgtgctgccgttcgtgaacacgcaccctgataagctgcgaaacccatgccccaacaaggagaaagagtgccagcccccgtttgccttcaggcacgtgctgaagctgaccaacaactccaaccagtttcagaccgaggtcgggaagcagctgatttccggaaacctggatgcacccgagggtgggctggacgccatgatgcaggtcgccgcctgcccggaggaaatcggctggcgcaacgtcacgcggctgctggtgtttgccactgatgacggcttccatttcgcgggcgacgggaagctgggcgccatcctgacccccaacgacggccgctgtcacctggaggacaacttgtacaagaggagcaacgaattcgactacccatcggtgggccagctggcgcacaagctggctgaaaacaacatccagcccatcttcgcggtgaccagtaggatggtgaagacctacgagaaactcaccgagatcatccccaagtcagccgtgggggagctgtctgaggactccagcaatgtggtccatctcattaagaatgcttacaataaactctcctccagggtcttcctggatcacaacgccctccccgacaccctgaaagtcacctacgactccttctgcagcaatggagtgacgcacaggaaccagcccagaggtgactgtgatggcgtgcagatcaatgtcccgatcaccttccaggtgaaggtcacggccacagagtgcatccaggagcagtcgtttgtcatccgggcgctgggcttcacggacatagtgaccgtgcaggtccttccccagtgtgagtgccggtgccgggaccagagcagagaccgcagcctctgccatggcaagggcttcttggagtgcggcatctgcaggtgtgacactggctacattgggaaaaactgtgagtgccagacacagggccggagcagccaggagctggaaggaagctgccggaaggacaacaactccatcatctgctcagggctgggggactgtgtctgcgggcagtgcctgtgccacaccagcgacgtccccggcaagctgatatacgggcagtactgcgagtgtgacaccatcaactgtgagcgctacaacggccaggtctgcggcggcccggggagggggctctgcttctgcgggaagtgccgctgccacccgggctttgagggctcagcgtgccagtgcgagaggaccactgagggctgcctgaacccgcggcgtgttgagtgtagtggtcgtggccggtgccgctgcaacgtatgcgagtgccattcaggctaccagctgcctctgtgccaggagtgccccggctgcccctcaccctgtggcaagtacatctcctgcgccgagtgcctgaagttcgaaaagggcccctttgggaagaactgcagcgcggcgtgtccgggcctgcagctgtcgaacaaccccgtgaagggcaggacctgcaaggagagggactcagagggctgctgggtggcctacacgctggagcagcaggacgggatggaccgctacctcatctatgtggatgagagccgagagtgtgtggcaggccccaacatcgccgccatcgtcgggggcaccgtggcaggcatcgtgctgatcggcattctcctgctggtcatctggaaggctctgatccacctgagcgacctccgggagtacaggcgctttgagaaggagaagctcaagtcccagtggaacaatgataatccccttttcaagagcgccaccacgacggtcatgaaccccaagtttgctgagagttaggagcacttggtgaagacaaggccgtcaggacccaccatgtctgccccatcacgcggccgagacatggcttgccacagctcttgaggatgtcaccaattaaccagaaatccagttattttccgccctcaaaatgacagccatggccggccgggtgcttctgggggctcgtcggggggacagctccactctgactggcacagtctttgcatggagacttgaggagggagggcttgaggttggtgaggttaggtgcgtgtttcctgtgcaagtcaggacatcagtctgattaaaggtggtgccaatttatttacatttaaacttgtcagggtataaaatgacatcccattaattatattgttaatcaatcacgtgtatagaaaaaaaataaaacttcaatacaggctgtccatggaaa

SEQ ID NO: 61959 - DNA, 2786 bp, Homo sapiens
agcacaggctctgctcacggaggacctggggcacactggggcagagtgcacacaccgggacatgctgggcctgcgccccccactgctcgccctggtggggctgctctccctcgggtgcgtcctctctcaggagtgcacgaagttcaaggtcagcagctgccgggaatgcatcgagtcggggcccggctgcacctggtgccagaagctgaacttcacagggccgggggatcctgactccattcgctgcgacacccggccacagctgctcatgaggggctgtgcggctgacgacatcatggaccccacaagcctcgctgaaacccaggaagaccacaatgggggccagaagcagctgtccccacaaaaagtgacgctttacctgcgaccaggccaggcagcagcgttcaacgtgaccttccggcgggccaagggctaccccatcgacctgtactatctgatggacctctcctactccatgcttgatgacctcaggaatgtcaagaagctaggtggcgacctgctccgggccctcaacgagatcaccgagtccggccgcattggcttcgggtccttcgtggacaagaccgtgctgccgttcgtgaacacgcaccctgataagctgcgaaacccatgccccaacaaggagaaagagtgccagcccccgtttgccttcaggcacgtgctgaagctgaccaacaactccaaccagtttcagaccgaggtcgggaagcagctgatttccggaaacctggatgcacccgagggtgggctggacgccatgatgcaggtcgccgcctgcccggaggaaatcggctggcgcaacgtcacgcggctgctggtgtttgccactgatgacggcttccatttcgcgggcgacgggaagctgggcgccatcctgacccccaacgacggccgctgtcacctggaggacaacttgtacaagaggagcaacgaattcgactacccatcggtgggccagctggcgcacaagctggctgaaaacaacatccagcccatcttcgcggtgaccagtaggatggtgaagacctacgagaaactcaccgagatcatccccaagtcagccgtgggggagctgtctgaggactccagcaatgtggtccatctcattaagaatgcttacaataaactctcctccagggtcttcctggatcacaacgccctccccgacaccctgaaagtcacctacgactccttctgcagcaatggagtgacgcacaggaaccagcccagaggtgactgtgatggcgtgcagatcaatgtcccgatcaccttccaggtgaaggtcacggccacagagtgcatccaggagcagtcgtttgtcatccgggcgctgggcttcacggacatagtgaccgtgcaggtccttccccagtgtgagtgccggtgccgggaccagagcagagaccgcagcctctgccatggcaagggcttcttggagtgcggcatctgcaggtgtgacactggctacattgggaaaaactgtgagtgccagacacagggccggagcagccaggagctggaaggaagctgccggaaggacaacaactccatcatctgctcagggctgggggactgtgtctgcgggcagtgcctgtgccacaccagcgacgtccccggcaagctgatatacgggcagtactgcgagtgtgacaccatcaactgtgagcgctacaacggccaggtctgcggcggcccggggagggggctctgcttctgcgggaagtgccgctgccacccgggctttgagggctcagcgtgccagtgcgagaggaccactgagggctgcctgaacccgcggcgtgttgagtgtagtggtcgtggccggtgccgctgcaacgtatgcgagtgccattcaggctaccagctgcctctgtgccaggagtgccccggctgcccctcaccctgtggcaagtacatctcctgcgccgagtgcctgaagttcgaaaagggcccctttgggaagaactgcagcgcggcgtgtccgggcctgcagctgtcgaacaaccccgtgaagggcaggacctgcaaggagagggactcagagggctgctgggtggcctacacgctggagcagcaggacgggatggaccgctacctcatctatgtggatgagagccgagagtgtgtggcaggccccaacatcgccgccatcgtcgggggcaccgtggcaggcatcgtgctgatcggcattctcctgctggtcatctggaaggctctgatccacctgagcgacctccgggagtacaggcgctttgagaaggagaagctcaagtcccagtggaacaatgataatccccttttcaagagcgccaccacgacggtcatgaaccccaagtttgctgagagttaggagcacttggtgaagacaaggccgtcaggacccaccatgtctgccccatcacgcggccgagacatggcttgccacagctcttgaggatgtcaccaattaaccagaaatccagttattttccgccctcaaaatgacagccatggccggccgggtgcttctgggggctcgtcggggggacagctccactctgactggcacagtctttgcatggagacttgaggagggagggcttgaggttggtgaggttaggtgcgtgtttcctgtgcaagtcaggacatcagtctgattaaaggtggtgccaatttatttacatttaaacttgtcagggtataaaatgacatcccattaattatattgttaatcaatcacgtgtatagaaaaaaaataaaacttcaatacaggctgtccatggaaa

SEQ ID NO: 61960 - DNA, 3235 bp, Homo sapiens
  misc_feature (2920)..(2920): n is a, c, g, or t
gaggagctgagaggaacaggaagtgtcaggactttacgacccgcgcctccagctgaggtttctagacgtgacccagggcagactggtagcaaagcccccacgcccagccaggagcaccgccgaggactccagcacaccgagggacatgctgggcctgcgccccccactgctcgccctggtggggctgctctccctcgggtgcgtcctctctcaggagtgcacgaagttcaaggtcagcagctgccgggaatgcatcgagtcggggcccggctgcacctggtgccagaagctgaacttcacagggccgggggatcctgactccattcgctgcgacacccggccacagctgctcatgaggggctgtgcggctgacgacatcatggaccccacaagcctcgctgaaacccaggaagaccacaatgggggccagaagcagctgtccccacaaaaagtgacgctttacctgcgaccaggccaggcagcagcgttcaacgtgaccttccggcgggccaagggctaccccatcgacctgtactatctgatggacctctcctactccatgcttgatgacctcaggaatgtcaagaagctaggtggcgacctgctccgggccctcaacgagatcaccgagtccggccgcattggcttcgggtccttcgtggacaagaccgtgctgccgttcgtgaacacgcaccctgataagctgcgaaacccatgccccaacaaggagaaagagtgccagcccccgtttgccttcaggcacgtgctgaagctgaccaacaactccaaccagtttcagaccgaggtcgggaagcagctgatttccggaaacctggatgcacccgagggtgggctggacgccatgatgcaggtcgccgcctgcccggaggaaatcggctggcgcaacgtcacgcggctgctggtgtttgccactgatgacggcttccatttcgcgggcgacgggaagctgggcgccatcctgacccccaacgacggccgctgtcacctggaggacaacttgtacaagaggagcaacgaattcgactacccatcggtgggccagctggcgcacaagctggctgaaaacaacatccagcccatcttcgcggtgaccagtaggatggtgaagacctacgagaaactcaccgagatcatccccaagtcagccgtgggggagctgtctgaggactccagcaatgtggtccatctcattaagaatgcttacaataaactctcctccagggtcttcctggatcacaacgccctccccgacaccctgaaagtcacctacgactccttctgcagcaatggagtgacgcacaggaaccagcccagaggtgactgtgatggcgtgcagatcaatgtcccgatcaccttccaggtgaaggtcacggccacagagtgcatccaggagcagtcgtttgtcatccgggcgctgggcttcacggacatagtgaccgtgcaggtccttccccagtgtgagtgccggtgccgggaccagagcagagaccgcagcctctgccatggcaagggcttcttggagtgcggcatctgcaggtgtgacactggctacattgggaaaaactgtgagtgccagacacagggccggagcagccaggagctggaaggaagctgccggaaggacaacaactccatcatctgctcagggctgggggactgtgtctgcgggcagtgcctgtgccacaccagcgacgtccccggcaagctgatatacgggcagtactgcgagtgtgacaccatcaactgtgagcgctacaacggccaggtctgcggcggcccggggagggggctctgcttctgcgggaagtgccgctgccacccgggctttgagggctcagcgtgccagtgcgagaggaccactgagggctgcctgaacccgcggcgtgttgagtgtagtggtcgtggccggtgccgctgcaacgtatgcgagtgccattcaggctaccagctgcctctgtgccaggagtgccccggctgcccctcaccctgtggcaagtacatctcctgcgccgagtgcctgaagttcgaaaagggcccctttgggaagaactgcagcgcggcgtgtccgggcctgcagctgtcgaacaaccccgtgaagggcaggacctgcaaggagagggactcagagggctgctgggtggcctacacgctggagcagcaggacgggatggaccgctacctcatctatgtggatgagagccgagagtgtgtggcaggccccaacatcgccgccatcgtcgggggcaccgtggcaggcatcgtgctgatcggcattctcctgctggtcatctggaaggctctgatccacctgagcgacctccgggagtacaggcgctttgagaaggagaagctcaagtcccagtggaacaatgataatccccttttcaagagcgccaccacgacggtcatgaaccccaagtttgctgagagttaggagcacttggtgaagacaaggccgtcaggacccaccatgtctgccccatcacgcggccgagacatggcttgccacagctcttgaggatgtcaccaattaaccagaaatccagttattttccgccctcaaaatgacagccatggccggccgggtgcttctgggggctcgtcggggggacagctccactctgactggcacagtctttgcatggagacttgaggagggagggcttgaggttggtgaggttaggtgcgtgtttcctgtgcaagtcaggacatcagtctgattaaaggtggtgccaatttatttacatttaaacttgtcagggtataaaatgacatcccattaattatattgttaatcaatcacgtgtatagaaaaaaaataaaacttcaatacaggctgtccatggaaaaaaaaaaaaaaaaaaaaaaaaaaaaaaaaaaaaaaaaaaaaaaaaaaaanaaaaaaaaaaaaaaaaaaaaaaaaaaaaaaaaaaaaaaaaaaaaaaaaaaaaaaaaaaaagggggcccccttggcccaaacgattttaaaactggaaaaatttaaaaaaggggcccaaattcgggctaaattggccaaatcccccaaagagggggggaataaaaaaaaaatggcccgtcgttaaaaaagcaggaaatggaaaaaaccgggggaaacccaaataaaacggcttggaaaaaaaaaccccttttccaaacgggggaaaaatcaaaaaggcccaacacaaatgcgccttttaaaaaagtgcccaaccaa

SEQ ID NO: 61961 - DNA, 3252 bp, Homo sapiens
gaggagctgagaggaacaggaagtgtcaggactttacgacccgcgcctccagctgaggtttctagacgtgacccagggcagactggtagcaaagcccccacgcccagccaggagcaccgccgaggactccagcacaccgagggacatgctgggcctgcgccccccactgctcgccctggtggggctgctctccctcgggtgcgtcctctctcaggagtgcacgaagttcaaggtcagcagctgccgggaatgcatcgagtcggggcccggctgcacctggtgccagaagctgaacttcacagggccgggggatcctgactccattcgctgcgacacccggccacagctgctcatgaggggctgtgcggctgacgacatcatggaccccacaagcctcgctgaaacccaggaagaccacaatgggggccagaagcagctgtccccacaaaaagtgacgctttacctgcgaccaggccaggcagcagcgttcaacgtgaccttccggcgggccaagggctaccccatcgacctgtactatctgatggacctctcctactccatgcttgatgacctcaggaatgtcaagaagctaggtggcgacctgctccgggccctcaacgagatcaccgagtccggccgcattggcttcgggtccttcgtggacaagaccgtgctgccgttcgtgaacacgcaccctgataagctgcgaaacccatgccccaacaaggagaaagagtgccagcccccgtttgccttcaggcacgtgctgaagctgaccaacaactccaaccagtttcagaccgaggtcgggaagcagctgatttccggaaacctggatgcacccgagggtgggctggacgccatgatgcaggtcgccgcctgcccggaggaaatcggctggcgcaacgtcacgcggctgctggtgtttgccactgatgacggcttccatttcgcgggcgacgggaagctgggcgccatcctgacccccaacgacggccgctgtcacctggaggacaacttgtacaagaggagcaacgaattcgactacccatcggtgggccagctggcgcacaagctggctgaaaacaacatccagcccatcttcgcggtgaccagtaggatggtgaagacctacgagaaactcaccgagatcatccccaagtcagccgtgggggagctgtctgaggactccagcaatgtggtccatctcattaagaatgcttacaataaactctcctccagggtcttcctggatcacaacgccctccccgacaccctgaaagtcacctacgactccttctgcagcaatggagtgacgcacaggaaccagcccagaggtgactgtgatggcgtgcagatcaatgtcccgatcaccttccaggtgaaggtcacggccacagagtgcatccaggagcagtcgtttgtcatccgggcgctgggcttcacggacatagtgaccgtgcaggtccttccccagtgtgagtgccggtgccgggaccagagcagagaccgcagcctctgccatggcaagggcttcttggagtgcggcatctgcaggtgtgacactggctacattgggaaaaactgtgagtgccagacacagggccggagcagccaggagctggaaggaagctgccggaaggacaacaactccatcatctgctcagggctgggggactgtgtctgcgggcagtgcctgtgccacaccagcgacgtccccggcaagctgatatacgggcagtactgcgagtgtgacaccatcaactgtgagcgctacaacggccaggtctgcggcggcccggggagggggctctgcttctgcgggaagtgccgctgccacccgggctttgagggctcagcgtgccagtgcgagaggaccactgagggctgcctgaacccgcggcgtgttgagtgtagtggtcgtggccggtgccgctgcaacgtatgcgagtgccattcaggctaccagctgcctctgtgccaggagtgccccggctgcccctcaccctgtggcaagtacatctcctgcgccgagtgcctgaagttcgaaaagggcccctttgggaagaactgcagcgcggcgtgtccgggcctgcagctgtcgaacaaccccgtgaagggcaggacctgcaaggagagggactcagagggctgctgggtggcctacacgctggagcagcaggacgggatggaccgctacctcatctatgtggatgagagccgagagtgtgtggcaggccccaacatcgccgccatcgtcgggggcaccgtggcaggcatcgtgctgatcggcattctcctgctggtcatctggaaggctctgatccacctgagcgacctccgggagtacaggcgctttgagaaggagaagctcaagtcccagtggaacaatgataatccccttttcaagagcgccaccacgacggtcatgaaccccaagtttgctgagagttaggagcacttggtgaagacaaggccgtcaggacccaccatgtctgccccatcacgcggccgagacatggcttgccacagctcttgaggatgtcaccaattaaccagaaatccagttattttccgccctcaaaatgacagccatggccggccgggtgcttctgggggctcgtcggggggacagctccactctgactggcacagtctttgcatggagacttgaggagggagggcttgaggttggtgaggttaggtgcgtgtttcctgtgcaagtcaggacatcagtctgattaaaggtggtgccaatttatttacatttaaacttgtcagggtataaaatgacatcccattaattatattgttaatcaatcacgtgtatagaaaaaaaataaaacttcaatacaggctgtccatggaaaaaaaaaaaaaaaaaaaaaaaaaaaaaaaaaaaaaaaaaaaaaaaaaaagggggggcgcccccaaaaattctcccccggggggccccattccgtcccccattttttcgagcgaagaaggtggggccccctaaatgagggaggcgctcgcgtatctattaaaatcccggtagccggcagcggagggccccggctgtttaaacaaacaaagcatgtcgatgtagcgtggagaacacaaatgggcgccactacgggggggaatatccctggggggaggagacaacccctaaacgtcgggggggggaggagacacattttggggggggaacaacattgcccccaagaagaattataaagcggtcccggaggggagaaaattacactc

SEQ ID NO: 61962 - DNA, 2485 bp, Homo sapiens
gccacccttggctatcacgcagccatctcagtgagctgtgtatcaacaaaggctacagagaagatcagtctcacacatgctcttctgaatagtagtcgagtgggtagcccttaaactgcgcagtttaagggctaccccatcgacctgtactatctgatggacctctcctactccatgcttgatgacctcaggaatgtcaagaagctaggtggcgacctgctccgggccctcaacgagatcaccgagtccggccgcattggcttcgggtccttcgtggacaagaccgtgctgccgttcgtgaacacgcaccctgataagctgcgaaacccatgccccaacaaggagaaagagtgccagcccccgtttgccttcaggcacgtgctgaagctgaccaacaactccaaccagtttcagaccgaggtcgggaagcagctgatttccggaaacctggatgcacccgagggtgggctggacgccatgatgcaggtcgccgcctgcccggaggaaatcggctggcgcaacgtcacgcggctgctggtgtttgccactgatgacggcttccatttcgcgggcgacgggaagctgggcgccatcctgacccccaacgacggccgctgtcacctggaggacaacttgtacaagaggagcaacgaattcgactacccatcggtgggccagctggcgcacaagctggctgaaaacaacatccagcccatcttcgcggtgaccagtaggatggtgaagacctacgagaaactcaccgagatcatccccaagtcagccgtgggggagctgtctgaggactccagcaatgtggtccatctcattaagaatgcttacaataaactctcctccagggtcttcctggatcacaacgccctccccgacaccctgaaagtcacctacgactccttctgcagcaatggagtgacgcacaggaaccagcccagaggtgactgtgatggcgtgcagatcaatgtcccgatcaccttccaggtgaaggtcacggccacagagtgcatccaggagcagtcgtttgtcatccgggcgctgggcttcacggacatagtgaccgtgcaggtccttccccagtgtgagtgccggtgccgggaccagagcagagaccgcagcctctgccatggcaagggcttcttggagtgcggcatctgcaggtgtgacactggctacattgggaaaaactgtgagtgccagacacagggccggagcagccaggagctggaaggaagctgccggaaggacaacaactccatcatctgctcagggctgggggactgtgtctgcgggcagtgcctgtgccacaccagcgacgtccccggcaagctgatatacgggcagtactgcgagtgtgacaccatcaactgtgagcgctacaacggccaggtctgcggcggcccggggagggggctctgcttctgcgggaagtgccgctgccacccgggctttgagggctcagcgtgccagtgcgagaggaccactgagggctgcctgaacccgcggcgtgttgagtgtagtggtcgtggccggtgccgctgcaacgtatgcgagtgccattcaggctaccagctgcctctgtgccaggagtgccccggctgcccctcaccctgtggcaagtacatctcctgcgccgagtgcctgaagttcgaaaagggcccctttgggaagaactgcagcgcggcgtgtccgggcctgcagctgtcgaacaaccccgtgaagggcaggacctgcaaggagagggactcagagggctgctgggtggcctacacgctggagcagcaggacgggatggaccgctacctcatctatgtggatgagagccgagagtgtgtggcaggccccaacatcgccgccatcgtcgggggcaccgtggcaggcatcgtgctgatcggcattctcctgctggtcatctggaaggctctgatccacctgagcgacctccgggagtacaggcgctttgagaaggagaagctcaagtcccagtggaacaatgataatccccttttcaagagcgccaccacgacggtcatgaaccccaagtttgctgagagttaggagcacttggtgaagacaaggccgtcaggacccaccatgtctgccccatcacgcggccgagacatggcttgccacagctcttgaggatgtcaccaattaaccagaaatccagttattttccgccctcaaaatgacagccatggccggccgggtgcttctgggggctcgtcggggggacagctccactctgactggcacagtctttgcatggagacttgaggagggagggcttgaggttggtgaggttaggtgcgtgtttcctgtgcaagtcaggacatcagtctgattaaaggtggtgccaatttatttacatttaaacttgtcagggtataaaatgacatcccattaattatattgttaatcaatcacgtgtatagaaaaaaaataaaacttcaatacaggctgtccatggaaa

SEQ ID NO: 61963 - DNA, 2110 bp, Homo sapiens
tgagatggagtttcgctctgtcgcccaggctggagtgcactggtgcgatcttggctcactacaatccaagtgattctcctgactcagcctcctgagtagctgggactacaggcgtgtgccaccacgctcggctaattttgtatttttagtagagacagagtttcgccatgttggccaggctggtctcaaactcttgccctcagatgatctacccgcctcggcctcccacagtgctgggattacaggcgtgagccgcggcgcccagctgtcccatggattctcaccagaacgtttccctcatgttgggtggtctgagtgggagtgtgctcagcttctcctgatttgctgtctgcgtgtcacatgtctctgcgtgatgtgtggccggggagatcctggtgccggccagtgcgggagtgcgggcagagcaccttcttgccggctgactttggctctcggatctgagcatcagctcttcctgctcctggtcaccccttcctccccacgctgaaccccccaggacccctgcagaggccaggaggtgagggttgggagctgggctgccaccctggccaccgagggtccccacctgagcccagcactgccctgcagatcaccttccaggtgaaggtcacggccacagagtgcatccaggagcagtcgtttgtcatccgggcgctgggcttcacggacatagtgaccgtgcaggtccttccccagtgtgagtgccggtgccgggaccagagcagagaccgcagcctctgccatggcaagggcttcttggagtgcggcatctgcaggtgtgacactggctacattgggaaaaactgtgagtgccagacacagggccggagcagccaggagctggaaggaagctgccggaaggacaacaactccatcatctgctcagggctgggggactgtgtctgcgggcagtgcctgtgccacaccagcgacgtccccggcaagctgatatacgggcagtactgcgagtgtgacaccatcaactgtgagcgctacaacggccaggtctgcggcggcccggggagggggctctgcttctgcgggaagtgccgctgccacccgggctttgagggctcagcgtgccagtgcgagaggaccactgagggctgcctgaacccgcggcgtgttgagtgtagtggtcgtggccggtgccgctgcaacgtatgcgagtgccattcaggctaccagctgcctctgtgccaggagtgccccggctgcccctcaccctgtggcaagtacatctcctgcgccgagtgcctgaagttcgaaaagggcccctttgggaagaactgcagcgcggcgtgtccgggcctgcagctgtcgaacaaccccgtgaagggcaggacctgcaaggagagggactcagagggctgctgggtggcctacacgctggagcagcaggacgggatggaccgctacctcatctatgtggatgagagccgagagtgtgtggcaggccccaacatcgccgccatcgtcgggggcaccgtggcaggcatcgtgctgatcggcattctcctgctggtcatctggaaggctctgatccacctgagcgacctccgggagtacaggcgctttgagaaggagaagctcaagtcccagtggaacaatgataatccccttttcaagagcgccaccacgacggtcatgaaccccaagtttgctgagagttaggagcacttggtgaagacaaggccgtcaggacccaccatgtctgccccatcacgcggccgagacatggcttgccacagctcttgaggatgtcaccaattaaccagaaatccagttattttccgccctcaaaatgacagccatggccggccgggtgcttctgggggctcgtcggggggacagctccactctgactggcacagtctttgcatggagacttgaggagggagggcttgaggttggtgaggttaggtgcgtgtttcctgtgcaagtcaggacatcagtctgattaaaggtggtgccaatttatttacatttaaacttgtcagggtataaaatgacatcccattaattatattgttaatcaatcacgtgtatagaaaaaaaataaaacttcaatacaggctgtccatggaaa

SEQ ID NO: 61964 - DNA, 2280 bp, Homo sapiens
gaggagctgagaggaacaggaagtgtcaggactttacgacccgcgcctccagctgaggtttctagacgtgacccagggcagactggtagcaaagcccccacgcccagccaggagcaccgccgaggactccagcacaccgagggacatgctgggcctgcgccccccactgctcgccctggtggggctgctctccctcgggtgcgtcctctctcaggagtgcacgaagttcaaggtcagcagctgccgggaatgcatcgagtcggggcccggctgcacctggtgccagaagctgaacttcacagggccgggggatcctgactccattcgctgcgacacccggccacagctgctcatgaggggctgtgcggctgacgacatcatggaccccacaagcctcgctgaaacccaggaagaccacaatgggggccagaagcagctgtccccacaaaaagtgacgctttacctgcgaccaggccaggcagcagcgttcaacgtgaccttccggcgggccaagggctaccccatcgacctgtactatctgatggacctctcctactccatgcttgatgacctcaggaatgtcaagaagctaggtggcgacctgctccgggccctcaacgagatcaccgagtccggccgcattggcttcgggtccttcgtggacaagaccgtgctgccgttcgtgaacacgcaccctgataagctgcgaaacccatgccccaacaaggagaaagagtgccagcccccgtttgccttcaggcacgtgctgaagctgaccaacaactccaaccagtttcagaccgaggtcgggaagcagctgatttccggaaacctggatgcacccgagggtgggctggacgccatgatgcaggtcgccgcctgcccggaggaaatcggctggcgcaacgtcacgcggctgctggtgtttgccactgatgacggcttccatttcgcgggcgacgggaagctgggcgccatcctgacccccaacgacggccgctgtcacctggaggacaacttgtacaagaggagcaacgaattcgactacccatcggtgggccagctggcgcacaagctggctgaaaacaacatccagcccatcttcgcggtgaccagtaggatggtgaagacctacgagaaactcaccgagatcatccccaagtcagccgtgggggagctgtctgaggactccagcaatgtggtccatctcattaagaatgcttacaataaactctcctccagggtcttcctggatcacaacgccctccccgacaccctgaaagtcacctacgactccttctgcagcaatggagtgacgcacaggaaccagcccagaggtgactgtgatggcgtgcagatcaatgtcccgatcaccttccaggtgaaggtcacggccacagagtgcatccaggagcagtcgtttgtcatccgggcgctgggcttcacggacatagtgaccgtgcaggtccttccccagtgtgagtgccggtgccgggaccagagcagagaccgcagcctctgccatggcaagggcttcttggagtgcggcatctgcaggtgtgacactggctacattgggaaaaactgtgagtgccagacacagggccggagcagccaggagctggaaggaagctgccggaaggacaacaactccatcatctgctcagggctgggggactgtgtctgcgggcagtgcctgtgccacaccagcgacgtccccggcaagctgatatacgggcagtactgcgagtgtgacaccatcaactgtgagcgctacaacggccaggtctgcggcggcccggggagggggctctgcttctgcgggaagtgccgctgccacccgggctttgagggctcagcgtgccagtgcgagaggaccactgagggctgcctgaacccgcggcgtgttgagtgtagtggtcgtggccggtgccgctgcaacgtatgcgagtgccattcaggctaccagctgcctctgtgccaggagtgccccggctgcccctcaccctgtggcaagtacatctcctgcgccgagtgcctgaagttcgaaaagggcccctttgggaagaactgcagcgcggcgtgtccgggcctgcagctgtcgaacaaccccgtgaagggcaggacctgcaaggagagggactcagagggctgctgggtggcctacacgctggagcagcaggacgggatggaccgctacctcatctatgtggatgagagccgagagtgtgtggcaggccccaacatcccgccatctcgtggttgctttaagtaccgccc

SEQ ID NO: 61965 - DNA, 867 bp, Homo sapiens
ggaattgcagcgcggcgtgtccgggcctgcagctgtcgaacaaccccgtgaagggcaggagctaccagctgcctctgtgccaggagtgccccggctgcccctcaccctgtggcaagtacatctcctgcgccgagtgcctgaagttcgaaaagggcccctttgggaagaactgcagccaggacgggatggaccgctacctcatctatgtggatgagagccgagagtgtgtggcaggccccaacatcgccgccatcgtcgggggcaccgtggcaggcatcgtgctgatcggcattctcctgctggtcatctggaaggctctgatccacctgagcgacctccgggagtacaggcgctttgagaaggagaagctcaagtcccagtggaacaatgataatccccttttcaagagcgccaccacgacggtcatgaaccccaagtttgctgagagttaggagcacttggtgaagacaaggccgtcaggacccaccatgtctgccccatcacgcggccgagacatggcttgccacagctcttgaggatgtcaccaattaaccagaaatccagttattttccgccctcaaaatgacagccatggccggccgggtgcttctgggggctcgtcggggggacagctccactctgactggcacagtctttgcatggagacttgaggagggagggcttgaggttggtgaggttaggtgcgtgtttcctgtgcaagtcaggacatcagtctgattaaaggtggtgccaatttatttacatttaaacttgtcagggtataaaatgacatcccattaattatattgttaatcaatcacgtgtatagaaaaaaaataaaacttcaatacaggctgtccatggaaa

SEQ ID NO: 61966 - DNA, 1474 bp, Homo sapiens
gaggagctgagaggaacaggaagtgtcaggactttacgacccgcgcctccagctgaggtttctagacgtgacccagggcagactggtagcaaagcccccacgcccagccaggagcaccgccgaggactccagcacaccgagggacatgctgggcctgcgccccccactgctcgccctggtggggctgctctccctcgggtgcgtcctctctcaggagtgcacgaagttcaaggtcagcagctgccgggaatgcatcgagtcggggcccggctgcacctggtgccagaagctgaacttcacagggccgggggatcctgactccattcgctgcgacacccggccacagctgctcatgaggggctgtgcggctgacgacatcatggaccccacaagcctcgctgaaacccaggaagaccacaatgggggccagaagcagctgtccccacaaaaagtgacgctttacctgcgaccaggccaggcagcagcgttcaacgtgaccttccggcgggccaagggctaccccatcgacctgtactatctgatggacctctcctactccatgcttgatgacctcaggaatgtcaagaagctaggtggcgacctgctccgggccctcaacgagatcaccgagtccggccgcattggcttcgggtccttcgtggacaagaccgtgctgccgttcgtgaacacgcaccctgataagctgcgaaacccatgccccaacaaggagaaagagtgccagcccccgtttgccttcaggcacgtgctgaagctgaccaacaactccaaccattttccgccctcaaaatgacagccatggccggccgggtgcttctgggggctcgtcggggggacagctccactctgactggcacagtctttgcatggagacttgaggagggagggcttgaggttggtgaggttaggtgcgtgtttcctgtgcaagtcaggacatcagtctgattaaaggtggtgccaatttatttacatttaaacttgtcagggtataaaatgacatcccattaattatattgttaatcaatcacgtgtatagaaaaaaaataaaacttcaatacaggctgtccatggaaaaaaaaaaaaaaaaaaaaaaaaaaaaaaaaaaaaaaaaaaaaaaaaaaagggggggcgcccccaaaaattctcccccggggggccccattccgtcccccattttttcgagcgaagaaggtggggccccctaaatgagggaggcgctcgcgtatctattaaaatcccggtagccggcagcggagggccccggctgtttaaacaaacaaagcatgtcgatgtagcgtggagaacacaaatgggcgccactacgggggggaatatccctggggggaggagacaacccctaaacgtcgggggggggaggagacacattttggggggggaacaacattgcccccaagaagaattataaagcggtcccggaggggagaaaattacactc

SEQ ID NO: 61967 - DNA, 838 bp, Homo sapiens
gaggagctgagaggaacaggaagtgtcaggactttacgacccgcgcctccagctgaggtttctagacgtgacccagggcagactggtagcaaagcccccacgcccagccaggagcaccgccgaggactccagcacaccgagggacatgctgggcctgcgccccccactgctcgccctggtggggctgctctccctcgggtgcgtcctctctcaggagtgcacgaagttcaaggtcagcagctgccgggaatgcatcgagtcggggcccggctgcacctggtgccagaagctgaacttcacagggccgggggatcctgactccattcgctgcgacacccggccacagctgctcatgaggggctgtgcggctgacgacatcatggaccccacaagcctcgctgaaacccaggaagaccacaatgggggccagaagcagctgtccccacaaaaagtgacgctttacctgcgaccaggccaggcagcagcgttcaacgtgaccttccggcgggccaagggctaccccatcgacctgtactatctgatggacctctcctactccatgcttgatgacctcaggaatgtcaagaagctaggtggcgacctgctccgggccctcaacgagatcaccgagtccggccgcattggcttcgggtccttcgtggacaagaccgtgtgcgtgtttcctgtgcaagtcaggacatcagtctgattaaaggtggtgccaatttatttacatttaaacttgtcagggtataaaatgacatcccattaattatattgttaatcaatcacgtgtatagaaaaaaaataaaacttcaatacaggctgtccatggaaa

SEQ ID NO: 61968 - DNA, 491 bp, Homo sapiens
gaggagctgagaggaacaggaagtgtcaggactttacgacccgcgcctccagctgaggtttctagacgtgacccagggcagactggtagcaaagcccccacgcccagccaggagcaccgccgaggactccagcacaccgagggacatgctgggcctgcgccccccactgctcgccctggtggggctgctctccctcgggtgcgtcctctctcaggagtgcacgaagttcaaggtcagcagctgccgggaatgcatcgagtcggggcccggctgcacctggtgccagaagctgggagcggctttgggtcctccagcccacgccaccgcggcgagcagtccccggaggagaagccgggtggctcccgtctgtcctcggactgagcagggtggccaggccccaggtggaaactaccttggtcaggctgggttttttccctcccctttctggaggttttcagctcctctgaaataaacacctttcagtgagaaaa

SEQ ID NO: 61969 - DNA, 2816 bp, Homo sapiens
gtcccaggccagctggaggggagcttcatgggtggtcagccccaggggttgggcctgagaccgtcaccaagaccccttccctccacaggacatgctgggcctgcgccccccactgctcgccctggtggggctgctctccctcgggtgcgtcctctctcaggagtgcacgaagttcaaggtcagcagctgccgggaatgcatcgagtcggggcccggctgcacctggtgccagaagctgaacttcacagggccgggggatcctgactccattcgctgcgacacccggccacagctgctcatgaggggctgtgcggctgacgacatcatggaccccacaagcctcgctgaaacccaggaagaccacaatgggggccagaagcagctgtccccacaaaaagtgacgctttacctgcgaccaggccaggcagcagcgttcaacgtgaccttccggcgggccaagggctaccccatcgacctgtactatctgatggacctctcctactccatgcttgatgacctcaggaatgtcaagaagctaggtggcgacctgctccgggccctcaacgagatcaccgagtccggccgcattggcttcgggtccttcgtggacaagaccgtgctgccgttcgtgaacacgcaccctgataagctgcgaaacccatgccccaacaaggagaaagagtgccagcccccgtttgccttcaggcacgtgctgaagctgaccaacaactccaaccagtttcagaccgaggtcgggaagcagctgatttccggaaacctggatgcacccgagggtgggctggacgccatgatgcaggtcgccgcctgcccggaggaaatcggctggcgcaacgtcacgcggctgctggtgtttgccactgatgacggcttccatttcgcgggcgacgggaagctgggcgccatcctgacccccaacgacggccgctgtcacctggaggacaacttgtacaagaggagcaacgaattcgactacccatcggtgggccagctggcgcacaagctggctgaaaacaacatccagcccatcttcgcggtgaccagtaggatggtgaagacctacgagaaactcaccgagatcatccccaagtcagccgtgggggagctgtctgaggactccagcaatgtggtccatctcattaagaatgcttacaataaactctcctccagggtcttcctggatcacaacgccctccccgacaccctgaaagtcacctacgactccttctgcagcaatggagtgacgcacaggaaccagcccagaggtgactgtgatggcgtgcagatcaatgtcccgatcaccttccaggtgaaggtcacggccacagagtgcatccaggagcagtcgtttgtcatccgggcgctgggcttcacggacatagtgaccgtgcaggtccttccccagtgtgagtgccggtgccgggaccagagcagagaccgcagcctctgccatggcaagggcttcttggagtgcggcatctgcaggtgtgacactggctacattgggaaaaactgtgagtgccagacacagggccggagcagccaggagctggaaggaagctgccggaaggacaacaactccatcatctgctcagggctgggggactgtgtctgcgggcagtgcctgtgccacaccagcgacgtccccggcaagctgatatacgggcagtactgcgagtgtgacaccatcaactgtgagcgctacaacggccaggtctgcggcggcccggggagggggctctgcttctgcgggaagtgccgctgccacccgggctttgagggctcagcgtgccagtgcgagaggaccactgagggctgcctgaacccgcggcgtgttgagtgtagtggtcgtggccggtgccgctgcaacgtatgcgagtgccattcaggctaccagctgcctctgtgccaggagtgccccggctgcccctcaccctgtggcaagtacatctcctgcgccgagtgcctgaagttcgaaaagggcccctttgggaagaactgcagcgcggcgtgtccgggcctgcagctgtcgaacaaccccgtgaagggcaggacctgcaaggagagggactcagagggctgctgggtggcctacacgctggagcagcaggacgggatggaccgctacctcatctatgtggatgagagccgagagtgtgtggcaggccccaacatcgccgccatcgtcgggggcaccgtggcaggcatcgtgctgatcggcattctcctgctggtcatctggaaggctctgatccacctgagcgacctccgggagtacaggcgctttgagaaggagaagctcaagtcccagtggaacaatgataatccccttttcaagagcgccaccacgacggtcatgaaccccaagtttgctgagagttaggagcacttggtgaagacaaggccgtcaggacccaccatgtctgccccatcacgcggccgagacatggcttgccacagctcttgaggatgtcaccaattaaccagaaatccagttattttccgccctcaaaatgacagccatggccggccgggtgcttctgggggctcgtcggggggacagctccactctgactggcacagtctttgcatggagacttgaggagggagggcttgaggttggtgaggttaggtgcgtgtttcctgtgcaagtcaggacatcagtctgattaaaggtggtgccaatttatttacatttaaacttgtcagggtataaaatgacatcccattaattatattgttaatcaatcacgtgtatagaaaaaaaataaaacttcaatacaggctgtccatggaaa

SEQ ID NO: 61970 - DNA, 2941 bp, Homo sapiens
gtcccaggccagctggaggggagcttcatgggtggtcagccccaggggttgggcctgagaccgtcaccaagaccccttccctccacaggacatgctgggcctgcgccccccactgctcgccctggtggggctgctctccctcgggtgcggtgagttctgtgttccacggaggggactccacgcgtgacattccaatcagggagaacagggcctgccctcactttcccatagacagaagttcccgggaggctggggaaggaccttgccactggggtcctctctcaggagtgcacgaagttcaaggtcagcagctgccgggaatgcatcgagtcggggcccggctgcacctggtgccagaagctgaacttcacagggccgggggatcctgactccattcgctgcgacacccggccacagctgctcatgaggggctgtgcggctgacgacatcatggaccccacaagcctcgctgaaacccaggaagaccacaatgggggccagaagcagctgtccccacaaaaagtgacgctttacctgcgaccaggccaggcagcagcgttcaacgtgaccttccggcgggccaagggctaccccatcgacctgtactatctgatggacctctcctactccatgcttgatgacctcaggaatgtcaagaagctaggtggcgacctgctccgggccctcaacgagatcaccgagtccggccgcattggcttcgggtccttcgtggacaagaccgtgctgccgttcgtgaacacgcaccctgataagctgcgaaacccatgccccaacaaggagaaagagtgccagcccccgtttgccttcaggcacgtgctgaagctgaccaacaactccaaccagtttcagaccgaggtcgggaagcagctgatttccggaaacctggatgcacccgagggtgggctggacgccatgatgcaggtcgccgcctgcccggaggaaatcggctggcgcaacgtcacgcggctgctggtgtttgccactgatgacggcttccatttcgcgggcgacgggaagctgggcgccatcctgacccccaacgacggccgctgtcacctggaggacaacttgtacaagaggagcaacgaattcgactacccatcggtgggccagctggcgcacaagctggctgaaaacaacatccagcccatcttcgcggtgaccagtaggatggtgaagacctacgagaaactcaccgagatcatccccaagtcagccgtgggggagctgtctgaggactccagcaatgtggtccatctcattaagaatgcttacaataaactctcctccagggtcttcctggatcacaacgccctccccgacaccctgaaagtcacctacgactccttctgcagcaatggagtgacgcacaggaaccagcccagaggtgactgtgatggcgtgcagatcaatgtcccgatcaccttccaggtgaaggtcacggccacagagtgcatccaggagcagtcgtttgtcatccgggcgctgggcttcacggacatagtgaccgtgcaggtccttccccagtgtgagtgccggtgccgggaccagagcagagaccgcagcctctgccatggcaagggcttcttggagtgcggcatctgcaggtgtgacactggctacattgggaaaaactgtgagtgccagacacagggccggagcagccaggagctggaaggaagctgccggaaggacaacaactccatcatctgctcagggctgggggactgtgtctgcgggcagtgcctgtgccacaccagcgacgtccccggcaagctgatatacgggcagtactgcgagtgtgacaccatcaactgtgagcgctacaacggccaggtctgcggcggcccggggagggggctctgcttctgcgggaagtgccgctgccacccgggctttgagggctcagcgtgccagtgcgagaggaccactgagggctgcctgaacccgcggcgtgttgagtgtagtggtcgtggccggtgccgctgcaacgtatgcgagtgccattcaggctaccagctgcctctgtgccaggagtgccccggctgcccctcaccctgtggcaagtacatctcctgcgccgagtgcctgaagttcgaaaagggcccctttgggaagaactgcagcgcggcgtgtccgggcctgcagctgtcgaacaaccccgtgaagggcaggacctgcaaggagagggactcagagggctgctgggtggcctacacgctggagcagcaggacgggatggaccgctacctcatctatgtggatgagagccgagagtgtgtggcaggccccaacatcgccgccatcgtcgggggcaccgtggcaggcatcgtgctgatcggcattctcctgctggtcatctggaaggctctgatccacctgagcgacctccgggagtacaggcgctttgagaaggagaagctcaagtcccagtggaacaatgataatccccttttcaagagcgccaccacgacggtcatgaaccccaagtttgctgagagttaggagcacttggtgaagacaaggccgtcaggacccaccatgtctgccccatcacgcggccgagacatggcttgccacagctcttgaggatgtcaccaattaaccagaaatccagttattttccgccctcaaaatgacagccatggccggccgggtgcttctgggggctcgtcggggggacagctccactctgactggcacagtctttgcatggagacttgaggagggagggcttgaggttggtgaggttaggtgcgtgtttcctgtgcaagtcaggacatcagtctgattaaaggtggtgccaatttatttacatttaaacttgtcagggtataaaatgacatcccattaattatattgttaatcaatcacgtgtatagaaaaaaaataaaacttcaatacaggctgtccatggaaa

SEQ ID NO: 61971 - DNA, 3259 bp, Homo sapiens
  misc_feature (2883)..(2883): n is a, c, g, or t
gaggagctgagaggaacaggaagtgtcaggactttacgacccgcgcctccagctgaggtttctagacgtgacccagggcagactggtagcaaagcccccacgcccagccaggagcaccgccgaggactccagcacaccgagggacatgctgggcctgcgccccccactgctcgccctggtggggctgctctccctcgggtgcgtcctctctcaggagtgcacgaagttcaaggtcagcagctgccgggaatgcatcgagtcggggcccggctgcacctggtgccagaagctgaacttcacagggccgggggatcctgactccattcgctgcgacacccggccacagctgctcatgaggggctgtgcggctgacgacatcatggaccccacaagcctcgctgaaacccaggaagaccacaatgggggccagaagcagctgtccccacaaaaagtgacgctttacctgcgaccaggccaggcagcagcgttcaacgtgaccttccggcgggccaagggctaccccatcgacctgtactatctgatggacctctcctactccatgcttgatgacctcaggaatgtcaagaagctaggtggcgacctgctccgggccctcaacgagatcaccgagtccggccgcattggcttcgggtccttcgtggacaagaccgtgctgccgttcgtgaacacgcaccctgataagctgcgaaacccatgccccaacaaggagaaagagtgccagcccccgtttgccttcaggcacgtgctgaagctgaccaacaactccaaccagtttcagaccgaggtcgggaagcagctgatttccggaaacctggatgcacccgagggtgggctggacgccatgatgcaggtcgccgcctgcccggaggaaatcggctggcgcaacgtcacgcggctgctggtgtttgccactgatgacggcttccatttcgcgggcgacgggaagctgggcgccatcctgacccccaacgacggccgctgtcacctggaggacaacttgtacaagaggagcaacgaattcgactacccatcggtgggccagctggcgcacaagctggctgaaaacaacatccagcccatcttcgcggtgaccagtaggatggtgaagacctacgagaaactcaccgagatcatccccaagtcagccgtgggggagctgtctgaggactccagcaatgtggtccatctcattaagaatgcttacaataaactctcctccagggtcttcctggatcacaacgccctccccgacaccctgaaagtcacctacgactccttctgcagcaatggagtgacgcacaggaaccagcccagaggtgactgtgatggcgtgcagatcaatgtcccgatcaccttccaggtgaaggtcacggccacagagtgcatccaggagcagtcgtttgtcatccgggcgctgggcttcacggacatagtgaccgtgcaggtccttccccagtgtgagtgccggtgccgggaccagagcagagaccgcagcctctgccatggcaagggcttcttggagtgcggcatctgcaggtgtgacactggctacattgggaaaaactgtgagtgccagacacagggccggagcagccaggagctggaaggaagctgccggaaggacaacaactccatcatctgctcagggctgggggactgtgtctgcgggcagtgcctgtgccacaccagcgacgtccccggcaagctgatatacgggcagtactgcgagtgtgacaccatcaactgtgagcgctacaacggccaggtctgcggcggcccggggagggggctctgcttctgcgggaagtgccgctgccacccgggctttgagggctcagcgtgccagtgcgagaggaccactgagggctgcctgaacccgcggcgtgttgagtgtagtggtcgtggccggtgccgctgcaacgtatgcgagtgccattcaggctaccagctgcctctgtgccaggagtgccccggctgcccctcaccctgtggcaagtacatctcctgcgccgagtgcctgaagttcgaaaagggcccctttgggaagaactgcagcgcggcgtgtccgggcctgcagctgtcgaacaaccccgtgaagggcaggacctgcaaggagagggactcagagggctgctgggtggcctacacgctggagcagcaggacgggatggaccgctacctcatctatgtggatgagagccgagagtgtgtggcaggccccaacatcgccgccatcgtcgggggcaccgtggcaggcatcgtgctgatcggcattctcctgctggtcatctggaaggctctgatccacctgagcgacctccgggagtacaggcgctttgagaaggagaagctcaagtcccagtggaacaatgataatccccttttcaagagcgccaccacgacggtcatgaaccccaagtttgctgagagttaggagcacttggtgaagacaaggccgtcaggacccaccatgtctgccccatcacgcggccgagacatggcttgccacagctcttgaggatgtcaccaattaaccagaaatccagttattttccgccctcaaaatgacagccatggccggccgggtgcttctgggggctcgtcggggggacagctccactctgactggcacagtctttgcatggagacttgaggagggagggcttgaggttggtgaggttaggtgcgtgtttcctgtgcaagtcaggacatcagtctgattaaaggtggtgccaatttatttacatttaaacttgtcagggtataaaatgacatcccattaattatattgttaatcaatcacgtgtatagaaaaaaaataaaacttcaatacaggctgtccatggaaaaaaaaaaaaaaanaaaaaaaaaaaaccttgttgcccgggaggagtgaaaagatcaatttgtttttttaaaggatcactctggctgctgtgttaagaacagtctttaacaagacaaagagggaaggactctggttaggaagctgtgatgataatccggattaaggcccagggcagttgcagttatggtggaaaaagtgtgtttttttttaatatacgaatggcccaccgattccatgggttctgcatttggagattccaacaatcacacaattgaaaatttttggaaaaaaactggatcttgttaaaccaggacaagatttttttgggctttattccctaagccaaaaccgggttaccaccttttttacctggcctttaaatccgctttt

SEQ ID NO: 61972 - DNA, 1695 bp, Homo sapiens
atctagaggatctattttgcggctgctttccctcattaagaattgcttacaataaactctcctccagggtcttcctggatcacaacgccctccccgacaccctgaaagtcacctacgactccttctgcagcaatggagtgacgcacaggaaccagcccagaggtgactgtgatggcgtgcagatcaatgtcccgatcaccttccaggtgaaggtcacggccacagagtgcatccaggagcagtcgtttgtcatccgggcgctgggcttcacggacatagtgaccgtgcaggtccttccccagtgtgagtgccggtgccgggaccagagcagagaccgcagcctctgccatggcaagggcttcttggagtgcggcatctgcaggtgtgacactggctacattgggaaaaactgtgagtgccagacacagggccggagcagccaggagctggaaggaagctgccggaaggacaacaactccatcatctgctcagggctgggggactgtgtctgcgggcagtgcctgtgccacaccagcgacgtccccggcaagctgatatacgggcagtactgcgagtgtgacaccatcaactgtgagcgctacaacggccaggtctgcggcggcccggggagggggctctgcttctgcgggaagtgccgctgccacccgggctttgagggctcagcgtgccagtgcgagaggaccactgagggctgcctgaacccgcggcgtgttgagtgtagtggtcgtggccggtgccgctgcaacgtatgcgagtgccattcaggctaccagctgcctctgtgccaggagtgccccggctgcccctcaccctgtggcaagtacatctcctgcgccgagtgcctgaagttcgaaaagggcccctttgggaagaactgcagcgcggcgtgtccgggcctgcagctgtcgaacaaccccgtgaagggcaggacctgcaaggagagggactcagagggctgctgggtggcctacacgctggagcagcaggacgggatggaccgctacctcatctatgtggatgagagccgagagtgtgtggcaggccccaacatcgccgccatcgtcgggggcaccgtggcaggcatcgtgctgatcggcattctcctgctggtcatctggaaggctctgatccacctgagcgacctccgggagtacaggcgctttgagaaggagaagctcaagtcccagtggaacaatgataatccccttttcaagagcgccaccacgacggtcatgaaccccaagtttgctgagagttaggagcacttggtgaagacaaggccgtcaggacccaccatgtctgccccatcacgcggccgagacatggcttgccacagctcttgaggatgtcaccaattaaccagaaatccagttattttccgccctcaaaatgacagccatggccggccgggtgcttctgggggctcgtcggggggacagctccactctgactggcacagtctttgcatggagacttgaggagggagggcttgaggttggtgaggttaggtgcgtgtttcctgtgcaagtcaggacatcagtctgattaaaggtggtgccaatttatttacatttaaacttgtcagggtataaaatgacatcccattaattatattgttaatcaatcacgtgtatagaaaaaaaataaaacttcaatacaggctgtccatggaaa

SEQ ID NO: 61973 - DNA, 1084 bp, Homo sapiens
gcggccgccgtgcccctgtgtccctcctccctcctgtgcgcacctgccgcgggccctgggatcaggcttccagttcacccgctgcacccgcatctgccccacttgggccccctccttggcctgagggcgccccaaccccacctgccccccctggtggacacacacccaagcccgagcccccgttgccggagcccccgcacaccctggcaccgatgctcacacctggctccccgcagctcctgcgccgagtgcctgaagttcgaaaagggcccctttgggaagaactgcagcgcggcgtgtccgggcctgcagctgtcgaacaaccccgtgaagggcaggacctgcaaggagagggactcagagggctgctgggtggcctacacgctggagcagcaggacgggatggaccgctacctcatctatgtggatgagagccgagagtgtgtggcaggccccaacatcgccgccatcgtcgggggcaccgtggcaggcatcgtgctgatcggcattctcctgctggtcatctggaaggctctgatccacctgagcgacctccgggagtacaggcgctttgagaaggagaagctcaagtcccagtggaacaatgataatccccttttcaagagcgccaccacgacggtcatgaaccccaagtttgctgagagttaggagcacttggtgaagacaaggccgtcaggacccaccatgtctgccccatcacgcggccgagacatggcttgccacagctcttgaggatgtcaccaattaaccagaaatccagttattttccgccctcaaaatgacagccatggccggccgggtgcttctgggggctcgtcggggggacagctccactctgactggcacagtctttgcatggagacttgaggagggagggcttgaggttggtgaggttaggtgcgtgtttcctgtgcaagtcaggacatcagtctgattaaaggtggtgccaatttatttacatttaaacttgtcagggtataaaatgacatcccattaattatattgttaatcaatcacgtgtatagaaaaaaaataaaacttcaatacaggctgtccatggaaa

SEQ ID NO: 61974 - DNA, 1092 bp, Homo sapiens
gaggagctgagaggaacaggaagtgtcaggactttacgacccgcgcctccagctgaggtttctagacgtgacccagggcagactggtagcaaagcccccacgcccagccaggagcaccgccgaggactccagcacaccgagggacatgctgggcctgcgccccccactgctcgccctggtggggctgctctccctcgggtgcgtcctctctcaggagtgcacgaagttcaaggtcagcagctgccgggaatgcatcgagtcggggcccggctgcacctggtgccagaagctgaacttcacagggccgggggatcctgactccattcgctgcgacacccggccacagctgctcatgaggggctgtgcggctgacgacatcatggaccccacaagcctcgctgaaacccaggaagaccacaatgggggccagaagcagctgtccccacaaaaagtgacgctttacctgcgaccaggccaggcagcagcgttcaacgtgaccttccggcgggccaagggctaccccatcgacctgtactatctgatggacctctcctactccatgcttgatgacctcaggaatgtcaagaagctaggtggcgacctgctccgggccctcaacgagatcaccgagtccggccgcattggcttcgggtccttcgtggacaagaccgtgctgccgttcgtgaacacgcaccctgataagctgcgaaacccatgccccaacaaggagaaagagtgccagcccccgtttgccttcaggcacgtgctgaagctgaccaacaactccaaccattttccgccctcaaaatgacagccatggccggccgggtgcttctgggggctcgtcggggggacagctccactctgactggcacagtctttgcatggagacttgaggagggagggcttgaggttggtgaggttaggtgcgtgtttcctgtgcaagtcaggacatcagtctgattaaaggtggtgccaatttatttacatttaaacttgtcagggtataaaatgacatcccattaattatattgttaatcaatcacgtgtatagaaaaaaaataaaacttcaatacaggctgtccatggaaa

SEQ ID NO: 61975 - DNA, 1138 bp, Homo sapiens
  misc_feature (762)..(762): n is a, c, g, or t
gaggagctgagaggaacaggaagtgtcaggactttacgacccgcgcctccagctgaggtttctagacgtgacccagggcagactggtagcaaagcccccacgcccagccaggagcaccgccgaggactccagcacaccgagggacatgctgggcctgcgccccccactgctcgccctggtggggctgctctccctcgggtgcgtcctctctcaggagtgcacgaagttcaaggtcagcagctgccgggaatgcatcgagtcggggcccggctgcacctggtgccagaagctgaacttcacagggccgggggatcctgactccattcgctgcgacacccggccacagctgctcatgaggggctgtgcggctgacgacatcatggaccccacaagcctcgctgaaacccaggaagaccacaatgggggccagaagcagctgtccccacaaaaagtgacgctttacctgcgaccaggccaggcagcagcgttcaacgtgaccttccggcgggccaagggctaccccatcgacctgtactatctgatggacacttgaggagggagggcttgaggttggtgaggttaggtgcgtgtttcctgtgcaagtcaggacatcagtctgattaaaggtggtgccaatttatttacatttaaacttgtcagggtataaaatgacatcccattaattatattgttaatcaatcacgtgtatagaaaaaaaataaaacttcaatacaggctgtccatggaaaaaaaaaaaaaaanaaaaaaaaaaaaccttgttgcccgggaggagtgaaaagatcaatttgtttttttaaaggatcactctggctgctgtgttaagaacagtctttaacaagacaaagagggaaggactctggttaggaagctgtgatgataatccggattaaggcccagggcagttgcagttatggtggaaaaagtgtgtttttttttaatatacgaatggcccaccgattccatgggttctgcatttggagattccaacaatcacacaattgaaaatttttggaaaaaaactggatcttgttaaaccaggacaagatttttttgggctttattccctaagccaaaaccgggttaccaccttttttacctggcctttaaatccgctttt

SEQ ID NO: 61976 - DNA, 562 bp, Homo sapiens
gtcccaggccagctggaggggagcttcatgggtggtcagccccaggggttgggcctgagaccgtcaccaagaccccttccctccacaggacatgctgggcctgcgccccccactgctcgccctggtggggctgctctccctcgggtgcggtgagttctgtgttccacggaggggactccacgcgtgacattccaatcagggagaacagggcctgccctcactttcccatagacagaagttcccgggaggctggggaaggaccttgccactggggtcctctctcaggagtgcacgaagttcaaggtcagcagctgccgggaatgcatcgagtcggggcccggctgcacctggtgccagaagctgggagcggctttgggtcctccagcccacgccaccgcggcgagcagtccccggaggagaagccgggtggctcccgtctgtcctcggactgagcagggtggccaggccccaggtggaaactaccttggtcaggctgggttttttccctcccctttctggaggttttcagctcctctgaaataaacacctttcagtgagaaaa

SEQ ID NO: 61977 - DNA, 2198 bp, Homo sapiens
ctcggtcttccagtttcccggcgtgcttagggcgcgccaaatgggagggggagacgcaagatggcggcagccgcgaactccggctctagcctcccgctgttcgactgcccaacctgggcaggtaagccccctcccggtttacatctggatgtagtcaaaggagacaaactaattgagaaactgattattgatgagaagaagtattacttatttgggagaaaccctgatttgtgtgactttaccattgaccaccagtcttgctctcgggtccatgctgcacttgtctaccacaagcatctgaagagagttttcctgatagatctcaacagtacacacggcactttcttgggtcacattcggttggaacctcacaagcctcagcaaattcccatcgattccacggtctcatttggcgcatccacaagggcatacactctgcgcgagaagcctcagacattgccatcggctgtgaaaggagatgagaagatgggtggagaggatgatgaactcaagggcttactggggcttccagaggaggaaactgagcttgataacctgacagagttcaacactgcccacaacaagcggatttctacccttaccattgaggagggaaatctggacattcaaagaccaaagaggaagaggaagaactcacgggtgacattcagtgaggatgatgagatcatcaacccagaggatgtggatccctcagttggtcgattcaggaacatggtgcaaactgcagtggtcccagtcaagaagaagcgtgtggagggccctggctccctgggcctggaggaatcagggagcaggcgcatgcagaactttgccttcagcggaggactctacgggggcctgccccccacacacagtgaagcaggctcccagccacatggcatccatgggacagcactcatcggtggcttgcccatgccatacccaaaccttgcccctgatgtggacttgactcctgttgtgccgtcagcagtgaacatgaaccctgcaccaaaccctgcagtctataaccctgaagctgtaaatgaacccaagaagaagaaatatgcaaaagaggcttggccaggcaagaagcccacaccttccttgctgatttgatatttttggtcatggagaagggtgggattgggtgggaatggggtggaagggtgatggggagctaatgaactagggagaaaaactttccatgtgtgcggtatcgtctttcagaatgtctcctggcatcctaaccatgtaatatgacaattgggggtggggttgaaatagcccataaagacctgtcttcacaacacttgcattgtagagaaaggcttcttatatccttttcaatagactgccctggctctttcctaggccttccactacctcctttctttctcccactttctaggatcatttttatgtaaagtcacatatcccaggccctcaggttgaatccagagctgtagaggttacagtagcatcaccagccttgggggtccagagcctaatttatattcactatccttccaagtcccgggtagcagaagggttgccatagatctcagtttgatcaaaaagaaggcttagaattctgcagttaagctgaggtttaaactaaaaaatgtttccttgggtcagtggttttgaggtccagtagctaggcttttctcttttgtccttcctgttggaatgaaaacatttcgattttccttcatctgtgactggtgccatagacacaggtttatagttttaacttacagtattgtttgaaatttacctgtttttcttgtcaaacctgagcactcctcctgctgaagtttcttatttaattccagagtactgtcctctactctaaggcattacttttaagtgtattatgaaggcagttttcaaaggatatgaccagttggggtaattcaaattaaaaaggaaaagatttgtttggaagtaactggtgtctctaagaggaatttttagatgtcagtttggaggctctttcccccctcaattgagagctcttgttattcagagctccaagactagacctggctaacaaacataggagacaaagttaggaaacattgatacaagctttgtacagagatttgtacatttgtgtaataggccttttcatgctttatgtgtagctttttacctgtaacctttattacattgtaaattaaacgtaacttttgtca

SEQ ID NO: 61978 - DNA, 1359 bp, Homo sapiens
tctcatttaacttttttaataggtctcaaaattctgtgacaaatttttggtcaagttgtttccattaaaaagtactgattttaaaaactaataacttaaaactgccacacgcaaaaaagaaaaccaaagtggtccacaaaacattctcctttccttctgaaggttttacgatgcattgttatcattaaccagtcttttactactaaacttaaatggccaattgaaacaaacagttctgagaccgttcttccaccactgattaagagtggggtggcaggtattagggataatattcatttagccttctgagctttctgggcagacttggtgaccttgccagctccagcagccttcttgtccactgctttgatgacacccaccgcaactgtctgtctcctggcatcctaaccatgtaatatgacaattgggggtggggttgaaatagcccataaagacctgtcttcacaacacttgcattgtagagaaaggcttcttatatccttttcaatagactgccctggctctttcctaggccttccactacctcctttctttctcccactttctaggatcatttttatgtaaagtcacatatcccaggccctcaggttgaatccagagctgtagaggttacagtagcatcaccagccttgggggtccagagcctaatttatattcactatccttccaagtcccgggtagcagaagggttgccatagatctcagtttgatcaaaaagaaggcttagaattctgcagttaagctgaggtttaaactaaaaaatgtttccttgggtcagtggttttgaggtccagtagctaggcttttctcttttgtccttcctgttggaatgaaaacatttcgattttccttcatctgtgactggtgccatagacacaggtttatagttttaacttacagtattgtttgaaatttacctgtttttcttgtcaaacctgagcactcctcctgctgaagtttcttatttaattccagagtactgtcctctactctaaggcattacttttaagtgtattatgaaggcagttttcaaaggatatgaccagttggggtaattcaaattaaaaaggaaaagatttgtttggaagtaactggtgtctctaagaggaatttttagatgtcagtttggaggctctttcccccctcaattgagagctcttgttattcagagctccaagactagacctggctaacaaacataggagacaaagttaggaaacattgatacaagctttgtacagagatttgtacatttgtgtaataggccttttcatgctttatgtgtagctttttacctgtaacctttattacattgtaaattaaacgtaacttttgtca

SEQ ID NO: 61979 - DNA, 2069 bp, Homo sapiens
atacggctaggtacgaggctgggtgtcgcaaggagacaactaattgagaaactgattattgatgagaagaagtattacttatttgggagaaaccctgatttgtgtgactttaccattgaccaccagtcttgctctcgggtccatgctgcacttgtctaccacaagcatctgaagagagttttcctgatagatctcaacagtacacacggcactttcttgggtcacattcggttggaacctcacaagcctcagcaaattcccatcgattccacggtctcatttggcgcatccacaagggcatacactctgcgcgagaagcctcagacattgccatcggctgtgaaaggagatgagaagatgggtggagaggatgatgaactcaagggcttactggggcttccagaggaggaaactgagcttgataacctgacagagttcaacactgcccacaacaagcggatttctacccttaccattgaggagggaaatctggacattcaaagaccaaagaggaagaggaagaactcacgggtgacattcagtgaggatgatgagatcatcaacccagaggatgtggatccctcagttggtcgattcaggaacatggtgcaaactgcagtggtcccagtcaagaagaagcgtgtggagggccctggctccctgggcctggaggaatcagggagcaggcgcatgcagaactttgccttcagcggaggactctacgggggcctgccccccacacacagtgaagcaggctcccagccacatggcatccatgggacagcactcatcggtggcttgcccatgccatacccaaaccttgcccctgatgtggacttgactcctgttgtgccgtcagcagtgaacatgaaccctgcaccaaaccctgcagtctataaccctgaagctgtaaatgaacccaagaagaagaaatatgcaaaagaggcttggccaggcaagaagcccacaccttccttgctgatttgatatttttggtcatggagaagggtgggattgggtgggaatggggtggaagggtgatggggagctaatgaactagggagaaaaactttccatgtgtgcggtatcgtctttcagaatgtctcctggcatcctaaccatgtaatatgacaattgggggtggggttgaaatagcccataaagacctgtcttcacaacacttgcattgtagagaaaggcttcttatatccttttcaatagactgccctggctctttcctaggccttccactacctcctttctttctcccactttctaggatcatttttatgtaaagtcacatatcccaggccctcaggttgaatccagagctgtagaggttacagtagcatcaccagccttgggggtccagagcctaatttatattcactatccttccaagtcccgggtagcagaagggttgccatagatctcagtttgatcaaaaagaaggcttagaattctgcagttaagctgaggtttaaactaaaaaatgtttccttgggtcagtggttttgaggtccagtagctaggcttttctcttttgtccttcctgttggaatgaaaacatttcgattttccttcatctgtgactggtgccatagacacaggtttatagttttaacttacagtattgtttgaaatttacctgtttttcttgtcaaacctgagcactcctcctgctgaagtttcttatttaattccagagtactgtcctctactctaaggcattacttttaagtgtattatgaaggcagttttcaaaggatatgaccagttggggtaattcaaattaaaaaggaaaagatttgtttggaagtaactggtgtctctaagaggaatttttagatgtcagtttggaggctctttcccccctcaattgagagctcttgttattcagagctccaagactagacctggctaacaaacataggagacaaagttaggaaacattgatacaagctttgtacagagatttgtacatttgtgtaataggccttttcatgctttatgtgtagctttttacctgtaacctttattacattgtaaattaaacgtaacttttgtca

SEQ ID NO: 61980 - DNA, 1518 bp, Homo sapiens
  misc_feature (38)..(38): n is a, c, g, or t
atcttatcaatagtatttaatgttttgaagaaatagancagtgtacaaagggatagggaattcatttctgttaatgtatttattagttcttactaggagaagaaatgtaactattctcttcaaaaccgttaaaaatcaagcactgaggcagccacaccatcgtttgctccctatgttccgatatccttaagatgagctcaaagaaaaattaaatcttgattcagggtaaaagtttctgctaattggcttgcccatgccatacccaaaccttgcccctgatgtggacttgactcctgttgtgccgtcagcagtgaacatgaaccctgcaccaaaccctgcagtctataaccctgaagctgtaaatgaacccaagaagaagaaatatgcaaaagaggcttggccaggcaagaagcccacaccttccttgctgatttgatatttttggtcatggagaagggtgggattgggtgggaatggggtggaagggtgatggggagctaatgaactagggagaaaaactttccatgtgtgcggtatcgtctttcagaatgtctcctggcatcctaaccatgtaatatgacaattgggggtggggttgaaatagcccataaagacctgtcttcacaacacttgcattgtagagaaaggcttcttatatccttttcaatagactgccctggctctttcctaggccttccactacctcctttctttctcccactttctaggatcatttttatgtaaagtcacatatcccaggccctcaggttgaatccagagctgtagaggttacagtagcatcaccagccttgggggtccagagcctaatttatattcactatccttccaagtcccgggtagcagaagggttgccatagatctcagtttgatcaaaaagaaggcttagaattctgcagttaagctgaggtttaaactaaaaaatgtttccttgggtcagtggttttgaggtccagtagctaggcttttctcttttgtccttcctgttggaatgaaaacatttcgattttccttcatctgtgactggtgccatagacacaggtttatagttttaacttacagtattgtttgaaatttacctgtttttcttgtcaaacctgagcactcctcctgctgaagtttcttatttaattccagagtactgtcctctactctaaggcattacttttaagtgtattatgaaggcagttttcaaaggatatgaccagttggggtaattcaaattaaaaaggaaaagatttgtttggaagtaactggtgtctctaagaggaatttttagatgtcagtttggaggctctttcccccctcaattgagagctcttgttattcagagctccaagactagacctggctaacaaacataggagacaaagttaggaaacattgatacaagctttgtacagagatttgtacatttgtgtaataggccttttcatgctttatgtgtagctttttacctgtaacctttattacattgtaaattaaacgtaacttttgtca

SEQ ID NO: 61981 - DNA, 2350 bp, Homo sapiens
ctcggtcttccagtttcccggcgtgcttagggcgcgccaaatgggagggggagacgcaagatggcggcagccgcgaactccggctctagcctcccgctgttcgactgcccaacctgggcaggtaagccccctcccggtttacatctggatgtagtcaaaggagacaaactaattgagaaactgattattgatgagaagaagtattacttatttgggagaaaccctgatttgtgtgactttaccattgaccaccagtcttgctctcgggtccatgctgcacttgtctaccacaagcatctgaagagagttttcctgatagatctcaacagtacacacggcactttcttgggtcacattcggttggaacctcacaagcctcagcaaattcccatcgattccacggtctcatttggcgcatccacaagggcatacactctgcgcgagaagcctcagacattgccatcggctgtgaaaggagatgagaagatgggtggagaggatgatgaactcaagggcttactggggcttccagaggaggaaactgagcttgataacctgacagagttcaacactgcccacaacaagcggatttctacccttaccattgaggagggaaatctggacattcaaagaccaaagaggaagaggaagaactcacgggtgacattcagtgaggatgatgagatcatcaacccagaggatgtggatccctcagttggtcgattcaggaacatggtgcaaactgcagtggtcccagtcaagaagaagcgtgtggagggccctggctccctgggcctggaggaatcagggagcaggcgcatgcagaactttgccttcagcggaggactctacgggggcctgccccccacacacagtgaagcaggctcccagccacatggcatccatgggacagcactcatcggtggcttgcccatgccatacccaaaccttgcccctgatgtggacttgactcctgttgtgccgtcagcagtgaacatgaaccctgcaccaaaccctgcagtctataaccctgaagctgtaaatgaacccaagaagaagaaatatgcaaaagaggcttggccaggcaagaagcccacaccttccttgctgatttgatatttttggtcatggagaagggtgggattgggtgggaatggggtggaagggtgatggggagctaatgaactagggagaaaaactttccatgtgtgcggtatcgtctttcagaatgtctcctggcatcctaaccatgtaatatgacaattgggggtggggttgaaatagcccataaagacctgtcttcacaacacttgcattgtagagaaaggcttcttatatccttttcaatagactgccctggctctttcctaggccttccactacctcctttctttctcccactttctaggatcatttttatgtaaagtcacatatcccaggccctcaggttgaatccagagctgtagaggttacagtagcatcaccagccttgggggtccagagcctaatttatattcactatccttccaagtcccgggtagcagaagggttgccatagatctcagtttgatcaaaaagaaggcttagaattctgcagttaagctgaggtttaaactaaaaaatgtttccttgggtcagtggttttgaggtccagtagctaggcttttctcttttgtccttcctgttggaatgaaaacatttcgattttccttcatctgtgactggtgccatagacacaggtttatagttttaacttacagtattgtttgaaatttacctgtttttcttgtcaaacctgagcactcctcctgctgaagtttcttatttaattccagagtactgtcctctactctaaggcattacttttaagtgtattatgaaggcagttttcaaaggatatgaccagttggggtaattcaaattaaaaaggaaaagatttgtttggaagtaactggtgtctctaagaggaatttttagatgtcagtttggaggctctttcccccctcaattgagagctcttgttattcagagctccaagactagacctggctaacaaacataggagacaaagttaggaaacattgatacaagctttgtacagagatttgtacatttgtgtaataggccttttcatgctttatgtgtagctttttacctgtaacctttattacattgtaaattaaacgtaacttttgtcatttgggtgcaggctgtgaatttgtctctcagtcactgattgccactgccatctggaaatgtttgctaaaggcacagtcactgggcttgggaggcaatgctccatccccattatattacaaataaagatgccctaaatgagtgtggaaattct

SEQ ID NO: 61982 - DNA, 2705 bp, Homo sapiens
ctcggtcttccagtttcccggcgtgcttagggcgcgccaaatgggagggggagacgcaagatggcggcagccgcgaactccggctctagcctcccgctgttcgactgcccaacctggtgagtggcggggcggccagggctagagtggcccggccggagctagcctgggctggaagggcggctctttttttacttttctgctgcgagccgaacggctcagaaaccccggaatggttgaggaaaaactgtttgctgcaccgggccgggcgacgtgttgaagaaccgagagcctggagcccaggcccaggaactgaagaaacccggggttgggggctcaaaggcgctcacttaggcagcccctttgagcgattagccagtcgccggagcgcttcgaggccttggcccgaacttacgcccaactcttgactgagtgcctggtgctctcgtggagcatcgcatctggccccttcctggcaggtaagccccctcccggtttacatctggatgtagtcaaaggagacaaactaattgagaaactgattattgatgagaagaagtattacttatttgggagaaaccctgatttgtgtgactttaccattgaccaccagtcttgctctcgggtccatgctgcacttgtctaccacaagcatctgaagagagttttcctgatagatctcaacagtacacacggcactttcttgggtcacattcggttggaacctcacaagcctcagcaaattcccatcgattccacggtctcatttggcgcatccacaagggcatacactctgcgcgagaagcctcagacattgccatcggctgtgaaaggagatgagaagatgggtggagaggatgatgaactcaagggcttactggggcttccagaggaggaaactgagcttgataacctgacagagttcaacactgcccacaacaagcggatttctacccttaccattgaggagggaaatctggacattcaaagaccaaagaggaagaggaagaactcacgggtgacattcagtgaggatgatgagatcatcaacccagaggatgtggatccctcagttggtcgattcaggaacatggtgcaaactgcagtggtcccagtcaagaagaagcgtgtggagggccctggctccctgggcctggaggaatcagggagcaggcgcatgcagaactttgccttcagcggaggactctacgggggcctgccccccacacacagtgaagcaggctcccagccacatggcatccatgggacagcactcatcggtggcttgcccatgccatacccaaaccttgcccctgatgtggacttgactcctgttgtgccgtcagcagtgaacatgaaccctgcaccaaaccctgcagtctataaccctgaagctgtaaatgaacccaagaagaagaaatatgcaaaagaggcttggccaggcaagaagcccacaccttccttgctgatttgatatttttggtcatggagaagggtgggattgggtgggaatggggtggaagggtgatggggagctaatgaactagggagaaaaactttccatgtgtgcggtatcgtctttcagaatgtctcctggcatcctaaccatgtaatatgacaattgggggtggggttgaaatagcccataaagacctgtcttcacaacacttgcattgtagagaaaggcttcttatatccttttcaatagactgccctggctctttcctaggccttccactacctcctttctttctcccactttctaggatcatttttatgtaaagtcacatatcccaggccctcaggttgaatccagagctgtagaggttacagtagcatcaccagccttgggggtccagagcctaatttatattcactatccttccaagtcccgggtagcagaagggttgccatagatctcagtttgatcaaaaagaaggcttagaattctgcagttaagctgaggtttaaactaaaaaatgtttccttgggtcagtggttttgaggtccagtagctaggcttttctcttttgtccttcctgttggaatgaaaacatttcgattttccttcatctgtgactggtgccatagacacaggtttatagttttaacttacagtattgtttgaaatttacctgtttttcttgtcaaacctgagcactcctcctgctgaagtttcttatttaattccagagtactgtcctctactctaaggcattacttttaagtgtattatgaaggcagttttcaaaggatatgaccagttggggtaattcaaattaaaaaggaaaagatttgtttggaagtaactggtgtctctaagaggaatttttagatgtcagtttggaggctctttcccccctcaattgagagctcttgttattcagagctccaagactagacctggctaacaaacataggagacaaagttaggaaacattgatacaagctttgtacagagatttgtacatttgtgtaataggccttttcatgctttatgtgtagctttttacctgtaacctttattacattgtaaattaaacgtaacttttgtcatttgggtgcaggctgtgaatttgtctctcagtcactgattgccactgccatctggaaatgtttgctaaaggcacagtcactgggcttgggaggcaatgctccatccccattatattacaaataaagatgccctaaatgagtgtggaaattct

SEQ ID NO: 61983 - DNA, 1233 bp, Homo sapiens
ctcggtcttccagtttcccggcgtgcttagggcgcgccaaatgggagggggagacgcaagatggcggcagccgcgaactccggctctagcctcccgctgttcgactgcccaacctgggcaggtaagccccctcccggtttacatctggatgtagtcaaaggagacaaactaattgagaaactgattattgatgagaagaagtattacttatttgggagaaaccctgatttgtgtgactttaccattgaccaccagtcttgctctcgggtccatgctgcacttgtctaccacaagcatctgaagagagttttcctgatagatctcaacagtacacacggcactttcttgggtcacattcggttggaacctcacaagcctcagcaaattcccatcgattccacggtctcatttggcgcatccacaagggcatacactctgcgcgagaagcctcagacattgccatcggctgtgaaaggagatgagaagatgggtggagaggatgatgaactcaagggcttactggggcttccagaggaggaaactgagcttgataacctgacagagttcaacactgcccacaacaagcggatttctacccttaccattgaggagggaaatctggacattcaaagaccaaagaggaagaggaagaactcacgggtgacattcagtgaggatgatgagatcatcaacccagaggatgtggatccctcagttggtcgattcaggaacatggtgcaaactgcagtggtcccagtcaagaagaagcgtgtggagggccctggctccctgggcctggaggaatcagggagcaggcgcatgcagaactttgccttcagcggaggactctacgggggcctgccccccacacacagtgaagcaggctcccagccacatggcatccatgggacagcactcatcggtggcttgcccatgccatacccaaaccttgcccctgatgtggacttgactcctgttgtgccgtcagcagtgaacatgaaccctgcaccaaaccctgcagtctataaccctgaagctgtaaatgaacccaagaagaagaaatatgcaaaagaggcttggctttgggtgcaggctgtgaatttgtctctcagtcactgattgccactgccatctggaaatgtttgctaaaggcacagtcactgggcttgggaggcaatgctccatccccattatattacaaataaagatgccctaaatgagtgtggaaattct

SEQ ID NO: 61984 - DNA, 162 bp, Homo sapiens
ctcgggtccatgctgcacttgtctaccacaagcatctgaagagagttttcctgatagatctcaacagtagtaagtaactccctcccaattcacatgttacctttaggcaatatgaaaatactctttgggttctttagtttggaaattacgttttatggaaaa

SEQ ID NO: 61985 - DNA, 2452 bp, Homo sapiens
ctcggtcttccagtttcccggcgtgcttagggcgcgccaaatgggagggggagacgcaagatggcggcagccgcgaactccggctctagcctcccgctgttcgactgcccaacctggtgagtggcggggcggccagggctagagtggcccggccggagctagcctgggctggaagggcggctctttttttacttttctgctgcgagccgaacggctcagaaaccccggaatggttgaggaaaaactgtttgctgcaccgggccgggcgacgtgttgaagaaccgagagcctggagcccaggcccaggaactgaagaaacccggggttgggggctcaaaggcgctcacttaggcagcccctttgagcgattagccagtcgccggagcgcttcgaggccttggcccgaacttacgcccaactcttgactgagtgcctggtgctctcgtggagcatcgcatctggccccttcctgtacgtcccgagcgcgctcgagccagccccggccccaaccctacctccaagccccgcatccctctgtggttgctgcatccctcgtgcggcacttgtctgtctgccacagagaatacgaggggcaggtaagccccctcccggtttacatctggatgtagtcaaaggagacaaactaattgagaaactgattattgatgagaagaagtattacttatttgggagaaaccctgatttgtgtgactttaccattgaccaccagtcttgctctcgggtccatgctgcacttgtctaccacaagcatctgaagagagttttcctgatagatctcaacagtaaacctgacagagttcaacactgcccacaacaagcggatttctacccttaccattgaggagggaaatctggacattcaaagaccaaagaggaagaggaagaactcacgggtgacattcagtgaggatgatgagatcatcaacccagaggatgtggatccctcagttggtcgattcaggaacatggtgcaaactgcagtggtcccagtcaagaagaagcgtgtggagggccctggctccctgggcctggaggaatcagggagcaggcgcatgcagaactttgccttcagcggaggactctacgggggcctgccccccacacacagtgaagcaggctcccagccacatggcatccatgggacagcactcatcggtggcttgcccatgccatacccaaaccttgcccctgatgtggacttgactcctgttgtgccgtcagcagtgaacatgaaccctgcaccaaaccctgcagtctataaccctgaagctgtaaatgaacccaagaagaagaaatatgcaaaagaggcttggccaggcaagaagcccacaccttccttgctgatttgatatttttggtcatggagaagggtgggattgggtgggaatggggtggaagggtgatggggagctaatgaactagggagaaaaactttccatgtgtgcggtatcgtctttcagaatgtctcctggcatcctaaccatgtaatatgacaattgggggtggggttgaaatagcccataaagacctgtcttcacaacacttgcattgtagagaaaggcttcttatatccttttcaatagactgccctggctctttcctaggccttccactacctcctttctttctcccactttctaggatcatttttatgtaaagtcacatatcccaggccctcaggttgaatccagagctgtagaggttacagtagcatcaccagccttgggggtccagagcctaatttatattcactatccttccaagtcccgggtagcagaagggttgccatagatctcagtttgatcaaaaagaaggcttagaattctgcagttaagctgaggtttaaactaaaaaatgtttccttgggtcagtggttttgaggtccagtagctaggcttttctcttttgtccttcctgttggaatgaaaacatttcgattttccttcatctgtgactggtgccatagacacaggtttatagttttaacttacagtattgtttgaaatttacctgtttttcttgtcaaacctgagcactcctcctgctgaagtttcttatttaattccagagtactgtcctctactctaaggcattacttttaagtgtattatgaaggcagttttcaaaggatatgaccagttggggtaattcaaattaaaaaggaaaagatttgtttggaagtaactggtgtctctaagaggaatttttagatgtcagtttggaggctctttcccccctcaattgagagctcttgttattcagagctccaagactagacctggctaacaaacataggagacaaagttaggaaacattgatacaagctttgtacagagatttgtacatttgtgtaataggccttttcatgctttatgtgtagctttttacctgtaacctttattacattgtaaattaaacgtaacttttgtca

SEQ ID NO: 61986 - DNA, 2553 bp, Homo sapiens
ctcggtcttccagtttcccggcgtgcttagggcgcgccaaatgggagggggagacgcaagatggcggcagccgcgaactccggctctagcctcccgctgttcgactgcccaacctggtgagtggcggggcggccagggctagagtggcccggccggagctagcctgggctggaagggcggctctttttttacttttctgctgcgagccgaacggctcagaaaccccggaatggttgaggaaaaactgtttgctgcaccgggccgggcgacgtgttgaagaaccgagagcctggagcccaggcccaggaactgaagaaacccggggttgggggctcaaaggcgctcacttaggcagcccctttgagcgattagccagtcgccggagcgcttcgaggccttggcccgaacttacgcccaactcttgactgagtgcctggtgctctcgtggagcatcgcatctggccccttcctggcaggtaagccccctcccggtttacatctggatgtagtcaaaggagacaaactaattgagaaactgattattgatgagaagaagtattacttatttgggagaaaccctgatttgtgtgactttaccattgaccaccagtcttgctctcgggtccatgctgcacttgtctaccacaagcatctgaagagagttttcctgatagatctcaacagtacacacggcactttcttgggtcacattcggttggaacctcacaagcctcagcaaattcccatcgattccacggtctcatttggcgcatccacaagggcatacactctgcgcgagaagcctcagacattgccatcggctgtgaaaggagatgagaagatgggtggagaggatgatgaactcaagggcttactggggcttccagaggaggaaactgagcttgataacctgacagagttcaacactgcccacaacaagcggatttctacccttaccattgaggagggaaatctggacattcaaagaccaaagaggaagaggaagaactcacgggtgacattcagtgaggatgatgagatcatcaacccagaggatgtggatccctcagttggtcgattcaggaacatggtgcaaactgcagtggtcccagtcaagaagaagcgtgtggagggccctggctccctgggcctggaggaatcagggagcaggcgcatgcagaactttgccttcagcggaggactctacgggggcctgccccccacacacagtgaagcaggctcccagccacatggcatccatgggacagcactcatcggtggcttgcccatgccatacccaaaccttgcccctgatgtggacttgactcctgttgtgccgtcagcagtgaacatgaaccctgcaccaaaccctgcagtctataaccctgaagctgtaaatgaacccaagaagaagaaatatgcaaaagaggcttggccaggcaagaagcccacaccttccttgctgatttgatatttttggtcatggagaagggtgggattgggtgggaatggggtggaagggtgatggggagctaatgaactagggagaaaaactttccatgtgtgcggtatcgtctttcagaatgtctcctggcatcctaaccatgtaatatgacaattgggggtggggttgaaatagcccataaagacctgtcttcacaacacttgcattgtagagaaaggcttcttatatccttttcaatagactgccctggctctttcctaggccttccactacctcctttctttctcccactttctaggatcatttttatgtaaagtcacatatcccaggccctcaggttgaatccagagctgtagaggttacagtagcatcaccagccttgggggtccagagcctaatttatattcactatccttccaagtcccgggtagcagaagggttgccatagatctcagtttgatcaaaaagaaggcttagaattctgcagttaagctgaggtttaaactaaaaaatgtttccttgggtcagtggttttgaggtccagtagctaggcttttctcttttgtccttcctgttggaatgaaaacatttcgattttccttcatctgtgactggtgccatagacacaggtttatagttttaacttacagtattgtttgaaatttacctgtttttcttgtcaaacctgagcactcctcctgctgaagtttcttatttaattccagagtactgtcctctactctaaggcattacttttaagtgtattatgaaggcagttttcaaaggatatgaccagttggggtaattcaaattaaaaaggaaaagatttgtttggaagtaactggtgtctctaagaggaatttttagatgtcagtttggaggctctttcccccctcaattgagagctcttgttattcagagctccaagactagacctggctaacaaacataggagacaaagttaggaaacattgatacaagctttgtacagagatttgtacatttgtgtaataggccttttcatgctttatgtgtagctttttacctgtaacctttattacattgtaaattaaacgtaacttttgtca

SEQ ID NO: 61987 - DNA, 2384 bp, Homo sapiens
ctcggtcttccagtttcccggcgtgcttagggcgcgccaaatgggagggggagacgcaagatggcggcagccgcgaactccggctctagcctcccgctgttcgactgcccaacctgggcaggtaagccccctcccggtttacatctggatgtagtcaaaggagacaaactaattgagaaactgattattgatgagaagaagtattacttatttgggagaaaccctgatttgtgtgactttaccattgaccaccagtcttgctctcgggtccatgctgcacttgtctaccacaagcatctgaagagagttttcctgatagatctcaacagtacacacggcactttcttgggtcacattcggttggaacctcacaagcctcagcaaattcccatcgattccacggtctcatttggcgcatccacaagggcatacactctgcgcgagaagcctcagacattgccatcggctgtgaaaggagatgagaagatgggtggagaggatgatgaactcaagggcttactggggcttccagaggaggaaactgagcttgataacctgacagagttcaacactgcccacaacaagcggatttctacccttaccattgaggagggaaatctggacattcaaagaccaaagaggaagaggaagaactcacgggtgacattcagtgaggatgatgagatcatcaacccagaggatgtggatccctcagttggtcgattcaggaacatggtgcaaactgcagtggtcccagtcaagaagaagcgtgtggagggccctggctccctgggcctggaggaatcagggagcaggcgcatgcagaactttgccttcagcggaggactctacgggggcctgccccccacacacagtgaagcaggctcccagccacatggcatccatgggacagcactcatcggtggcttgcccatgccatacccaaaccttgcccctgatgtggacttgactcctgttgtgccgtcagcagtgaacatgaaccctgcaccaaaccctgcagtctataaccctgaagctgtaaatgaacccaagaagaagaaatatgcaaaagaggcttggccaggcaagaagcccacaccttccttgctgatttgatatttttggtcatggagaagggtgggattgggtgggaatggggtggaagggtgatggggagctaatgaactagggagaaaaactttccatgtgtgcggtatcgtctttcagaatgtctcctggcatcctaaccatgtaatatgacaattgggggtggggttgaaatagcccataaagacctgtcttcacaacacttgcattgtagagaaaggcttcttatatccttttcaatagactgccctggctctttcctaggccttccactacctcctttctttctcccactttctaggatcatttttatgtaaagtcacatatcccaggccctcaggttgaatccagagctgtagaggttacagtagcatcaccagccttgggggtccagagcctaatttatattcactatccttccaagtcccgggtagcagaagggttgccatagatctcagtttgatcaaaaagaaggcttagaattctgcagttaagctgaggtttaaactaaaaaatgtttccttgggtcagtggttttgaggtccagtagctaggcttttctcttttgtccttcctgttggaatgaaaacatttcgattttccttcatctgtgactggtgccatagacacaggtttatagttttaacttacagtattgtttgaaatttacctgtttttcttgtcaaacctgagcactcctcctgctgaagtttcttatttaattccagagtactgtcctctactctaaggcattacttttaagtgtattatgaaggcagttttcaaaggatatgaccagttggggtaattcaaattaaaaaggaaaagatttgtttggaagtaactggtgtctctaagaggaatttttagatgtcagtttggaggctctttcccccctcaattgagagctcttgttattcagagctccaagactagacctggctaacaaacataggagacaaagttaggaaacattgatacaagctttgtacagagatttgtacatttgtgtaataggccttttcatgctttatgtgtagctttttacctgtaacctttattacattgtaaattaaacgtaacttttgtcaaaaaaaaaaaacacacaagcacccacgcaccacaacaacacaacaccaaaccaaacaaaacaaaacacggggggcgcccataaaaaacatccccgggggacccacaatgacgcgccaccttcttgcgcaaagggggccccaaaagggggggatacacaagaggaggcggcgccaaacacagcgcga

SEQ ID NO: 61988 - DNA, 281 bp, Homo sapiens
gcaatatttactgtaaactcatggaggggcttgttgagacagattcttagtgttgtgttaggagcattgtgtgttcctatttctctgtggaaaaaaaaaaaaaagagagaaatctcagcaacaacacaacctgcccagcaaaaatcccagctgttcctggcaggaaactgcaagatctcttagcagccggctgttggatgcctagccctggactgggtgctgtgtgggggtggcataacagacaagatagcaagcaagacctgcccagagaacagtggagg

SEQ ID NO: 61989 - DNA, 649 bp, Homo sapiens
aatacttagaatatttttttccaatctccagatacctttgcaagtgatattcctgtaaacataccacagtatccaaaaaagtctggaaacatcaaggaaatagtatttttactgtaattttttctgactagcaaggtggtatgatccatttctttcatacttcattggggatcattacttttttctgcctcacaggatgtataaatgactcataataaattaaggattattaaataataatgacaataataataacaactataatgataatagtaaaaataacaagcagcagcagcagcagcagaaagcacaagcctaagtggaaaattaggtttcctagaggctcctgttctccacagcatgaccttaaaatgggaatcatttctcaagcctctaagacaccaaagcacagatgcacggtgcataaacaaataagtgaccacattagtggtgccctttgggggtttaaaatcttattcttatgaccccaggaagctgaccagagagaagggggaagaaagaagtacaggatatttatctttacattttggaaatgcttttgatcagcagagctggaacaagtttctgtgcttttgtgggaactacaaatgttccaggggaggaagcaagatcaagagcagtttgctct

SEQ ID NO: 61990 - DNA, 825 bp, Homo sapiens
  misc_feature (133)..(133): n is a, c, g, or t
  misc_feature (138)..(138): n is a, c, g, or t
  misc_feature (144)..(144): n is a, c, g, or t
  misc_feature (154)..(156): n is a, c, g, or t
  misc_feature (159)..(161): n is a, c, g, or t
  misc_feature (177)..(177): n is a, c, g, or t
  misc_feature (182)..(182): n is a, c, g, or t
  misc_feature (187)..(187): n is a, c, g, or t
  misc_feature (189)..(189): n is a, c, g, or t
  misc_feature (191)..(191): n is a, c, g, or t
  misc_feature (212)..(212): n is a, c, g, or t
  misc_feature (226)..(226): n is a, c, g, or t
ctcactgcaacctccaccagccgggttcaagcgattctcctgccgcagcctcctatgtcggacgtgggatacagaatgagcatccatctcaagaaaaaaaaaaaaaaaaaactgtataggggccgggcgtttngtttntttttnttatcccatnnnttnnntttttctgttttttgnttttnttgtntntnttttttttttttctctttttntttgtgtgtggttntggttggtgaatcgctggagcccgggaggtggaggcttcagtaagccaagattatgccattgcactccagcctgggtgacagagtgagacctcatctcaagaacacaacataccgttggactcccaaagtgctaggcctcctctcacataggaaggccccatctctatgaaataaaaaacttagctgagcatagtgatacacgcctgcagtgctagctacttgaaggccgaggcaggagggttgcttgacctcaggagtttgagggcacagtaagtcaagattgcaacactgcactccagcctgggcaacaaagcaagactctgtctcaaaaaagagagcagggcaggcgcagtggcccacgcctgtaatcccaagaactttgggagggtgagatgggaggatcgcttgagctcaggaatttgagagaccaatctgggcaacagggcgatcctgtctctaccaaattttttttaattttatttatttatttatttttttgaggctcagtctcgcactgtcactcaggctgcagtgcagtggcgctatcttggctcactacaagctctgcctcccgggttcatgccattcttctgcctca

SEQ ID NO: 61991 - DNA, 4584 bp, Homo sapiens
ggaggggcgtgccctggagttgggggcggggcgaggcgggctcctccccggcgggcgggcccgggcgcggcgcggtggcctcgcggtgcctaggctggggctgccggaccgtgaggctgtgagtcgcgcggacggagccggacaaaagcgggcggcggcggcaggatgaacagcatcaagaacgtgccggcgcgggtgctgagccgcaggccgggccacagcctggaggccgagcgcgagcagttcgacaagacccaggccatcagcatcagcaaagccatcaacacccaggaggcccccgtgaaggagaagcacgcccggcgcatcattctgggcacacaccacgagaagggggctttcaccttctggtcctatgccattgggctgccgctgcccagcagctccattctcagctggaagttctgccacgtcctccacaaggtccttcgagacgggcaccccaatgtgctgcatgactgccagcggtaccgcagcaacatccgggagattggagacctgtggggacatttgcatgaccgctacggacagctggtgaatgtctacaccaagctgctgctgaccaagatctccttccacctcaagcatccccagtttcccgcgggcctggaggtgacagatgaggtactggagaaggcagctgggaccgatgtcaacaacatcttccagctcactgtggagatgtttgattacatggattgtgagctgaagctttctgaatcagttttccgacagctcaacacggccatcgccgtatcccagatgtcctcaggccagtgccgcctggcccccctcatccaggtcatccaggactgcagccacctctaccactacacggtcaagctcctgttcaagctacactcttgtctccctgcggacaccctgcaaggccacagggaccggttccacgagcagtttcacagcctcaggaacttcttccgcagagcctccgacatgctgtacttcaagcggctcatccagatcccccggctgcccgagggaccccctaacttcctgcgggcctcagccctggctgagcacatcaagccggtggtggtgatccccgaggaggccccggaagatgaggagccggagaatctcattgagatcagcacagggccccccgcgggggagccagtggtggtggctgacctcttcgatcagacgtttggaccccccaatgggtctgtgaaggacgacagggacctccagattgagagcttgaagagagaggtggaaatgctccgctctgaactggagaagatcaagctggaggcccagcggtacatcgcgcagctgaagagccaggtgaatgcactggagggtgagctggaggagcagcggaagcagaagcagaaggccctggtggataatgagcagctccgccacgagctggcccagctgagggctgcccagctggagggcgagcggagccagggcctgcgtgaggaggctgagaggaaggccagtgccacggaggcgcgctacaacaagctgaaggaaaagcacagtgagctcgtccatgtgcacgcggagctgctcagaaagaacgcggacacagccaagcagctgacggtgacgcagcaaagccaggaggaggtggcgcgggtgaaggagcagctggccttccaggtggagcaggtgaagcgggagtcggagttgaagctagaggagaagagcgaccagctggagaagctcaagagggagctggaggccaaggccggagagctggcccgcgcgcaggaggccctgagccacacagagcagagcaagtcggagctgagctcacggctggacacgctgagtgcggagaaggatgctctgagtggagctgtgcggcagcgggaggcagacctgctggcggcgcagagcctggtgcgcgagacagaggcggcgctgagccgggagcagcagcgcagctcccaggagcagggcgagttgcagggccggctggcagagagggagtctcaggagcaggggctgcggcagaggctgctggacgagcagttcgcagtgttgcggggcgctgctgccgaggccgcgggcatcctgcaggatgccgtgagcaagctggacgaccccctgcacctgcgctgtaccagctccccagactacctggtgagcagggcccaggaggccttggatgccgtgagcaccctggaggagggccacgcccagtacctgacctccttggcagacgcctccgccctggtggcagctctgacccgcttctcccacctggctgcggataccatcatcaatggcggtgccacctcgcacctggctcccaccgaccctgccgaccgcctcatagacacctgcagggagtgcggggcccgggctctggagctcatggggcagctgcaggaccagcaggctctgcggcacatgcaggccagcctggtgcggacacccctgcagggcatccttcagctgggccaggaactgaaacccaagagcctagatgtgcggcaggaggagctgggggccgtggtcgacaaggagatggcggccacatccgcagccattgaagatgctgtgcggaggattgaggacatgatgaaccaggcacgccacgccagctcgggggtgaagctggaggtgaacgagaggatcctcaactcctgcacagacctgatgaaggctatccggctcctggtgacgacatccactagcctgcagaaggagatcgtggagagcggcaggggggcagccacgcagcaggaattttacgccaagaactcgcgctggaccgaaggcctcatctcggcctccaaggctgtgggctggggagccacacagctggtggaggcagctgacaaggtggtgcttcacacgggcaagtatgaggagctcatcgtctgctcccacgagatcgcagccagcacggcccagctggtggcggcctccaaggtgaaggccaacaagcacagcccccacctgagccgcctgcaggaatgttctcgcacagtcaatgagagggctgccaatgtggtggcctccaccaagtcaggccaggagcagattgaggacagagacaccatggatttctccggcctgtccctcatcaagctgaagaagcaggagatggagacgcaggtgcgtgtcctggagctggagaagacgctggaggctgaacgcatgcggctgggggagttgcggaagcaacactacgtgctggctggggcatcaggcagccctggagaggaggtggccatccggcccagcactgccccccgaagtgtaaccaccaagaaaccacccctggcccagaagcccagcgtggcccccagacaggaccaccagcttgacaaaaaggatggcatctacccagctcaactcgtgaactactaggccccccaggggtccagcagggtggctggtgacaggcctgggcctctgcaactgccctgacaggaccgagaggccttgcccctccacctggtgcccaagcctcccgccccaccgtctggatcaatgtcctcaaggcccctggcccttactgagcctgcagggtcctgggccatgtgggtggtgcttctggatgtgagtctcttatttatctgcagaaggaactttggggtgcagccaggacccggtaggcctgagcctcaactcttcagaaaatagtgtttttaatattcctcttcagaaaatagtgtttttaatattccgagctagagctcttcttcctacgtttgtagtcagcacactgggaaaccgggccagcgtggggctccctgccttctggactcctgaaggtcgtggatggatggaaggcacacagcccgtgccggctgatgggacgagggtcaggcatcctgtctgtggccttctggggcaccgattctaccaggccctccagctgcgtggtctccgcagaccaggctctgtgtgggctagaggaatgtcgcccattactcctcaggcctggccctcgggcctccgtgatgggagccccccaggaggggtcagatgctggaaggggccgctttctggggagtgaggtgagacatagcggcccaggcgctgccttcactcctggagtttccatttccagctggaatctgcagccacccccatttcctgttttccattcccccgttctggccgcgccccactgcccacctgaaggggtggtttccagccctccggagagtgggcttggccctaggccctccagctcagccagaaaaagcccagaaacccaggtgctggaccagggccctcagggaggggaccctgcggctagagtgggctaggccctggctttgcccgtcagatttgaacgaatgtgtgtcccttgagcccaaggagagcggcaggaggggtgggaccaggctgggaggacagagccagcagctgccatgccctcctgctccccccaccccagccctagccctttagcctttcaccctgtgctctggaaaggctaccaaatactggccaaggtcaggaggagcaaaaatgagccagcaccagcgccttggctttgtgttagcatttcctcctgaagtgttctgttggcaataaaatgcactttgactgttaaaattgtcactgatg

SEQ ID NO: 61992 - DNA, 420 bp, Homo sapiens
gcagggggcacactggtgtgtgggagctggcttagggccctgcttcacagttggaccaccttggacaggttgcccagctcccaagggctcacgttcttcctcctgccccttttgcacagttttccgacagctcaacacggccatcgccgtatcccagatgtcctcaggccagtgccgcctggcccccctcatccaggtcatccaggactgcagccacctctaccactacacggtcaagctcctgttcaagctacactcttgtgagtggcccagggcaacccctggcccggaaggctgtgtttatatggcttagacattcactgtcaaaaaggaaaatcgaaaaattagaggtttattcatttaaaaatggcagtaataaacccactgcccattaatagaaataacatatattttatgaaa

SEQ ID NO: 61993 - DNA, 3865 bp, Homo sapiens
catgcgttcgcggacgcgtggggttttccgacagctcaacacggccatcgccgtatcccagatgtcctcaggccagtgccgcctggcccccctcatccaggtcatccaggactgcagccacctctaccactacacggtcaagctcctgttcaagctacactcttgtctccctgcggacaccctgcaaggccacagggaccggttccacgagcagtttcacagcctcaggaacttcttccgcagagcctccgacatgctgtacttcaagcggctcatccagatcccccggctgcccgagggaccccctaacttcctgcgggcctcagccctggctgagcacatcaagccggtggtggtgatccccgaggaggccccggaagatgaggagccggagaatctcattgagatcagcacagggccccccgcgggggagccagtggtggtggctgacctcttcgatcagacgtttggaccccccaatgggtctgtgaaggacgacagggacctccagattgagagcttgaagagagaggtggaaatgctccgctctgaactggagaagatcaagctggaggcccagcggtacatcgcgcagctgaagagccaggtgaatgcactggagggtgagctggaggagcagcggaagcagaagcagaaggccctggtggataatgagcagctccgccacgagctggcccagctgagggctgcccagctggagggcgagcggagccagggcctgcgtgaggaggctgagaggaaggccagtgccacggaggcgcgctacaacaagctgaaggaaaagcacagtgagctcgtccatgtgcacgcggagctgctcagaaagaacgcggacacagccaagcagctgacggtgacgcagcaaagccaggaggaggtggcgcgggtgaaggagcagctggccttccaggtggagcaggtgaagcgggagtcggagttgaagctagaggagaagagcgaccagctggagaagctcaagagggagctggaggccaaggccggagagctggcccgcgcgcaggaggccctgagccacacagagcagagcaagtcggagctgagctcacggctggacacgctgagtgcggagaaggatgctctgagtggagctgtgcggcagcgggaggcagacctgctggcggcgcagagcctggtgcgcgagacagaggcggcgctgagccgggagcagcagcgcagctcccaggagcagggcgagttgcagggccggctggcagagagggagtctcaggagcaggggctgcggcagaggctgctggacgagcagttcgcagtgttgcggggcgctgctgccgaggccgcgggcatcctgcaggatgccgtgagcaagctggacgaccccctgcacctgcgctgtaccagctccccagactacctggtgagcagggcccaggaggccttggatgccgtgagcaccctggaggagggccacgcccagtacctgacctccttggcagacgcctccgccctggtggcagctctgacccgcttctcccacctggctgcggataccatcatcaatggcggtgccacctcgcacctggctcccaccgaccctgccgaccgcctcatagacacctgcagggagtgcggggcccgggctctggagctcatggggcagctgcaggaccagcaggctctgcggcacatgcaggccagcctggtgcggacacccctgcagggcatccttcagctgggccaggaactgaaacccaagagcctagatgtgcggcaggaggagctgggggccgtggtcgacaaggagatggcggccacatccgcagccattgaagatgctgtgcggaggattgaggacatgatgaaccaggcacgccacgccagctcgggggtgaagctggaggtgaacgagaggatcctcaactcctgcacagacctgatgaaggctatccggctcctggtgacgacatccactagcctgcagaaggagatcgtggagagcggcaggggggcagccacgcagcaggaattttacgccaagaactcgcgctggaccgaaggcctcatctcggcctccaaggctgtgggctggggagccacacagctggtggaggcagctgacaaggtggtgcttcacacgggcaagtatgaggagctcatcgtctgctcccacgagatcgcagccagcacggcccagctggtggcggcctccaaggtgaaggccaacaagcacagcccccacctgagccgcctgcaggaatgttctcgcacagtcaatgagagggctgccaatgtggtggcctccaccaagtcaggccaggagcagattgaggacagagacaccatggatttctccggcctgtccctcatcaagctgaagaagcaggagatggagacgcaggtgcgtgtcctggagctggagaagacgctggaggctgaacgcatgcggctgggggagttgcggaagcaacactacgtgctggctggggcatcaggcagccctggagaggaggtggccatccggcccagcactgccccccgaagtgtaaccaccaagaaaccacccctggcccagaagcccagcgtggcccccagacaggaccaccagcttgacaaaaaggatggcatctacccagctcaactcgtgaactactaggccccccaggggtccagcagggtggctggtgacaggcctgggcctctgcaactgccctgacaggaccgagaggccttgcccctccacctggtgcccaagcctcccgccccaccgtctggatcaatgtcctcaaggcccctggcccttactgagcctgcagggtcctgggccatgtgggtggtgcttctggatgtgagtctcttatttatctgcagaaggaactttggggtgcagccaggacccggtaggcctgagcctcaactcttcagaaaatagtgtttttaatattcctcttcagaaaatagtgtttttaatattccgagctagagctcttcttcctacgtttgtagtcagcacactgggaaaccgggccagcgtggggctccctgccttctggactcctgaaggtcgtggatggatggaaggcacacagcccgtgccggctgatgggacgagggtcaggcatcctgtctgtggccttctggggcaccgattctaccaggccctccagctgcgtggtctccgcagaccaggctctgtgtgggctagaggaatgtcgcccattactcctcaggcctggccctcgggcctccgtgatgggagccccccaggaggggtcagatgctggaaggggccgctttctggggagtgaggtgagacatagcggcccaggcgctgccttcactcctggagtttccatttccagctggaatctgcagccacccccatttcctgttttccattcccccgttctggccgcgccccactgcccacctgaaggggtggtttccagccctccggagagtgggcttggccctaggccctccagctcagccagaaaaagcccagaaacccaggtgctggaccagggccctcagggaggggaccctgcggctagagtgggctaggccctggctttgcccgtcagatttgaacgaatgtgtgtcccttgagcccaaggagagcggcaggaggggtgggaccaggctgggaggacagagccagcagctgccatgccctcctgctccccccaccccagccctagccctttagcctttcaccctgtgctctggaaaggctaccaaatactggccaaggtcaggaggagcaaaaatgagccagcaccagcgccttggctttgtgttagcatttcctcctgaagtgttctgttggcaataaaatgcactttgactgttaaaattgtcactgatg

SEQ ID NO: 61994 - DNA, 3300 bp, Homo sapiens
ggtgaaggcaggacaacttgaagtggggaaggggccttccagtcttagatagataagagacacatggttgcattcttttgagcttctgatgagcctcttccaaaaggaggcaatcagatatgtgtttctctcagtgagcagaggggagactttcaatagactgggagccaggccctgcgtgaggaggctgagaggaaggccagtgccacggaggcgcgctacaacaagctgaaggaaaagcacagtgagctcgtccatgtgcacgcggagctgctcagaaagaacgcggacacagccaagcagctgacggtgacgcagcaaagccaggaggaggtggcgcgggtgaaggagcagctggccttccaggtggagcaggtgaagcgggagtcggagttgaagctagaggagaagagcgaccagctggagaagctcaagagggagctggaggccaaggccggagagctggcccgcgcgcaggaggccctgagccacacagagcagagcaagtcggagctgagctcacggctggacacgctgagtgcggagaaggatgctctgagtggagctgtgcggcagcgggaggcagacctgctggcggcgcagagcctggtgcgcgagacagaggcggcgctgagccgggagcagcagcgcagctcccaggagcagggcgagttgcagggccggctggcagagagggagtctcaggagcaggggctgcggcagaggctgctggacgagcagttcgcagtgttgcggggcgctgctgccgaggccgcgggcatcctgcaggatgccgtgagcaagctggacgaccccctgcacctgcgctgtaccagctccccagactacctggtgagcagggcccaggaggccttggatgccgtgagcaccctggaggagggccacgcccagtacctgacctccttggcagacgcctccgccctggtggcagctctgacccgcttctcccacctggctgcggataccatcatcaatggcggtgccacctcgcacctggctcccaccgaccctgccgaccgcctcatagacacctgcagggagtgcggggcccgggctctggagctcatggggcagctgcaggaccagcaggctctgcggcacatgcaggccagcctggtgcggacacccctgcagggcatccttcagctgggccaggaactgaaacccaagagcctagatgtgcggcaggaggagctgggggccgtggtcgacaaggagatggcggccacatccgcagccattgaagatgctgtgcggaggattgaggacatgatgaaccaggcacgccacgccagctcgggggtgaagctggaggtgaacgagaggatcctcaactcctgcacagacctgatgaaggctatccggctcctggtgacgacatccactagcctgcagaaggagatcgtggagagcggcaggggggcagccacgcagcaggaattttacgccaagaactcgcgctggaccgaaggcctcatctcggcctccaaggctgtgggctggggagccacacagctggtggaggcagctgacaaggtggtgcttcacacgggcaagtatgaggagctcatcgtctgctcccacgagatcgcagccagcacggcccagctggtggcggcctccaaggtgaaggccaacaagcacagcccccacctgagccgcctgcaggaatgttctcgcacagtcaatgagagggctgccaatgtggtggcctccaccaagtcaggccaggagcagattgaggacagagacaccatggatttctccggcctgtccctcatcaagctgaagaagcaggagatggagacgcaggtgcgtgtcctggagctggagaagacgctggaggctgaacgcatgcggctgggggagttgcggaagcaacactacgtgctggctggggcatcaggcagccctggagaggaggtggccatccggcccagcactgccccccgaagtgtaaccaccaagaaaccacccctggcccagaagcccagcgtggcccccagacaggaccaccagcttgacaaaaaggatggcatctacccagctcaactcgtgaactactaggccccccaggggtccagcagggtggctggtgacaggcctgggcctctgcaactgccctgacaggaccgagaggccttgcccctccacctggtgcccaagcctcccgccccaccgtctggatcaatgtcctcaaggcccctggcccttactgagcctgcagggtcctgggccatgtgggtggtgcttctggatgtgagtctcttatttatctgcagaaggaactttggggtgcagccaggacccggtaggcctgagcctcaactcttcagaaaatagtgtttttaatattcctcttcagaaaatagtgtttttaatattccgagctagagctcttcttcctacgtttgtagtcagcacactgggaaaccgggccagcgtggggctccctgccttctggactcctgaaggtcgtggatggatggaaggcacacagcccgtgccggctgatgggacgagggtcaggcatcctgtctgtggccttctggggcaccgattctaccaggccctccagctgcgtggtctccgcagaccaggctctgtgtgggctagaggaatgtcgcccattactcctcaggcctggccctcgggcctccgtgatgggagccccccaggaggggtcagatgctggaaggggccgctttctggggagtgaggtgagacatagcggcccaggcgctgccttcactcctggagtttccatttccagctggaatctgcagccacccccatttcctgttttccattcccccgttctggccgcgccccactgcccacctgaaggggtggtttccagccctccggagagtgggcttggccctaggccctccagctcagccagaaaaagcccagaaacccaggtgctggaccagggccctcagggaggggaccctgcggctagagtgggctaggccctggctttgcccgtcagatttgaacgaatgtgtgtcccttgagcccaaggagagcggcaggaggggtgggaccaggctgggaggacagagccagcagctgccatgccctcctgctccccccaccccagccctagccctttagcctttcaccctgtgctctggaaaggctaccaaatactggccaaggtcaggaggagcaaaaatgagccagcaccagcgccttggctttgtgttagcatttcctcctgaagtgttctgttggcaataaaatgcactttgactgttaaaattgtcactgatg

SEQ ID NO: 61995 - DNA, 4809 bp, Homo sapiens
ggaggggcgtgccctggagttgggggcggggcgaggcgggctcctccccggcgggcgggcccgggcgcggcgcggtggcctcgcggtgcctaggctggggctgccggaccgtgaggctgtgagtcgcgcggacggagccggacaaaagcgggcggcggcggcaggatgaacagcatcaagaacgtgccggcgcgggtgctgagccgcaggccgggccacagcctggaggccgagcgcgagcagttcgacaagacccaggccatcagcatcagcaaagccatcaacacccaggaggcccccgtgaaggagaagcacgcccggcgcatcattctgggcacacaccacgagaagggggctttcaccttctggtcctatgccattgggctgccgctgcccagcagctccattctcagctggaagttctgccacgtcctccacaaggtccttcgagacgggcaccccaatgtgctgcatgactgccagcggtaccgcagcaacatccgggagattggagacctgtggggacatttgcatgaccgctacggacagctggtgaatgtctacaccaagctgctgctgaccaagatctccttccacctcaagcatccccagtttcccgcgggcctggaggtgacagatgaggtactggagaaggcagctgggaccgatgtcaacaacatcttccagctcactgtggagatgtttgattacatggattgtgagctgaagctttctgaatcagttttccgacagctcaacacggccatcgccgtatcccagatgtcctcaggccagtgccgcctggcccccctcatccaggtcatccaggactgcagccacctctaccactacacggtcaagctcctgttcaagctacactcttgtctccctgcggacaccctgcaaggccacagggaccggttccacgagcagtttcacagcctcaggaacttcttccgcagagcctccgacatgctgtacttcaagcggctcatccagatcccccggctgcccgagggaccccctaacttcctgcgggcctcagccctggctgagcacatcaagccggtggtggtgatccccgaggaggccccggaagatgaggagccggagaatctcattgagatcagcacagggccccccgcgggggagccagtggtggtggctgacctcttcgatcagacgtttggaccccccaatgggtctgtgaaggacgacagggacctccagattgagagcttgaagagagaggtggaaatgctccgctctgaactggagaagatcaagctggaggcccagcggtacatcgcgcagctgaagagccaggtgaatgcactggagggtgagctggaggagcagcggaagcagaagcagaaggccctggtggataatgagcagctccgccacgagctggcccagctgagggctgcccagctggagggcgagcggagccagggcctgcgtgaggaggctgagaggaaggccagtgccacggaggcgcgctacaacaagctgaaggaaaagcacagtgagctcgtccatgtgcacgcggagctgctcagaaagaacgcggacacagccaagcagctgacggtgacgcagcaaagccaggaggaggtggcgcgggtgaaggagcagctggccttccaggtggagcaggtgaagcgggagtcggagttgaagctagaggagaagagcgaccagctggagaagctcaagagggagctggaggccaaggccggagagctggcccgcgcgcaggaggccctgagccacacagagcagagcaagtcggagctgagctcacggctggacacgctgagtgcggagaaggatgctctgagtggagctgtgcggcagcgggaggcagacctgctggcggcgcagagcctggtgcgcgagacagaggcggcgctgagccgggagcagcagcgcagctcccaggagcagggcgagttgcagggccggctggcagagagggagtctcaggagcaggggctgcggcagaggctgctggacgagcagttcgcagtgttgcggggcgctgctgccgaggccgcgggcatcctgcaggatgccgtgagcaagctggacgaccccctgcacctgcgctgtaccagctccccagactacctggtgagcagggcccaggaggccttggatgccgtgagcaccctggaggagggccacgcccagtacctgacctccttggcagacgcctccgccctggtggcagctctgacccgcttctcccacctggctgcggataccatcatcaatggcggtgccacctcgcacctggctcccaccgaccctgccgaccgcctcatagacacctgcagggagtgcggggcccgggctctggagctcatggggcagctgcaggaccagcaggctctgcggcacatgcaggccagcctggtgcggacacccctgcagggcatccttcagctgggccaggaactgaaacccaagagcctagatgtgcggcaggaggagctgggggccgtggtcgacaaggagatggcggccacatccgcagccattgaagatgctgtgcggaggattgaggacatgatgaaccaggcacgccacgccagctcgggggtgaagctggaggtgaacgagaggatcctcaactcctgcacagacctgatgaaggtgaggggctgtgacccgggggggtctgcacctggagggccaccagtcattgctgtcttggtctcggcaggctatccggctcctggtgacgacatccactagcctgcagaaggagatcgtggagagcggcaggggggcagccacgcagcaggaattttacgccaagaactcgcgctggaccgaaggcctcatctcggcctccaaggctgtgggctggggagccacacagctggtgtaggttgccctgggtgggggggggcagggggctgcttcctgccagttggagcagtttggggttcaacagggtgcagggagtagagggggtgtggagtggtgccagccgtccgtggggtcagagaccctggccctgactggcccttgacccgcagggaggcagctgacaaggtggtgcttcacacgggcaagtatgaggagctcatcgtctgctcccacgagatcgcagccagcacggcccagctggtggcggcctccaaggtgaaggccaacaagcacagcccccacctgagccgcctgcaggaatgttctcgcacagtcaatgagagggctgccaatgtggtggcctccaccaagtcaggccaggagcagattgaggacagagacaccatggatttctccggcctgtccctcatcaagctgaagaagcaggagatggagacgcaggtgcgtgtcctggagctggagaagacgctggaggctgaacgcatgcggctgggggagttgcggaagcaacactacgtgctggctggggcatcaggcagccctggagaggaggtggccatccggcccagcactgccccccgaagtgtaaccaccaagaaaccacccctggcccagaagcccagcgtggcccccagacaggaccaccagcttgacaaaaaggatggcatctacccagctcaactcgtgaactactaggccccccaggggtccagcagggtggctggtgacaggcctgggcctctgcaactgccctgacaggaccgagaggccttgcccctccacctggtgcccaagcctcccgccccaccgtctggatcaatgtcctcaaggcccctggcccttactgagcctgcagggtcctgggccatgtgggtggtgcttctggatgtgagtctcttatttatctgcagaaggaactttggggtgcagccaggacccggtaggcctgagcctcaactcttcagaaaatagtgtttttaatattcctcttcagaaaatagtgtttttaatattccgagctagagctcttcttcctacgtttgtagtcagcacactgggaaaccgggccagcgtggggctccctgccttctggactcctgaaggtcgtggatggatggaaggcacacagcccgtgccggctgatgggacgagggtcaggcatcctgtctgtggccttctggggcaccgattctaccaggccctccagctgcgtggtctccgcagaccaggctctgtgtgggctagaggaatgtcgcccattactcctcaggcctggccctcgggcctccgtgatgggagccccccaggaggggtcagatgctggaaggggccgctttctggggagtgaggtgagacatagcggcccaggcgctgccttcactcctggagtttccatttccagctggaatctgcagccacccccatttcctgttttccattcccccgttctggccgcgccccactgcccacctgaaggggtggtttccagccctccggagagtgggcttggccctaggccctccagctcagccagaaaaagcccagaaacccaggtgctggaccagggccctcagggaggggaccctgcggctagagtgggctaggccctggctttgcccgtcagatttgaacgaatgtgtgtcccttgagcccaaggagagcggcaggaggggtgggaccaggctgggaggacagagccagcagctgccatgccctcctgctccccccaccccagccctagccctttagcctttcaccctgtgctctggaaaggctaccaaatactggccaaggtcaggaggagcaaaaatgagccagcaccagcgccttggctttgtgttagcatttcctcctgaagtgttctgttggcaataaaatgcactttgactgttaaaattgtcactgatg

SEQ ID NO: 61996 - DNA, 1965 bp, Homo sapiens
gtgaacgagaggatcctcaactcctgcacagacctgatgaaggctatccggctcctggtgacgacatccactagcctgcagaaggagatcgtggagagcggcaggggggcagccacgcagcaggaattttacgccaagaactcgcgctggaccgaaggcctcatctcggcctccaaggctgtgggctggggagccacacagctggtggaggcagctgacaaggtggtgcttcacacgggcaagtatgaggagctcatcgtctgctcccacgagatcgcagccagcacggcccagctggtggcggcctccaaggtgaaggccaacaagcacagcccccacctgagccgcctgcaggaatgttctcgcacagtcaatgagagggctgccaatgtggtggcctccaccaagtcaggccaggagcagattgaggacagagacaccatggatttctccggcctgtccctcatcaagctgaagaagcaggagatggagacgcaggtgcgtgtcctggagctggagaagacgctggaggctgaacgcatgcggctgggggagttgcggaagcaacactacgtgctggctggggcatcaggcagccctggagaggaggtggccatccggcccagcactgccccccgaagtgtaaccaccaagaaaccacccctggcccagaagcccagcgtggcccccagacaggaccaccagcttgacaaaaaggatggcatctacccagctcaactcgtgaactactaggccccccaggggtccagcagggtggctggtgacaggcctgggcctctgcaactgccctgacaggaccgagaggccttgcccctccacctggtgcccaagcctcccgccccaccgtctggatcaatgtcctcaaggcccctggcccttactgagcctgcagggtcctgggccatgtgggtggtgcttctggatgtgagtctcttatttatctgcagaaggaactttggggtgcagccaggacccggtaggcctgagcctcaactcttcagaaaatagtgtttttaatattcctcttcagaaaatagtgtttttaatattccgagctagagctcttcttcctacgtttgtagtcagcacactgggaaaccgggccagcgtggggctccctgccttctggactcctgaaggtcgtggatggatggaaggcacacagcccgtgccggctgatgggacgagggtcaggcatcctgtctgtggccttctggggcaccgattctaccaggccctccagctgcgtggtctccgcagaccaggctctgtgtgggctagaggaatgtcgcccattactcctcaggcctggccctcgggcctccgtgatgggagccccccaggaggggtcagatgctggaaggggccgctttctggggagtgaggtgagacatagcggcccaggcgctgccttcactcctggagtttccatttccagctggaatctgcagccacccccatttcctgttttccattcccccgttctggccgcgccccactgcccacctgaaggggtggtttccagccctccggagagtgggcttggccctaggccctccagctcagccagaaaaagcccagaaacccaggtgctggaccagggccctcagggaggggaccctgcggctagagtgggctaggccctggctttgcccgtcagatttgaacgaatgtgtgtcccttgagcccaaggagagcggcaggaggggtgggaccaggctgggaggacagagccagcagctgccatgccctcctgctccccccaccccagccctagccctttagcctttcaccctgtgctctggaaaggctaccaaatactggccaaggtcaggaggagcaaaaatgagccagcaccagcgccttggctttgtgttagcatttcctcctgaagtgttctgttggcaataaaatgcactttgactgttaaaattgtcactgatg

SEQ ID NO: 61997 - DNA, 1803 bp, Homo sapiens
cggacgcgtgggtcgacccacgcgttcggagccacacagctggtggaggcagctgacaaggtggtgcttcacacgggcaagtatgaggagctcatcgtctgctcccacgagatcgcagccagcacggcccagctggtggcggcctccaaggtgaaggccaacaagcacagcccccacctgagccgcctgcaggaatgttctcgcacagtcaatgagagggctgccaatgtggtggcctccaccaagtcaggccaggagcagattgaggacagagacaccatggatttctccggcctgtccctcatcaagctgaagaagcaggagatggagacgcaggtgcgtgtcctggagctggagaagacgctggaggctgaacgcatgcggctgggggagttgcggaagcaacactacgtgctggctggggcatcaggcagccctggagaggaggtggccatccggcccagcactgccccccgaagtgtaaccaccaagaaaccacccctggcccagaagcccagcgtggcccccagacaggaccaccagcttgacaaaaaggatggcatctacccagctcaactcgtgaactactaggccccccaggggtccagcagggtggctggtgacaggcctgggcctctgcaactgccctgacaggaccgagaggccttgcccctccacctggtgcccaagcctcccgccccaccgtctggatcaatgtcctcaaggcccctggcccttactgagcctgcagggtcctgggccatgtgggtggtgcttctggatgtgagtctcttatttatctgcagaaggaactttggggtgcagccaggacccggtaggcctgagcctcaactcttcagaaaatagtgtttttaatattcctcttcagaaaatagtgtttttaatattccgagctagagctcttcttcctacgtttgtagtcagcacactgggaaaccgggccagcgtggggctccctgccttctggactcctgaaggtcgtggatggatggaaggcacacagcccgtgccggctgatgggacgagggtcaggcatcctgtctgtggccttctggggcaccgattctaccaggccctccagctgcgtggtctccgcagaccaggctctgtgtgggctagaggaatgtcgcccattactcctcaggcctggccctcgggcctccgtgatgggagccccccaggaggggtcagatgctggaaggggccgctttctggggagtgaggtgagacatagcggcccaggcgctgccttcactcctggagtttccatttccagctggaatctgcagccacccccatttcctgttttccattcccccgttctggccgcgccccactgcccacctgaaggggtggtttccagccctccggagagtgggcttggccctaggccctccagctcagccagaaaaagcccagaaacccaggtgctggaccagggccctcagggaggggaccctgcggctagagtgggctaggccctggctttgcccgtcagatttgaacgaatgtgtgtcccttgagcccaaggagagcggcaggaggggtgggaccaggctgggaggacagagccagcagctgccatgccctcctgctccccccaccccagccctagccctttagcctttcaccctgtgctctggaaaggctaccaaatactggccaaggtcaggaggagcaaaaatgagccagcaccagcgccttggctttgtgttagcatttcctcctgaagtgttctgttggcaataaaatgcactttgactgttaaaattgtcactgatg

SEQ ID NO: 61998 - DNA, 2805 bp, Homo sapiens
ggaggggcgtgccctggagttgggggcggggcgaggcgggctcctccccggcgggcgggcccgggcgcggcgcggtggcctcgcggtgcctaggctggggctgccggaccgtgaggctgtgagtcgcgcggacggagccggacaaaagcgggcggcggcggcaggatgaacagcatcaagaacgtgccggcgcgggtgctgagccgcaggccgggccacagcctggaggccgagcgcgagcagttcgacaagacccaggccatcagcatcagcaaagccatcaacacccaggaggcccccgtgaaggagaagcacgcccggcgcatcattctgggcacacaccacgagaagggggctttcaccttctggtcctatgccattgggctgccgctgcccagcagctccattctcagctggaagttctgccacgtcctccacaaggtccttcgagacgggcaccccaatgtgctgcatgactgccagcggtaccgcagcaacatccgggagattggagacctgtggggacatttgcatgaccgctacggacagctggtgaatgtctacaccaagctgctgctgaccaagatctccttccacctcaagcatccccagtttcccgcgggcctggaggtgacagatgaggtactggagaaggcagctgggaccgatgtcaacaacatcttccagctcactgtggagatgtttgattacatggattgtgagctgaagctttctgaatcagttttccgacagctcaacacggccatcgccgtatcccagatgtcctcaggccagtgccgcctggcccccctcatccaggtcatccaggactgcagccacctctaccactacacggtcaagctcctgttcaagctacactcttgtctccctgcggacaccctgcaaggccacagggaccggttccacgagcagtttcacagcctcaggaacttcttccgcagagcctccgacatgctgtacttcaagcggctcatccagatcccccggctgcccgagggaccccctaacttcctgcgggcctcagccctggctgagcacatcaagccggtggtggtgatccccgaggaggccccggaagatgaggagccggagaatctcattgagatcagcacagggccccccgcgggggagccagtggtggtggctgacctcttcgatcagacgtttggaccccccaatgggtctgtgaaggacgacagggacctccagattgagagcttgaagagagaggtggaaatgctccgctctgaactggagaagatcaagctggaggcccagcggtacatcgcgcagctgaagagccaggtgaatgcactggagggtgagctggaggagcagcggaagcagaagcagaaggccctggtggataatgagcagctccgccacgagctggcccagctgagggctgcccagctggagggcgagcggagccagggcctgcgtgaggaggctgagaggaaggccagtgccacggaggcgcgctacaacaagctgaaggaaaagcacagtgagctcgtccatgtgcacgcggagctgctcagaaagaacgcggacacagccaagcagctgacggtgacgcagcaaagccaggaggaggtggcgcgggtgaaggagcagctggccttccaggtggagcaggtgaagcgggagtcggagttgaagctagaggagaagagcgaccagctggagaagctcaagagggagctggaggccaaggccggagagctggcccgcgcgcaggaggccctgagccacacagagcagagcaagtcggagctgagctcacggctggacacgctgagtgcggagaaggatgctctgagtggagctgtgcggcagcgggaggcagacctgctggcggcgcagagcctggtgcgcgagacagaggcggcgctgagccgggagcagcagcgcagctcccaggagcagggcgagttgcagggccggctggcagagagggagtctcaggagcaggggctgcggcagaggctgctggacgagcagttcgcagtgttgcggggcgctgctgccgaggccgcgggcatcctgcaggatgccgtgagcaagctggacgaccccctgcacctgcgctgtaccagctccccagactacctggtgagcagggcccaggaggccttggatgccgtgagcaccctggaggagggccacgcccagtacctgacctccttggcagacgcctccgccctggtggcagctctgacccgcttctcccacctggctgcggataccatcatcaatggcggtgccacctcgcacctggctcccaccgaccctgccgaccgcctcatagacacctgcagggagtgcggggcccgggctctggagctcatggggcagctgcaggaccagcaggctctgcggcacatgcaggccagcctggtgcggacacccctgcagggcatccttcagctgggccaggaactgaaacccaagagcctagatgtgcggcaggaggagctgggggccgtggtcgacaaggagatggcggccacatccgcagccattgaagatgctgtgcggaggattgaggacatgatgaaccaggcacgccacgccagctcgggggtgaagctggaggtgaacgagaggatcctcaactcctgcacagacctgatgaaggctatccggctcctggtgacgacatccactagcctgcagaaggagatcgtggagagcggcaggggggcagccacgcagcaggaattttacgccaagaactcgcgctggaccgaaggtcaaccctcacccgaaggtcaaccctca

SEQ ID NO: 61999 - DNA, 1316 bp, Homo sapiens
ggaggggcgtgccctggagttgggggcggggcgaggcgggctcctccccggcgggcgggcccgggcgcggcgcggtggcctcgcggtgcctaggctggggctgccggaccgtgaggctgtgagtcgcgcggacggagccggacaaaagcgggcggcggcggcaggatgaacagcatcaagaacgtgccggcgcgggtgctgagccgcaggccgggccacagcctggaggccgagcgcgagcagttcgacaagacccaggccatcagcatcagcaaagccatcaacacccaggaggcccccgtgaaggagaagcacgcccggcgcatcattctgggcacacaccacgagaagggggctttcaccttctggtcctatgccattgggctgccgctgcccagcagctccattctcagctggaagttctgccacgtcctccacaaggtccttcgagacgggcaccccaatgtgctgcatgactgccagcggtaccgcagcaacatccgggagattggagacctgtggggacatttgcatgaccgctacggacagctggtgaatgtctacaccaagctgctgctgaccaagatctccttccacctcaagcatccccagtttcccgcgggcctggaggtgacagatgaggtactggagaaggcagctgggaccgatgtcaacaacatcttccagctcactgtggagatgtttgattacatggattgtgagctgaagctttctgaatcaggtgagccctaaagaggggatgcgggggtctgagtgtattgctaagtcccccgagatgggacgagaagaaaaaagaagacatgagtgatcagacccactgatcactatgaaatgaccctggcccgcccccgtggctcacatctgtaatcccagcattttgggaggccgaggcaggcagattgcttgaggtcaagggttcaagaccagcctggcccacatggtgaaaccctgtctctactaaaaaaatataaaaattagcccggcgtggtggcgcacgcctgtattcccagctacttgggaggctgaggcacggagaatcacttgaacctgggcggcggagatcatgccgctacactccagcctgggccacagagtgagtctccgtcttaaaaaaaaaaaaagaaagaaaaagaaatgcccctgcccctcctggggtcactgcacctccagggataggtaatggggcctcctggcccctccaaagcatggcaggccccagcgggtacatccaggatacaggttcagccatctcttccatccagtgagcgagcaccaccaattcagccccaagacag

SEQ ID NO: 62000 - DNA, 828 bp, Homo sapiens
ggaggggcgtgccctggagttgggggcggggcgaggcgggctcctccccggcgggcgggcccgggcgcggcgcggtggcctcgcggtgcctaggctggggctgccggaccgtgaggctgtgagtcgcgcggacggagccggacaaaagcgggcggcggcggcaggatgaacagcatcaagaacgtgccggcgcgggtgctgagccgcaggccgggccacagcctggaggccgagcgcgagcagttcgacaagacccaggccatcagcatcagcaaagccatcaacacccaggaggcccccgtgaaggagaagcacgcccggcgcatcattctgggcacacaccacgagaagggggctttcaccttctggtcctatgccattgggctgccgctgcccagcagctccattctcagctggaagttctgccacgtcctccacaaggtccttcgagacgggcaccccaatgtgctgcatgactgccagcggtaccgcagcaacatccgggagattggagacctgtggggacatttgcatgaccgctacggacagctggtgaatgtctacaccaagctgctgctgaccaagatctccttccacctcaagcatccccagtttcccgcgggcctggaggtgacagatgaggtactggagaaggcagctgggaccgatgtcaacaacatcttccagctcactgtggagatgtttgattacatggattgtgagctgaagctttctgaatcaggctctctcctgtcactgcagagatttgcaagtggtcccatcacaggcaaggcaggagcaggacctgaggggccagggcacaggtct

SEQ ID NO: 62001 - DNA, 3961 bp, Homo sapiens
gcagggggcacactggtgtgtgggagctggcttagggccctgcttcacagttggaccaccttggacaggttgcccagctcccaagggctcacgttcttcctcctgccccttttgcacagttttccgacagctcaacacggccatcgccgtatcccagatgtcctcaggccagtgccgcctggcccccctcatccaggtcatccaggactgcagccacctctaccactacacggtcaagctcctgttcaagctacactcttgtctccctgcggacaccctgcaaggccacagggaccggttccacgagcagtttcacagcctcaggaacttcttccgcagagcctccgacatgctgtacttcaagcggctcatccagatcccccggctgcccgagggaccccctaacttcctgcgggcctcagccctggctgagcacatcaagccggtggtggtgatccccgaggaggccccggaagatgaggagccggagaatctcattgagatcagcacagggccccccgcgggggagccagtggtggtggctgacctcttcgatcagacgtttggaccccccaatgggtctgtgaaggacgacagggacctccagattgagagcttgaagagagaggtggaaatgctccgctctgaactggagaagatcaagctggaggcccagcggtacatcgcgcagctgaagagccaggtgaatgcactggagggtgagctggaggagcagcggaagcagaagcagaaggccctggtggataatgagcagctccgccacgagctggcccagctgagggctgcccagctggagggcgagcggagccagggcctgcgtgaggaggctgagaggaaggccagtgccacggaggcgcgctacaacaagctgaaggaaaagcacagtgagctcgtccatgtgcacgcggagctgctcagaaagaacgcggacacagccaagcagctgacggtgacgcagcaaagccaggaggaggtggcgcgggtgaaggagcagctggccttccaggtggagcaggtgaagcgggagtcggagttgaagctagaggagaagagcgaccagctggagaagctcaagagggagctggaggccaaggccggagagctggcccgcgcgcaggaggccctgagccacacagagcagagcaagtcggagctgagctcacggctggacacgctgagtgcggagaaggatgctctgagtggagctgtgcggcagcgggaggcagacctgctggcggcgcagagcctggtgcgcgagacagaggcggcgctgagccgggagcagcagcgcagctcccaggagcagggcgagttgcagggccggctggcagagagggagtctcaggagcaggggctgcggcagaggctgctggacgagcagttcgcagtgttgcggggcgctgctgccgaggccgcgggcatcctgcaggatgccgtgagcaagctggacgaccccctgcacctgcgctgtaccagctccccagactacctggtgagcagggcccaggaggccttggatgccgtgagcaccctggaggagggccacgcccagtacctgacctccttggcagacgcctccgccctggtggcagctctgacccgcttctcccacctggctgcggataccatcatcaatggcggtgccacctcgcacctggctcccaccgaccctgccgaccgcctcatagacacctgcagggagtgcggggcccgggctctggagctcatggggcagctgcaggaccagcaggctctgcggcacatgcaggccagcctggtgcggacacccctgcagggcatccttcagctgggccaggaactgaaacccaagagcctagatgtgcggcaggaggagctgggggccgtggtcgacaaggagatggcggccacatccgcagccattgaagatgctgtgcggaggattgaggacatgatgaaccaggcacgccacgccagctcgggggtgaagctggaggtgaacgagaggatcctcaactcctgcacagacctgatgaaggctatccggctcctggtgacgacatccactagcctgcagaaggagatcgtggagagcggcaggggggcagccacgcagcaggaattttacgccaagaactcgcgctggaccgaaggcctcatctcggcctccaaggctgtgggctggggagccacacagctggtggaggcagctgacaaggtggtgcttcacacgggcaagtatgaggagctcatcgtctgctcccacgagatcgcagccagcacggcccagctggtggcggcctccaaggtgaaggccaacaagcacagcccccacctgagccgcctgcaggaatgttctcgcacagtcaatgagagggctgccaatgtggtggcctccaccaagtcaggccaggagcagattgaggacagagacaccatggatttctccggcctgtccctcatcaagctgaagaagcaggagatggagacgcaggtgcgtgtcctggagctggagaagacgctggaggctgaacgcatgcggctgggggagttgcggaagcaacactacgtgctggctggggcatcaggcagccctggagaggaggtggccatccggcccagcactgccccccgaagtgtaaccaccaagaaaccacccctggcccagaagcccagcgtggcccccagacaggaccaccagcttgacaaaaaggatggcatctacccagctcaactcgtgaactactaggccccccaggggtccagcagggtggctggtgacaggcctgggcctctgcaactgccctgacaggaccgagaggccttgcccctccacctggtgcccaagcctcccgccccaccgtctggatcaatgtcctcaaggcccctggcccttactgagcctgcagggtcctgggccatgtgggtggtgcttctggatgtgagtctcttatttatctgcagaaggaactttggggtgcagccaggacccggtaggcctgagcctcaactcttcagaaaatagtgtttttaatattcctcttcagaaaatagtgtttttaatattccgagctagagctcttcttcctacgtttgtagtcagcacactgggaaaccgggccagcgtggggctccctgccttctggactcctgaaggtcgtggatggatggaaggcacacagcccgtgccggctgatgggacgagggtcaggcatcctgtctgtggccttctggggcaccgattctaccaggccctccagctgcgtggtctccgcagaccaggctctgtgtgggctagaggaatgtcgcccattactcctcaggcctggccctcgggcctccgtgatgggagccccccaggaggggtcagatgctggaaggggccgctttctggggagtgaggtgagacatagcggcccaggcgctgccttcactcctggagtttccatttccagctggaatctgcagccacccccatttcctgttttccattcccccgttctggccgcgccccactgcccacctgaaggggtggtttccagccctccggagagtgggcttggccctaggccctccagctcagccagaaaaagcccagaaacccaggtgctggaccagggccctcagggaggggaccctgcggctagagtgggctaggccctggctttgcccgtcagatttgaacgaatgtgtgtcccttgagcccaaggagagcggcaggaggggtgggaccaggctgggaggacagagccagcagctgccatgccctcctgctccccccaccccagccctagccctttagcctttcaccctgtgctctggaaaggctaccaaatactggccaaggtcaggaggagcaaaaatgagccagcaccagcgccttggctttgtgttagcatttcctcctgaagtgttctgttggcaataaaatgcactttgactgttaaaattgtcactgatg

SEQ ID NO: 62002 - DNA, 4654 bp, Homo sapiens
ggaggggcgtgccctggagttgggggcggggcgaggcgggctcctccccggcgggcgggcccgggcgcggcgcggtggcctcgcggtgcctaggctggggctgccggaccgtgaggctgtgagtcgcgcggacggagccggacaaaagcgggcggcggcggcaggatgaacagcatcaagaacgtgccggcgcgggtgctgagccgcaggccgggccacagcctggaggccgagcgcgagcagttcgacaagacccaggccatcagcatcagcaaagccatcaacacccaggaggcccccgtgaaggagaagcacgcccggcgcatcattctgggcacacaccacgagaagggggctttcaccttctggtcctatgccattgggctgccgctgcccagcagctccattctcagctggaagttctgccacgtcctccacaaggtccttcgagacgggcaccccaatgtgctgcatgactgccagcggtaccgcagcaacatccgggagattggagacctgtggggacatttgcatgaccgctacggacagctggtgaatgtctacaccaagctgctgctgaccaagatctccttccacctcaagcatccccagtttcccgcgggcctggaggtgacagatgaggtactggagaaggcagctgggaccgatgtcaacaacatcttccagctcactgtggagatgtttgattacatggattgtgagctgaagctttctgaatcagttttccgacagctcaacacggccatcgccgtatcccagatgtcctcaggccagtgccgcctggcccccctcatccaggtcatccaggactgcagccacctctaccactacacggtcaagctcctgttcaagctacactcttgtctccctgcggacaccctgcaaggccacagggaccggttccacgagcagtttcacagcctcaggaacttcttccgcagagcctccgacatgctgtacttcaagcggctcatccagatcccccggctgcccgagggaccccctaacttcctgcgggcctcagccctggctgagcacatcaagccggtggtggtgatccccgaggaggccccggaagatgaggagccggagaatctcattgagatcagcacagggccccccgcgggggagccagtggtggtggctgacctcttcgatcagacgtttggaccccccaatgggtctgtgaaggacgacagggacctccagattgagagcttgaagagagaggtggaaatgctccgctctgaactggagaagatcaagctggaggcccagcggtacatcgcgcagctgaagagccaggtgaatgcactggagggtgagctggaggagcagcggaagcagaagcagaaggccctggtggataatgagcagctccgccacgagctggcccagctgagggctgcccagctggagggcgagcggagccagggcctgcgtgaggaggctgagaggaaggccagtgccacggaggcgcgctacaacaagctgaaggaaaagcacagtgagctcgtccatgtgcacgcggagctgctcagaaagaacgcggacacagccaagcagctgacggtgacgcagcaaagccaggaggaggtggcgcgggtgaaggagcagctggccttccaggtggagcaggtgaagcgggagtcggagttgaagctagaggagaagagcgaccagctggagaagctcaagagggagctggaggccaaggccggagagctggcccgcgcgcaggaggccctgagccacacagagcagagcaagtcggagctgagctcacggctggacacgctgagtgcggagaaggatgctctgagtggagctgtgcggcagcgggaggcagacctgctggcggcgcagagcctggtgcgcgagacagaggcggcgctgagccgggagcagcagcgcagctcccaggagcagggcgagttgcagggccggctggcagagagggagtctcaggagcaggggctgcggcagaggctgctggacgagcagttcgcagtgttgcggggcgctgctgccgaggccgcgggcatcctgcaggatgccgtgagcaagctggacgaccccctgcacctgcgctgtaccagctccccagactacctggtgagcagggcccaggaggccttggatgccgtgagcaccctggaggagggccacgcccagtacctgacctccttggcagacgcctccgccctggtggcagctctgacccgcttctcccacctggctgcggataccatcatcaatggcggtgccacctcgcacctggctcccaccgaccctgccgaccgcctcatagacacctgcagggagtgcggggcccgggctctggagctcatggggcagctgcaggaccagcaggctctgcggcacatgcaggccagcctggtgcggacacccctgcagggcatccttcagctgggccaggaactgaaacccaagagcctagatgtgcggcaggaggagctgggggccgtggtcgacaaggagatggcggccacatccgcagccattgaagatgctgtgcggaggattgaggacatgatgaaccaggcacgccacgccagctcgggggtgaagctggaggtgaacgagaggatcctcaactcctgcacagacctgatgaaggtgaggggctgtgacccgggggggtctgcacctggagggccaccagtcattgctgtcttggtctcggcaggctatccggctcctggtgacgacatccactagcctgcagaaggagatcgtggagagcggcaggggggcagccacgcagcaggaattttacgccaagaactcgcgctggaccgaaggcctcatctcggcctccaaggctgtgggctggggagccacacagctggtggaggcagctgacaaggtggtgcttcacacgggcaagtatgaggagctcatcgtctgctcccacgagatcgcagccagcacggcccagctggtggcggcctccaaggtgaaggccaacaagcacagcccccacctgagccgcctgcaggaatgttctcgcacagtcaatgagagggctgccaatgtggtggcctccaccaagtcaggccaggagcagattgaggacagagacaccatggatttctccggcctgtccctcatcaagctgaagaagcaggagatggagacgcaggtgcgtgtcctggagctggagaagacgctggaggctgaacgcatgcggctgggggagttgcggaagcaacactacgtgctggctggggcatcaggcagccctggagaggaggtggccatccggcccagcactgccccccgaagtgtaaccaccaagaaaccacccctggcccagaagcccagcgtggcccccagacaggaccaccagcttgacaaaaaggatggcatctacccagctcaactcgtgaactactaggccccccaggggtccagcagggtggctggtgacaggcctgggcctctgcaactgccctgacaggaccgagaggccttgcccctccacctggtgcccaagcctcccgccccaccgtctggatcaatgtcctcaaggcccctggcccttactgagcctgcagggtcctgggccatgtgggtggtgcttctggatgtgagtctcttatttatctgcagaaggaactttggggtgcagccaggacccggtaggcctgagcctcaactcttcagaaaatagtgtttttaatattcctcttcagaaaatagtgtttttaatattccgagctagagctcttcttcctacgtttgtagtcagcacactgggaaaccgggccagcgtggggctccctgccttctggactcctgaaggtcgtggatggatggaaggcacacagcccgtgccggctgatgggacgagggtcaggcatcctgtctgtggccttctggggcaccgattctaccaggccctccagctgcgtggtctccgcagaccaggctctgtgtgggctagaggaatgtcgcccattactcctcaggcctggccctcgggcctccgtgatgggagccccccaggaggggtcagatgctggaaggggccgctttctggggagtgaggtgagacatagcggcccaggcgctgccttcactcctggagtttccatttccagctggaatctgcagccacccccatttcctgttttccattcccccgttctggccgcgccccactgcccacctgaaggggtggtttccagccctccggagagtgggcttggccctaggccctccagctcagccagaaaaagcccagaaacccaggtgctggaccagggccctcagggaggggaccctgcggctagagtgggctaggccctggctttgcccgtcagatttgaacgaatgtgtgtcccttgagcccaaggagagcggcaggaggggtgggaccaggctgggaggacagagccagcagctgccatgccctcctgctccccccaccccagccctagccctttagcctttcaccctgtgctctggaaaggctaccaaatactggccaaggtcaggaggagcaaaaatgagccagcaccagcgccttggctttgtgttagcatttcctcctgaagtgttctgttggcaataaaatgcactttgactgttaaaattgtcactgatg

SEQ ID NO: 62003 - DNA, 4478 bp, Homo sapiens
ggaggggcgtgccctggagttgggggcggggcgaggcgggctcctccccggcgggcgggcccgggcgcggcgcggtggcctcgcggtgcctaggctggggctgccggaccgtgaggctgtgagtcgcgcggacggagccggacaaaagcgggcggcggcggcaggatgaacagcatcaagaacgtgccggcgcgggtgctgagccgcaggccgggccacagcctggaggccgagcgcgagcagttcgacaagacccaggccatcagcatcagcaaagccatcaacacccaggaggcccccgtgaaggagaagcacgcccggcgcatcattctgggcacacaccacgagaagggggctttcaccttctggtcctatgccattgggctgccgctgcccagcagctccattctcagctggaagttctgccacgtcctccacaaggtccttcgagacgggcaccccaatgtgctgcatgactgccagcggtaccgcagcaacatccgggagattggagacctgtggggacatttgcatgaccgctacggacagctggtgaatgtctacaccaagctgctgctgaccaagatctccttccacctcaagcatccccagtttcccgcgggcctggaggtgacagatgaggtactggagaaggcagctgggaccgatgtcaacaacatcttccagctcactgtggagatgtttgattacatggattgtgagctgaagctttctgaatcagttttccgacagctcaacacggccatcgccgtatcccagatgtcctcaggccagtgccgcctggcccccctcatccaggtcatccaggactgcagccacctctaccactacacggtcaagctcctgttcaagctacactcttgtctccctgcggacaccctgcaaggccacagggaccggttccacgagcagtttcacagcctcaggaacttcttccgcagagcctccgacatgctgtacttcaagcggctcatccagatcccccggctgcccgagggaccccctaacttcctgcgggcctcagccctggctgagcacatcaagccggtggtggtgatccccgaggaggccccggaagatgaggagccggagaatctcattgagatcagcacagggccccccgcgggggagccagtggtggtggctgacctcttcgatcagacgtttggaccccccaatgggtctgtgaaggacgacagggacctccagattgagagcttgaagagagaggtggaaatgctccgctctgaactggagaagatcaagctggaggcccagcggtacatcgcgcagctgaagagccaggtgaatgcactggagggtgagctggaggagcagcggaagcagaagcagaaggccctggtggataatgagcagctccgccacgagctggcccagctgagggctgcccagctggagggcgagcggagccagggcctgcgtgaggaggctgagaggaaggccagtgccacggaggcgcgctacaacaagctgaaggaaaagcacagtgagctcgtccatgtgcacgcggagctgctcagaaagaacgcggacacagccaagcagctgacggtgacgcagcaaagccaggaggaggtggcgcgggtgaaggagcagctggccttccaggtggagcaggtgaagcgggagtcggagttgaagctagaggagaagagcgaccagctggagaagctcaagagggagctggaggccaaggccggagagctggcccgcgcgcaggaggccctgagccacacagagcagagcaagtcggagctgagctcacggctggacacgctgagtgcggagaaggatgctctgagtggagctgtgcggcagcgggaggcagacctgctggcggcgcagagcctggtgcgcgagacagaggcggcgctgagccgggagcagcagcgcagctcccaggagcagggcgagttgcagggccggctggcagagagggagtctcaggagcaggggctgcggcagaggctgctggacgagcagttcgcagtgttgcggggcgctgctgccgaggccgcgggcatcctgcaggatgccgtgagcaagctggacgaccccctgcacctgcgctgtaccagctccccagactacctggtgagcagggcccaggaggccttggatgccgtgagcaccctggaggagggccacgcccagtacctgacctccttggcagacgcctccgccctggtggcagctctgacccgcttctcccacctggctgcggataccatcatcaatggcggtgccacctcgcacctggctcccaccgaccctgccgaccgcctcatagacacctgcagggagtgcggggcccgggctctggagctcatggggcagctgcaggaccagcaggctctgcggcacatgcaggccagcctggtgcggacacccctgcagggcatccttcagctgggccaggaactgaaacccaagagcctagatgtgcggcaggaggagctgggggccgtggtcgacaaggagatggcggccacatccgcagccattgaagatgctgtgcggaggattgaggacatgatgaaccaggcacgccacgccagctcgggggtgaagctggaggtgaacgagaggatcctcaactcctgcacagacctgatgaaggctatccggctcctggtgacgacatccactagcctgcagaaggagatcgtggagagcggcaggggggcagccacgcagcaggaattttacgccaagaactcgcgctggaccgaaggcctcatctcggcctccaaggctgtgggctggggagccacacagctggtggaggcagctgacaaggtggtgcttcacacgggcaagtatgaggagctcatcgtctgctcccacgagatcgcagccagcacggcccagctggtggcggcctccaaggtgaaggccaacaagcacagcccccacctgagccgcctgcaggaatgttctcgcacagtcaatgagagggctgccaatgtggtggcctccaccaagtcaggccaggagcagattgaggacagagacaccatggatttctccggcctgtccctcatcaagctgaagaagcaggagatggagacgcaggtgcgtgtcctggagctggagaagacgctggaggctgaacgcatgcggctgggggagttgcggaagcaacactacgtgctggctggggcatcaggcagccctggagaggaggtggccatccggcccagcactgccccccgaagtgtaaccaccaagaaaccacccctggcccagaagcccagcgtggcccccagacaggaccaccagcttgacaaaaaggatggcatctacccagctcaactcgtgaactactaggccccccaggggtccagcagggtggctggtgacaggcctgggcctctgcaactgccctgacaggaccgagaggccttgcccctccacctggtgcccaagcctcccgccccaccgtctggatcaatgtcctcaaggcccctggcccttactgagcctgcagggtcctgggccatgtgggtggtgcttctggatgtgagtctcttatttatctgcagaaggaactttggggtgcagccaggacccgtcagcacactgggaaaccgggccagcgtggggctccctgccttctggactcctgaaggtcgtggatggatggaaggcacacagcccgtgccggctgatgggacgagggtcaggcatcctgtctgtggccttctggggcaccgattctaccaggccctccagctgcgtggtctccgcagaccaggctctgtgtgggctagaggaatgtcgcccattactcctcaggcctggccctcgggcctccgtgatgggagccccccaggaggggtcagatgctggaaggggccgctttctggggagtgaggtgagacatagcggcccaggcgctgccttcactcctggagtttccatttccagctggaatctgcagccacccccatttcctgttttccattcccccgttctggccgcgccccactgcccacctgaaggggtggtttccagccctccggagagtgggcttggccctaggccctccagctcagccagaaaaagcccagaaacccaggtgctggaccagggccctcagggaggggaccctgcggctagagtgggctaggccctggctttgcccgtcagatttgaacgaatgtgtgtcccttgagcccaaggagagcggcaggaggggtgggaccaggctgggaggacagagccagcagctgccatgccctcctgctccccccaccccagccctagccctttagcctttcaccctgtgctctggaaaggctaccaaatactggccaaggtcaggaggagcaaaaatgagccagcaccagcgccttggctttgtgttagcatttcctcctgaagtgttctgttggcaataaaatgcactttgactgttaaaattgtcactgatg

SEQ ID NO: 62004 - DNA, 4530 bp, Homo sapiens
ggaggggcgtgccctggagttgggggcggggcgaggcgggctcctccccggcgggcgggcccgggcgcggcgcggtggcctcgcggtgcctaggctggggctgccggaccgtgaggctgtgagtcgcgcggacggagccggacaaaagcgggcggcggcggcaggatgaacagcatcaagaacgtgccggcgcgggtgctgagccgcaggccgggccacagcctggaggccgagcgcgagcagttcgacaagacccaggccatcagcatcagcaaagccatcaacacccaggaggcccccgtgaaggagaagcacgcccggcgcatcattctgggcacacaccacgagaagggggctttcaccttctggtcctatgccattgggctgccgctgcccagcagctccattctcagctggaagttctgccacgtcctccacaaggtccttcgagacgggcaccccaatgtgctgcatgactgccagcggtaccgcagcaacatccgggagattggagacctgtggggacatttgcatgaccgctacggacagctggtgaatgtctacaccaagctgctgctgaccaagatctccttccacctcaagcatccccagtttcccgcgggcctggaggtgacagatgaggtactggagaaggcagctgggaccgatgtcaacaacatcttccagctcactgtggagatgtttgattacatggattgtgagctgaagctttctgaatcagttttccgacagctcaacacggccatcgccgtatcccagatgtcctcaggccagtgccgcctggcccccctcatccaggtcatccaggactgcagccacctctaccactacacggtcaagctcctgttcaagctacactcttgtctccctgcggacaccctgcaaggccacagggaccggttccacgagcagtttcacagcctcaggaacttcttccgcagagcctccgacatgctgtacttcaagcggctcatccagatcccccggctgcccgagggaccccctaacttcctgcgggcctcagccctggctgagcacatcaagccggtggtggtgatccccgaggaggccccggaagatgaggagccggagaatctcattgagatcagcacagggccccccgcgggggagccagtggtggtggctgacctcttcgatcagacgtttggaccccccaatgggtctgtgaaggacgacagggacctccagattgagagcttgaagagagaggtggaaatgctccgctctgaactggagaagatcaagctggaggcccagcggtacatcgcgcagctgaagagccaggtgaatgcactggagggtgagctggaggagcagcggaagcagaagcagaaggccctggtggataatgagcagctccgccacgagctggcccagctgagggctgcccagctggagggcgagcggagccagggcctgcgtgaggaggctgagaggaaggccagtgccacggaggcgcgctacaacaagctgaaggaaaagcacagtgagctcgtccatgtgcacgcggagctgctcagaaagaacgcggacacagccaagcagctgacggtgacgcagcaaagccaggaggaggtggcgcgggtgaaggagcagctggccttccaggtggagcaggtgaagcgggagtcggagttgaagctagaggagaagagcgaccagctggagaagctcaagagggagctggaggccaaggccggagagctggcccgcgcgcaggaggccctgagccacacagagcagagcaagtcggagctgagctcacggctggacacgctgagtgcggagaaggatgctctgagtggagctgtgcggcagcgggaggcagacctgctggcggcgcagagcctggtgcgcgagacagaggcggcgctgagccgggagcagcagcgcagctcccaggagcagggcgagttgcagggccggctggcagagagggagtctcaggagcaggggctgcggcagaggctgctggacgagcagttcgcagtgttgcggggcgctgctgccgaggccgcgggcatcctgcaggatgccgtgagcaagctggacgaccccctgcacctgcgctgtaccagctccccagactacctggtgagcagggcccaggaggccttggatgccgtgagcaccctggaggagggccacgcccagtacctgacctccttggcagacgcctccgccctggtggcagctctgacccgcttctcccacctggctgcggataccatcatcaatggcggtgccacctcgcacctggctcccaccgaccctgccgaccgcctcatagacacctgcagggagtgcggggcccgggctctggagctcatggggcagctgcaggaccagcaggctctgcggcacatgcaggccagcctggtgcggacacccctgcagggcatccttcagctgggccaggaactgaaacccaagagcctagatgtgcggcaggaggagctgggggccgtggtcgacaaggagatggcggccacatccgcagccattgaagatgctgtgcggaggattgaggacatgatgaaccaggcacgccacgccagctcgggggtgaagctggaggtgaacgagaggatcctcaactcctgcacagacctgatgaaggctatccggctcctggtgacgacatccactagcctgcagaaggagatcgtggagagcggcaggggggcagccacgcagcaggaattttacgccaagaactcgcgctggaccgaaggcctcatctcggcctccaaggctgtgggctggggagccacacagctggtggaggcagctgacaaggtggtgcttcacacgggcaagtatgaggagctcatcgtctgctcccacgagatcgcagccagcacggcccagctggtggcggcctccaaggtgaaggccaacaagcacagcccccacctgagccgcctgcaggaatgttctcgcacagtcaatgagagggctgccaatgtggtggcctccaccaagtcaggccaggagcagattgaggacagagacaccatggatttctccggcctgtccctcatcaagctgaagaagcaggagatggagacgcaggtgcgtgtcctggagctggagaagacgctggaggctgaacgcatgcggctgggggagttgcggaagcaacactacgtgctggctggggcatcaggcagccctggagaggaggtggccatccggcccagcactgccccccgaagtgtaaccaccaagaaaccacccctggcccagaagcccagcgtggcccccagacaggaccaccagcttgacaaaaaggatggcatctacccagctcaactcgtgaactactaggccccccaggggtccagcagggtggctggtgacaggcctgggcctctgcaactgccctgacaggaccgagaggccttgcccctccacctggtgcccaagcctcccgccccaccgtctggatcaatgtcctcaaggcccctggcccttactgagcctgcagggtcctgggccatgtgggtggtgcttctggatgtgagtctcttatttatctgcagaaggaactttggggtgcagccaggacccggtaggcctgagcctcaactcttcagaaaatagtgtttttaatattcctcttcagaaaatagtgtttttaatattccgagctagagctcttcttcctacgtttgtagtcagcacactgggaaaccgggccagcgtggggctccctgccttctggactcctgaaggtcgtggatggatggaaggcacacagcccgtgccggctgatgggacgagggtcaggcatcctgtctgtggccttctggggcaccgattctaccaggccctccagctgcgtggtctccgcagaccaggctctgtgtgggctagaggaatgtcgcccattactcctcaggcctggccctcgggcctccgtgatgggagccccccaggaggggtcagatgctggaaggggccgctttctggggagtgaggtgagacatagcggcccaggcgctgccttcactcctggagtttccatttccagctggaatctgcagccacccccatttcctgttttccattcccccgttctggccgcgccccactgcccacctgaaggggtggtttccagccctccggagagtgggcttggccctaggccctccagctcagccagagctagagtgggctaggccctggctttgcccgtcagatttgaacgaatgtgtgtcccttgagcccaaggagagcggcaggaggggtgggaccaggctgggaggacagagccagcagctgccatgccctcctgctccccccaccccagccctagccctttagcctttcaccctgtgctctggaaaggctaccaaatactggccaaggtcaggaggagcaaaaatgagccagcaccagcgccttggctttgtgttagcatttcctcctgaagtgttctgttggcaataaaatgcactttgactgttaaaattgtcactgatg

SEQ ID NO: 62005 - DNA, 2279 bp, Homo sapiens
ggaggggcgtgccctggagttgggggcggggcgaggcgggctcctccccggcgggcgggcccgggcgcggcgcggtggcctcgcggtgcctaggctggggctgccggaccgtgaggctgtgagtcgcgcggacggagccggacaaaagcgggcggcggcggcaggatgaacagcatcaagaacgtgccggcgcgggtgctgagccgcaggccgggccacagcctggaggccgagcgcgagcagttcgacaagacccaggccatcagcatcagcaaagccatcaacacccaggaggcccccgtgaaggagaagcacgcccggcgcatcattctgggcacacaccacgagaagggggctttcaccttctggtcctatgccattgggctgccgctgcccagcagctccattctcagctggaagttctgccacgtcctccacaaggtccttcgagacgggcaccccaatgtgctgcatgactgccagcggtaccgcagcaacatccgggagattggagacctgtggggacatttgcatgaccgctacggacagctggtgaatgtctacaccaagctgctgctgaccaagatctccttccacctcaagcatccccagtttcccgcgggcctggaggtgacagatgaggtactggagaaggcagctgggaccgatgtcaacaacatcttccagctcactgtggagatgtttgattacatggattgtgagctgaagctttctgaatcagttttccgacagctcaacacggccatcgccgtatcccagatgtcctcaggccagtgccgcctggcccccctcatccaggtcatccaggactgcagccacctctaccactacacggtcaagctcctgttcaagctacactcttgtctccctgcggacaccctgcaaggccacagggaccggttccacgagcagtttcacagcctcaggaacttcttccgcagagcctccgacatgctgtacttcaagcggctcatccagatcccccggctgcccgagggaccccctaacttcctgcgggcctcagccctggctgagcacatcaagccggtggtggtgatccccgaggaggccccggaagatgaggagccggagaatctcattgagatcagcacagggccccccgcgggggagccagtggtggtggctgacctcttcgatcagacgtttggaccccccaatgggtctgtgaaggacgacagggacctccagattgagagcttgaagagagaggtggaaatgctccgctctgaactggagaagatcaagctggaggcccagcggtacatcgcgcagctgaagagccaggtgaatgcactggagggtgagctggaggagcagcggaagcagaagcagaaggccctggtggataatgagcagctccgccacgagctggcccagctgagggctgcccagctggagggcgagcggagccagggcctgcgtgaggaggctgagaggaaggccagtgccacggaggcgcgctacaacaagctgaaggaaaagcacagtgagctcgtccatgtgcacgcggagctgctcagaaagaacgcggacacagccaagcagctgacggtgacgcagcaaagccaggaggaggtggcgcgggtgaaggagcagctggccttccaggtggagcaggtgaagcgggagtcggagttgaagctagaggagaagagcgaccagctggagaagctcaagagggagctggaggccaaggccggagagctggcccgcgcgcaggaggccctgagccacacagagcagagcaagtcggagctgagctcacggctggacacgctgagtgcggagaaggatgctctgagtggagctgtgcggcagcgggaggcagacctgctggcggcgcagagcctggtgcgcgagacagaggcggcgctgagccgggagcagcagcgcagctcccaggagcagggcgagttgcagggccggctggcagagagggtatggcctccccagatgcagcagcaccactgagttcactgccgtctggcaaccatcgatctgtctccgtcatctgcctgttctagagatttcatgtaaacgggatcatacacgatgcatccttttgtgtccggcttcttcactcagcatcacgttgtcaagggtcaccacatcatagcctgtgtcattacctcattccttttatggctgagtcgtactctgccgtgtggacagaccacattgtgtttatctgttcatcacttggtggacattgggtttgttgcaactttctggctgtt

SEQ ID NO: 62006 - DNA, 878 bp, Homo sapiens
ggggccccaggtgcctggctgtgaccactgaccccccacctttaacccctgcagcttgacaaaaaggatggcatctacccagctcaactcgtgaactactaggccccccaggggtccagcagggtggctggtgacaggcctgggcctctgcaactgccctgacaggaccgagaggccttgcccctccacctggtgcccaagcctcccgccccaccgtctggatcaatgtcctcaaggcccctggcccttactgagcctgcagggtcctgggccatgtgggtggtgcttctggatgtgagtctcttatttatctgcagaaggaactttggggtgcagccaggacccggtaggcctgagcctcaactcttcagaaaatagtgtttttaatattcctcttcagaaaatagtgtttttaatattccgagctagagctcttcttcctacgtttgtagtcagcacactgggaaaccgggccagcgtggggctccctgccttctggactcctgaaggtcgtggatggatggaaggcacacagcccgtgccggctgatgggacgagggtcaggcatcctgtctgtggccttctggggcaccgattctaccaggccctccagctgcgtggtctccgcagaccaggctctgtgtgggctagaggaatgtcgcccattactcctcaggcctggccctcgggcctccgtgatgggagccccccaggaggggtcagatgctggaaggggccgctttctggggagtgaggtgagacatagcggcccaggcgctgccttcactcctggagtttccatttccagctggaatctgcagccacccccatttcctgttttccattcccccgttctggccgcgccccactgcccacct

SEQ ID NO: 62007 - DNA, 431 bp, Homo sapiens
gtaaagataagaagcaggacttgccaccgcattgtaagagaaagtttaccagcatcaattaattaaaatagaaggcagccaatcggcattgggcacaagggaatgatgcttgtattggagcatgatgaagagatgtcagctttgtctcagcaccaacatcactattaacacttgctatctgtcaccaatcagcaatctgttcctgatgtaatcgagagttccaaagcacagctcaattcttccacctctctgagaagagtggtgtgtaggccttctgacagtgggagaaagttgcactctttgggactcagtttcttctcaaaactcattcagaaatcatcacgtgtcactgttagctaggtccaggatgtttgaataagaattgtggttatattatagtaaattgtgtaaaaaatcagttagttatgggt

SEQ ID NO: 62008 - DNA, 467 bp, Homo sapiens
ggtgaattaaaagtgcagagtctgtatgtagcacagtgtcagtttgggagggaaggaaggcagcatcaaatcgttgttgaggttttgatgatgtgaagctctttagtctacctttctcctttccttaatatctaaagggagaaattccaagttgttatgtcttgagcagagcacatgacacctccttattaaccagcactactttttagctataggttgaaatttggctcgtggttcttcaagattttaagaaatagtaaataggagagttaaggatttggtatgtgaaaatatcaaacctgaatctagatgcatgaatctgatcaagcatctagagctcactactaatttactggaaatacagggggcagaggaatatgttaaattacacctcaagggtacaattaccaaataccatctgtgggaaactgcaagacaacccagtttcttccaataaatgaattgcc

SEQ ID NO: 62009 - DNA, 322 bp, Homo sapiens
atattacattgatgtcagtctttaaagatggagtaggactttgcaggcagcaacgaaagggaaggacatttcagaagcagaaataccatttgttaagggatgacagccaagaaatattaaagcatatttggaaagtattgaaaatctctgtgtggctagaactttagatgaagaatcagatacatctggagaaggagattgaaccagatgatcataaagaacattttatttaggccatggtaaggcttgggcactgtggagcccatgaaggtttttggacaagggagttgccttaggaaggagtatgaagccataaacaaat

SEQ ID NO: 62010 - DNA, 270 bp, Homo sapiens
tcaagtctcaacattctttcaatctaaaacagtcctcccaccagccctccttccccagccctttttaaatccatagcattgaagagaccaggtcattgtcttatagaatatccttcattttagatttgcctgattgtgtcttcattccctaaacttcctataaaccagcagttggatttaaagccttgataagacccaggtggaggatttttggcaagaacacattccagttgacactgtgtacttacttacttcatgttgtaactcata

SEQ ID NO: 62011 - DNA, 620 bp, Homo sapiens
aacaactccagacgcgctgccttaagagctgtaacactcaccgcgaaggtctgcagcttcactcctgatccagcgagaccagagaccacgaacccaccagaaggaagaaactccgaacacatctgaacatcacaagggacagactccagatgcgccaccttaagagctgtaacactcaccgcgagggtccgcagcttcattcttgaagtcagtgagaccaagaacccaccaattccggacacaggatgactacagttaacaatgatttattgtacatttcaaaatagctagaagagaagatttgacatgtttctaactcaaagaaatgccaaatgttgagctgatggatatcctgattaccctgatttgatcatcacacattgcatgcatgtattagaacatcacatgtacctataaatatgtatattattatgtatcaatttttttaaaaaagaaacaaatgtctattatgagttcttagcactgagtagatgcccaatgaccataagctatcattattaacaccagtttgttgatacattataaatacaagaaattatgttcctccataccacatacatagaagatacttaaaaatacattcaccaaaaaaaaaaact

SEQ ID NO: 62012 - DNA, 514 bp, Homo sapiens
tggaggactattctgccattaggaaaattacctttgaattccactaacgatacaatgcaagatattgagatgctttcatacatgaacatataccactgtctttggggaaacaaggttttttttcactaagcatttaaaatgcacaatggcccaaaattgatggacatataactgctggaagtttgcaaaagtttggcagaatgtagttcagtgtgtgcatacgtgtgctggggagtagagcgtaggtgtacatgcaggaaaagctccttgagtcagtcagagctatattttaagggcttgctggtgagtatcttcactaacaaagtgagacaaggttgaaccacaattcctggcaataagaaaacaataagaaatgtgtttcttacaggtgtgaggcactgtgcctcacacctataatcccagcaatttgagaggctgagatgggtggattgcttgaggctaagagtttgagaccaacctggacaacactgtgaaaccttgtctttaccaaaaa

SEQ ID NO: 62013 - DNA, 476 bp, Homo sapiens
tcaatttcatttagttctgctctgatcttggttatttcctttcttctgctgggtttgggtttggtttgttctagttccctagttccttgagttgtgaccttagattgtctgtttgtgctctttcagaatttttgatgtaggcatttagggcaatgaactatcctcttagcaccaccttagctgtatcccagaggttttgataggttgggtcattattgtctttcagttcaagaattttttaatttccatcttgattttgtttttgacccatagctcattcaggagcaggttatttaatttccaaaccctaagtgttcccccagaaaactgctagaactgattatataattcagcaaagtttcaagatactggatgaatgtacacagatcagtagctcttctatgcatctacagtgaccaagcagagaatcaaatcaagaactcaaccacttttacaacagctgcaaaaaaaataaa

SEQ ID NO: 62014 - DNA, 615 bp, Homo sapiens
ttctcgttaaagtgtattccatttcttttgtgctttcatattgaccattgtgtgttaatcctttcaattggaagaagagggagacagtgccagttattgcaaactttcacagtccacaggcccgatatgtagccttcaccacccacaggttctgccacttctggggcattatattccatcaagatccaggcacccgccatccacataccagccctggaactcgtcccttctcccagacttggaaacgccacctctgcctgaccaatgtcgagccacttcctcatcttgatacatcagccactatcctttccatctttcaggcaactccagcttaatttctcgatggccttgcccttctaaaaggccgttctcttttcccagatgactttttcctatcccctccacagtaactcccctcatccttccagtctcaattcaattgttccttggtggggtggggcggggggagccttcttaaaccctcctccctcacaactgcatgaggtcccttgtctctaatataagctcctgtagcaccatggcacttatcccagttgagattttaaatatatttctgtgtatttgattaaagtttctctcctccaaaaaaaaaaa

SEQ ID NO: 62015 - DNA, 365 bp, Homo sapiens
cagtagagacggggtttcactgtgttagccaggatggtctcaatctcctgacctcgtgatccacccgcctcggcctcccaaagtgctaggattacaggcgtgggccaccgtgcctgtcccagtttcctcatttttaaatgaaagagctggaaatacctttaaaaggttgagggtctaatgaatcatcttcatgtacattcatagatagcattggctttcattgtgattatggtttttggtgagggcacatgggcttttaatacctggtcagtgatatagttaggaattgcagtttgtgacactttggccaaataatcatcaggaattgtgagtgatgctggtgaataatagctgtagtcagattt

SEQ ID NO: 62016 - DNA, 539 bp, Homo sapiens
actggtttcagatgctaagcctttactatacatgtctataattttatgacactagggtagtataagtacttagtaatatttatggtcctcactcatttctccctgcacattccatgcatgtaggtaatttttctacaacaaatagcttattcttttataaggaatgggaatggaaaggggtaattatcatttagttgcttggtactgtacttttatgtatgcaagggcagacctcttgccccacctttcaaaacagcattcctaaacatcacagtgcacccagagctgctgaacgagggcatgtgtgctgacccgaattattagcacatccatctgtccagcaacactatgaaatattttccatttttcacattacacatcttttatgtgaaaacacacacacccataatggcagctttaatcaacagggtagctgtggataagaattaacattgaccataatgatttcctttcacgtgttaatctaattctaaaattagtaacaataaaatagtgtggttaaataaatattttaaaaa

SEQ ID NO: 62017 - DNA, 872 bp, Homo sapiens
gtatttttagtagagatggggtttcaccacattggccaggctggtctcaaactcctgacctcaagtgatccacctaccttggcctaccgaggtgctggaattacaggtgtgagccaccgcgcctggcctaatactgctttattacaacgttatctgtgggtcggatccttttatattggttaacagatgaccctgactcagaataatctttttcaatggctttttgagggaagcttgtgaagttctggtgaatcttctttttcacttcactttcagtgagctgaaagtaaccaaactaaatacatgtattgtgtaaagggacaggacaagacagccttaaaaaattgaatatagttggtgagacaactcagaagtacaggtttgagcatcccttattcaaaatgcttgagaagtgttttgggttctggaatatttgcattaatgcttgccagttgagcatcccaggtccggaaatccagagtgctccaatgagcctttcccctgagtgtcacatctgtattggcactcaaaaagtttcatattttggagcatttcagatttcagatttgggatgcttcatctatattgacagctgcaagaacagaaaggaagaagagattatttttgtgggagaacagtttctcccatagtgtttcctgtggaatgctagtgtctcataaagtcttctaaaaaaaagaaaaaaaaaaatcaaatgtttggaagccattttgtgttactgtgtgactttcttttactcaaaaacagcaccataaaatttctgacaagtactataggtaaagaaatccctttatacttaacctagtattttctacctttccccatctaaaataaaatttttataccactttcta

SEQ ID NO: 62018 - DNA, 1071 bp, Homo sapiens
gtatttttagtagagatggggtttcaccacattggccaggctggtctcaaactcctgacctcaagtgatccacctaccttggcctaccgaggtgctggaattacaggtgtgagccaccgcgcctggcctaatactgctttattacaacgttatctgtgggtcggatccttttatattggttaacagatgaccctgactcagaataatctttttcaatggctttttgagggaagcttgtgaagttctggtgaatcttctttttcacttcactttcagtgagctgaaagtaaccaaactaaatacatgtattgtgtaaagggacaggacaagacagccttaaaaaattgaatatagttggtgagacaactcagaagtacaggtttgagcatcccttattcaaaatgcttgagaagtgttttgggttctggaatatttgcattaatgcttgccagttgagcatcccaggtccggaaatccagagtgctccaatgagcctttcccctgagtgtcacatctgtattggcactcaaaaagtttcatattttggagcatttcagatttcagatttgggatgcttcatctatattgacagctgcaagaacagaaaggaagaagagattatttttgtgggagaacagtttctcccatagtgtttcctgtggaatgctagtgtctcataaagtcttctaaaaaaaagaaaaaaaaaaatcaaatgtttggaagccattttgtgttactgtgtgactttcttttactcaaaaacagcaccataaaatttctgacaagtactataggtaaagaaatccctttatacttaacctagtattttctacctttccccatctaaaataaaatttttataccactttctaattatgttgtgtgtgcccactttccccatacctactgctaccatcttagagtaggcaattttctcaagaggattattccaagaacaccctaatgttttcctgcttccagtcttctttcctcaaatttattccacactcttaagaattgaagatgtaaatctgtcactcgcctgaataaagcttcagtggcctctgactt

SEQ ID NO: 62019 - DNA, 940 bp, Homo sapiens
gtatttttagtagagatggggtttcaccacattggccaggctggtctcaaactcctgacctcaagtgatccacctaccttggcctaccgaggtgctggaattacaggtgtgagccaccgcgcctggcctaatactgctttattacaacgttatctgtgggtcggatccttttatattggttaacagatgaccctgactcagaataatctttttcaatggctttttgagggaagcttgtgaagttctggtgaatcttctttttcacttcactttcagtgagctgaaagtaaccaaactaaatacatgtattgtgtaaagggacaggacaagacagccttaaaaaattgaatatagttggtgagacaactcagaagtacaggtttgagcatcccttattcaaaatgcttgagaagtgttttgggttctggaatatttgcattaatgttcatctatattgacagctgcaagaacagaaaggaagaagagattatttttgtgggagaacagtttctcccatagtgtttcctgtggaatgctagtgtctcataaagtcttctaaaaaaaagaaaaaaaaaaatcaaatgtttggaagccattttgtgttactgtgtgactttcttttactcaaaaacagcaccataaaatttctgacaagtactataggtaaagaaatccctttatacttaacctagtattttctacctttccccatctaaaataaaatttttataccactttctaattatgttgtgtgtgcccactttccccatacctactgctaccatcttagagtaggcaattttctcaagaggattattccaagaacaccctaatgttttcctgcttccagtcttctttcctcaaatttattccacactcttaagaattgaagatgtaaatctgtcactcgcctgaataaagcttcagtggcctctgactt

SEQ ID NO: 62020 - DNA, 723 bp, Homo sapiens
taaagctccagtagttaagacaccatatggcattggttctggagtagacaagtaggccagtggaagaaagctttatatacaaagaatcttggtccaccactgaggcagcattgatgtcaccaggcaaaggagatactggggttgcggaatctgggatattgactattcctaagatgaaaaaacaaattgagttcctaactcataccatagtcaaaaataaattgcagatgaatgggtaaataatatgtggtacacacatacaatgtaatattattcaacattaaaaaggaagggaattctgacacatgctaccacatggatgaacattctgctcagtgaaataaaccagatgcagacagacaaatactacattccgcttacatgagtacttagagtagtcaaactcatgggagacagaaagtagaatcacctggacaccgtggttcacacctggcatcccagcactttgggaggccaaggttggaggattgtttgagcccaggagtttgagagtagcctgggtaacatagtgtgatcctgtcactacaaaaaattaatgaaaaaattttaaaattagctgggcgtagtggcatgtgcctagttacagctattcaggaggctgaggcgggaggatcagttgagtctgcagtgagccagggtcaaggcactgcactccagcctgggggactgagcaagaccctgcctcaagggaaaaaaaaaaaa

SEQ ID NO: 62021 - DNA, 242 bp, Homo sapiens
atgtcctttctgcagatcaagccactgctgccggggggagggagcggggctggcccgagagcctggcccccctcagtttctccatctttgtatctgtcggtttctatggagtgcggtttttaatctgctccacgacgctctgtctcttgctgagttctggtccctccctatgggagattcaggttccaatcccaactctgtccccaaaacaaagtgctggggatgtgcttggccctcaaggc

SEQ ID NO: 62022 - DNA, 661 bp, Homo sapiens
cggggcggagcctagggaagcaaattctcctggcggcctccgttcagacgcggcagctgtgacccacctgcctcctccgcagagcaatggcggtgtctgccgggtccgcgcggacctcgcccagctcagataaagtacagaaagacaaggctgaactgatctcagggcccaggcaggacagccgaatagggaaactcttgggttttgagtggacagatttgtccagttggcggaggctggtgaccctgctgaatcgaccaacggaccctgcaagcttagctgtctttcgttttctttttgggttcttgatggtgctagacattccccaggagcgggggctcagctctctggaccggaaataccttgatgggctggatgtgtgccgcttccccttgctggatgccctacgcccactgccacttgactggatgtatcttgtctacaccatcatgtttctgggtgaggggaactgtgggaaatattgactggcctgccagaaacacagaaatagaagcatgctggtgaatggtcaaagtctttggcaccttatttcacttctgctgtgatcaatttcatgctgttgacctgtgtgtcacttaagctgtgatcccataattctttttaaaatattaaaataacatttaattttcaaaaagtttta

SEQ ID NO: 62023 - DNA, 3255 bp, Homo sapiens
cggggcggagcctagggaagcaaattctcctggcggcctccgttcagacgcggcagctgtgacccacctgcctcctccgcagagcaatggcggtgtctgccgggtccgcgcggacctcgcccagctcagataaagtacagaaagacaaggctgaactgatctcagggcccaggcaggacagccgaatagggaaactcttgggttttgagtggacagatttgtccagttggcggaggctggtgaccctgctgaatcgaccaacggaccctgcaagcttagctgtctttcgttttctttttgggttcttgatggtgctagacattccccaggagcgggggctcagctctctggaccggaaataccttgatgggctggatgtgtgccgcttccccttgctggatgccctacgcccactgccacttgactggatgtatcttgtctacaccatcatgtttctgggggcactgggcatgatgctgggcctgtgctaccggataagctgtgtgttattcctgctgccatactggtatgtgtttctcctggacaagacatcatggaacaaccactcctatctgtatgggttgttggcctttcagctaacattcatggatgcaaaccactactggtctgtggacggtctgctgaatgcccataggaggaatgcccacgtgcccctttggaactatgcagtgctccgtggccagatcttcattgtgtacttcattgcgggtgtgaaaaagctggatgcagactgggttgaaggctattccatggaatatttgtcccggcactggctcttcagtcccttcaaactgctgttgtctgaggagctgactagcctgctggtcgtgcactggggtgggctgctgcttgacctctcagctggtttcctgctcttttttgatgtctcaagatccattggcctgttctttgtgtcctacttccactgcatgaattcccagcttttcagcattggtatgttctcctacgtcatgctggccagcagccctctcttctgctcccctgagtggcctcggaagctggtgtcctactgcccccgaaggttgcaacaactgttgcccctcaaggcagcccctcagcccagtgtttcctgtgtgtataagaggagccggggcaaaagtggccagaagccagggctgcgccatcagctgggagctgccttcaccctgctctacctcctggagcagctattcctgccctattctcattttctcacccagggctataacaactggacaaatgggctgtatggctattcctgggacatgatggtgcactcccgctcccaccagcacgtgaagatcacctaccgtgatggccgcactggcgaactgggctaccttaaccctggggtatttacacagagtcggcgatggaaggatcatgcagacatgctgaagcaatatgccacttgcctgagccgcctgcttcccaagtataatgtcactgagccccagatctactttgatatttgggtctccatcaatgaccgcttccagcagaggatttttgaccctcgtgtggacatcgtgcaggccgcttggtcaccctttcagcgcacatcctgggtgcaaccactcttgatggacctgtctccctggagggccaagttacaggaaatcaagagcagcctagacaaccacactgaggtggtcttcattgcagatttccctggactgcacttggagaattttgtgagtgaagacctgggcaacactagcatccagctgctgcagggggaagtgactgtggagcttgtggcagaacagaagaaccagactcttcgagagggagaaaaaatgcagttgcctgctggtgagtaccataaggtgtatacgacatcacctagcccttcttgctacatgtacgtctatgtcaacactacagagcttgcactggagcaagacctggcatatctgcaagaattaaaggaaaaggtggagaatggaagtgaaacagggcctctacccccagagctgcagcctctgttggaaggggaagtaaaagggggccctgagccaacacctctggttcagacctttcttagacgccaacaaaggctccaggagattgaacgccggcgaaatactcctttccatgagcgattcttccgcttcttgttgcgaaagctctatgtctttcgccgcagcttcctgatgacttgtatctcacttcgaaatctgatattaggccgtccttccctggagcagctggcccaggaggtgacttatgcaaacttgagaccctttgaggcagttggagaactgaatccctcaaacacggattcttcacattctaatcctcctgagtcaaatcctgatcctgtccactcagagttctgaagggggccagatgttgggtgcagatgtagaagcagccagtcacagacccattctatgcaatggacatttatttgaaaaaaattctcaaaagttttttttttttttttgggggggcggggttctaaagctgtttttaactccgagattacaacttagaggaaccaaggaaataaagcaaataagatttaacaacccaagattaagaggccaggaagaggttagacgcaatgtgaaactgtcctcctaggataaggtttaaagtggctttttgggggctgggtgccgtggctcacgcctgtaatcccagcattttgggaggctgaggtgggcagatcacttgaggccaggagttcgagaccagcctggccaacatggcaaaaccccttctctactaaaaatacaaaaattagccagacgtggtggtgggtgcctgtaatccaactacccaggaggctgaggcatgagaatcgcttgggcccaggaggtggaggttgcagtgagccgagatcgagccactgcactcctgggcaacagagcaagacttcgtctcaaaataaataaataaagtggctcttggggaaaagcaatttaatgtaccacgatgaatagctaactgttcccaagtgtttgctatgtgcaacacaccgcgtgagcagtgttacctgcattattacattaggctgagaggtaaaataatttgcccgaagacatacagctagtgacgaatggactgatggtttgaacttaacgtctatttgacttaaggtcctgcaccctgccacttgtaattttcagaatcactgataatctgaaataatgcagcttaaaacatgttttcttaattaaaagtataattggatggtggtcaggttgtaaatgcacacaaagtaat

SEQ ID NO: 62024 - DNA, 3325 bp, Homo sapiens
tgaagtgaaaatggcgtgagggtgtgagagaggtttgggttaggaaacatgtttttagtgctatttccaaccaggggtcgcaaactcagcagcctgtagaaacaggggtgggaggtggggcggcagctgtgacccacctgcctcctccgcagagcaatggcggtgtctgccgggtccgcgcggacctcgcccagctcagataaagtacagaaagacaaggctgaactgatctcagggcccaggcaggacagccgaatagggaaactcttgggttttgagtggacagatttgtccagttggcggaggctggtgaccctgctgaatcgaccaacggaccctgcaagcttagctgtctttcgttttctttttgggttcttgatggtgctagacattccccaggagcgggggctcagctctctggaccggaaataccttgatgggctggatgtgtgccgcttccccttgctggatgccctacgcccactgccacttgactggatgtatcttgtctacaccatcatgtttctgggggcactgggcatgatgctgggcctgtgctaccggataagctgtgtgttattcctgctgccatactggtatgtgtttctcctggacaagacatcatggaacaaccactcctatctgtatgggttgttggcctttcagctaacattcatggatgcaaaccactactggtctgtggacggtctgctgaatgcccataggaggaatgcccacgtgcccctttggaactatgcagtgctccgtggccagatcttcattgtgtacttcattgcgggtgtgaaaaagctggatgcagactgggttgaaggctattccatggaatatttgtcccggcactggctcttcagtcccttcaaactgctgttgtctgaggagctgactagcctgctggtcgtgcactggggtgggctgctgcttgacctctcagctggtttcctgctcttttttgatgtctcaagatccattggcctgttctttgtgtcctacttccactgcatgaattcccagcttttcagcattggtatgttctcctacgtcatgctggccagcagccctctcttctgctcccctgagtggcctcggaagctggtgtcctactgcccccgaaggttgcaacaactgttgcccctcaaggcagcccctcagcccagtgtttcctgtgtgtataagaggagccggggcaaaagtggccagaagccagggctgcgccatcagctgggagctgccttcaccctgctctacctcctggagcagctattcctgccctattctcattttctcacccagggctataacaactggacaaatgggctgtatggctattcctgggacatgatggtgcactcccgctcccaccagcacgtgaagatcacctaccgtgatggccgcactggcgaactgggctaccttaaccctggggtatttacacagagtcggcgatggaaggatcatgcagacatgctgaagcaatatgccacttgcctgagccgcctgcttcccaagtataatgtcactgagccccagatctactttgatatttgggtctccatcaatgaccgcttccagcagaggatttttgaccctcgtgtggacatcgtgcaggccgcttggtcaccctttcagcgcacatcctgggtgcaaccactcttgatggacctgtctccctggagggccaagttacaggaaatcaagagcagcctagacaaccacactgaggtggtcttcattgcagatttccctggactgcacttggagaattttgtgagtgaagacctgggcaacactagcatccagctgctgcagggggaagtgactgtggagcttgtggcagaacagaagaaccagactcttcgagagggagaaaaaatgcagttgcctgctggtgagtaccataaggtgtatacgacatcacctagcccttcttgctacatgtacgtctatgtcaacactacagagcttgcactggagcaagacctggcatatctgcaagaattaaaggaaaaggtggagaatggaagtgaaacagggcctctacccccagagctgcagcctctgttggaaggggaagtaaaagggggccctgagccaacacctctggttcagacctttcttagacgccaacaaaggctccaggagattgaacgccggcgaaatactcctttccatgagcgattcttccgcttcttgttgcgaaagctctatgtctttcgccgcagcttcctgatgacttgtatctcacttcgaaatctgatattaggccgtccttccctggagcagctggcccaggaggtgacttatgcaaacttgagaccctttgaggcagttggagaactgaatccctcaaacacggattcttcacattctaatcctcctgagtcaaatcctgatcctgtccactcagagttctgaagggggccagatgttgggtgcagatgtagaagcagccagtcacagacccattctatgcaatggacatttatttgaaaaaaattctcaaaagttttttttttttttttgggggggcggggttctaaagctgtttttaactccgagattacaacttagaggaaccaaggaaataaagcaaataagatttaacaacccaagattaagaggccaggaagaggttagacgcaatgtgaaactgtcctcctaggataaggtttaaagtggctttttgggggctgggtgccgtggctcacgcctgtaatcccagcattttgggaggctgaggtgggcagatcacttgaggccaggagttcgagaccagcctggccaacatggcaaaaccccttctctactaaaaatacaaaaattagccagacgtggtggtgggtgcctgtaatccaactacccaggaggctgaggcatgagaatcgcttgggcccaggaggtggaggttgcagtgagccgagatcgagccactgcactcctgggcaacagagcaagacttcgtctcaaaataaataaataaagtggctcttggggaaaagcaatttaatgtaccacgatgaatagctaactgttcccaagtgtttgctatgtgcaacacaccgcgtgagcagtgttacctgcattattacattaggctgagaggtaaaataatttgcccgaagacatacagctagtgacgaatggactgatggtttgaacttaacgtctatttgacttaaggtcctgcaccctgccacttgtaattttcagaatcactgataatctgaaataatgcagcttaaaacatgttttcttaattaaaagtataattggatggtggtcaggttgtaaatgcacacaaagtaat

SEQ ID NO: 62025 - DNA, 1616 bp, Homo sapiens
  misc_feature (43)..(43): n is a, c, g, or t
  misc_feature (51)..(51): n is a, c, g, or t
  misc_feature (54)..(54): n is a, c, g, or t
agtgatctagaggagctgtgctccatggtgccaggtcttcatngcagattnccntggactgcacttggagaattttgtgagtgaagacctgggcaacactagcatccagctgctgcagggggaagtgactgtggagcttgtggcagaacagaagaaccagactcttcgagagggagaaaaaatgcagttgcctgctggtgagtaccataaggtgtatacgacatcacctagcccttcttgctacatgtacgtctatgtcaacactacagagcttgcactggagcaagacctggcatatctgcaagaattaaaggaaaaggtggagaatggaagtgaaacagggcctctacccccagagctgcagcctctgttggaaggggaagtaaaagggggccctgagccaacacctctggttcagacctttcttagacgccaacaaaggctccaggagattgaacgccggcgaaatactcctttccatgagcgattcttccgcttcttgttgcgaaagctctatgtctttcgccgcagcttcctgatgacttgtatctcacttcgaaatctgatattaggccgtccttccctggagcagctggcccaggaggtgacttatgcaaacttgagaccctttgaggcagttggagaactgaatccctcaaacacggattcttcacattctaatcctcctgagtcaaatcctgatcctgtccactcagagttctgaagggggccagatgttgggtgcagatgtagaagcagccagtcacagacccattctatgcaatggacatttatttgaaaaaaattctcaaaagttttttttttttttttgggggggcggggttctaaagctgtttttaactccgagattacaacttagaggaaccaaggaaataaagcaaataagatttaacaacccaagattaagaggccaggaagaggttagacgcaatgtgaaactgtcctcctaggataaggtttaaagtggctttttgggggctgggtgccgtggctcacgcctgtaatcccagcattttgggaggctgaggtgggcagatcacttgaggccaggagttcgagaccagcctggccaacatggcaaaaccccttctctactaaaaatacaaaaattagccagacgtggtggtgggtgcctgtaatccaactacccaggaggctgaggcatgagaatcgcttgggcccaggaggtggaggttgcagtgagccgagatcgagccactgcactcctgggcaacagagcaagacttcgtctcaaaataaataaataaagtggctcttggggaaaagcaatttaatgtaccacgatgaatagctaactgttcccaagtgtttgctatgtgcaacacaccgcgtgagcagtgttacctgcattattacattaggctgagaggtaaaataatttgcccgaagacatacagctagtgacgaatggactgatggtttgaacttaacgtctatttgacttaaggtcctgcaccctgccacttgtaattttcagaatcactgataatctgaaataatgcagcttaaaacatgttttcttaattaaaagtataattggatggtggtcaggttgtaaatgcacacaaagtaat

SEQ ID NO: 62026 - DNA, 1590 bp, Homo sapiens
  misc_feature (27)..(27): n is a, c, g, or t
cttatttttgctgcattgcatattgcnctttgctgcgcttttataaattttttatttaatggctttgcagcactagcatccagctgctgcagggggaagtgactgtggagcttgtggcagaacagaagaaccagactcttcgagagggagaaaaaatgcagttgcctgctggtgagtaccataaggtgtatacgacatcacctagcccttcttgctacatgtacgtctatgtcaacactacagagcttgcactggagcaagacctggcatatctgcaagaattaaaggaaaaggtggagaatggaagtgaaacagggcctctacccccagagctgcagcctctgttggaaggggaagtaaaagggggccctgagccaacacctctggttcagacctttcttagacgccaacaaaggctccaggagattgaacgccggcgaaatactcctttccatgagcgattcttccgcttcttgttgcgaaagctctatgtctttcgccgcagcttcctgatgacttgtatctcacttcgaaatctgatattaggccgtccttccctggagcagctggcccaggaggtgacttatgcaaacttgagaccctttgaggcagttggagaactgaatccctcaaacacggattcttcacattctaatcctcctgagtcaaatcctgatcctgtccactcagagttctgaagggggccagatgttgggtgcagatgtagaagcagccagtcacagacccattctatgcaatggacatttatttgaaaaaaattctcaaaagttttttttttttttttgggggggcggggttctaaagctgtttttaactccgagattacaacttagaggaaccaaggaaataaagcaaataagatttaacaacccaagattaagaggccaggaagaggttagacgcaatgtgaaactgtcctcctaggataaggtttaaagtggctttttgggggctgggtgccgtggctcacgcctgtaatcccagcattttgggaggctgaggtgggcagatcacttgaggccaggagttcgagaccagcctggccaacatggcaaaaccccttctctactaaaaatacaaaaattagccagacgtggtggtgggtgcctgtaatccaactacccaggaggctgaggcatgagaatcgcttgggcccaggaggtggaggttgcagtgagccgagatcgagccactgcactcctgggcaacagagcaagacttcgtctcaaaataaataaataaagtggctcttggggaaaagcaatttaatgtaccacgatgaatagctaactgttcccaagtgtttgctatgtgcaacacaccgcgtgagcagtgttacctgcattattacattaggctgagaggtaaaataatttgcccgaagacatacagctagtgacgaatggactgatggtttgaacttaacgtctatttgacttaaggtcctgcaccctgccacttgtaattttcagaatcactgataatctgaaataatgcagcttaaaacatgttttcttaattaaaagtataattggatggtggtcaggttgtaaatgcacacaaagtaat

SEQ ID NO: 62027 - DNA, 3030 bp, Homo sapiens
  misc_feature (19)..(19): n is a, c, g, or t
  misc_feature (26)..(26): n is a, c, g, or t
atcaggctagtacgaggcngggtgtnagagcaatggcggtgtctgccgggtccgcgcggacctcgcccagctcagggttcttgatggtgctagacattccccaggagcgggggctcagctctctggaccggaaataccttgatgggctggatgtgtgccgcttccccttgctggatgccctacgcccactgccacttgactggatgtatcttgtctacaccatcatgtttctgggggcactgggcatgatgctgggcctgtgctaccggataagctgtgtgttattcctgctgccatactggtatgtgtttctcctggacaagacatcatggaacaaccactcctatctgtatgggttgttggcctttcagctaacattcatggatgcaaaccactactggtctgtggacggtctgctgaatgcccataggaggaatgcccacgtgcccctttggaactatgcagtgctccgtggccagatcttcattgtgtacttcattgcgggtgtgaaaaagctggatgcagactgggttgaaggctattccatggaatatttgtcccggcactggctcttcagtcccttcaaactgctgttgtctgaggagctgactagcctgctggtcgtgcactggggtgggctgctgcttgacctctcagctggtttcctgctcttttttgatgtctcaagatccattggcctgttctttgtgtcctacttccactgcatgaattcccagcttttcagcattggtatgttctcctacgtcatgctggccagcagccctctcttctgctcccctgagtggcctcggaagctggtgtcctactgcccccgaaggttgcaacaactgttgcccctcaaggcagcccctcagcccagtgtttcctgtgtgtataagaggagccggggcaaaagtggccagaagccagggctgcgccatcagctgggagctgccttcaccctgctctacctcctggagcagctattcctgccctattctcattttctcacccagggctataacaactggacaaatgggctgtatggctattcctgggacatgatggtgcactcccgctcccaccagcacgtgaagatcacctaccgtgatggccgcactggcgaactgggctaccttaaccctggggtatttacacagagtcggcgatggaaggatcatgcagacatgctgaagcaatatgccacttgcctgagccgcctgcttcccaagtataatgtcactgagccccagatctactttgatatttgggtctccatcaatgaccgcttccagcagaggatttttgaccctcgtgtggacatcgtgcaggccgcttggtcaccctttcagcgcacatcctgggtgcaaccactcttgatggacctgtctccctggagggccaagttacaggaaatcaagagcagcctagacaaccacactgaggtggtcttcattgcagatttccctggactgcacttggagaattttgtgagtgaagacctgggcaacactagcatccagctgctgcagggggaagtgactgtggagcttgtggcagaacagaagaaccagactcttcgagagggagaaaaaatgcagttgcctgctggtgagtaccataaggtgtatacgacatcacctagcccttcttgctacatgtacgtctatgtcaacactacagagcttgcactggagcaagacctggcatatctgcaagaattaaaggaaaaggtggagaatggaagtgaaacagggcctctacccccagagctgcagcctctgttggaaggggaagtaaaagggggccctgagccaacacctctggttcagacctttcttagacgccaacaaaggctccaggagattgaacgccggcgaaatactcctttccatgagcgattcttccgcttcttgttgcgaaagctctatgtctttcgccgcagcttcctgatgacttgtatctcacttcgaaatctgatattaggccgtccttccctggagcagctggcccaggaggtgacttatgcaaacttgagaccctttgaggcagttggagaactgaatccctcaaacacggattcttcacattctaatcctcctgagtcaaatcctgatcctgtccactcagagttctgaagggggccagatgttgggtgcagatgtagaagcagccagtcacagacccattctatgcaatggacatttatttgaaaaaaattctcaaaagttttttttttttttttgggggggcggggttctaaagctgtttttaactccgagattacaacttagaggaaccaaggaaataaagcaaataagatttaacaacccaagattaagaggccaggaagaggttagacgcaatgtgaaactgtcctcctaggataaggtttaaagtggctttttgggggctgggtgccgtggctcacgcctgtaatcccagcattttgggaggctgaggtgggcagatcacttgaggccaggagttcgagaccagcctggccaacatggcaaaaccccttctctactaaaaatacaaaaattagccagacgtggtggtgggtgcctgtaatccaactacccaggaggctgaggcatgagaatcgcttgggcccaggaggtggaggttgcagtgagccgagatcgagccactgcactcctgggcaacagagcaagacttcgtctcaaaataaataaataaagtggctcttggggaaaagcaatttaatgtaccacgatgaatagctaactgttcccaagtgtttgctatgtgcaacacaccgcgtgagcagtgttacctgcattattacattaggctgagaggtaaaataatttgcccgaagacatacagctagtgacgaatggactgatggtttgaacttaacgtctatttgacttaaggtcctgcaccctgccacttgtaattttcagaatcactgataatctgaaataatgcagcttaaaacatgttttcttaattaaaagtataattggatggtggtcaggttgtaaatgcacacaaagtaat

SEQ ID NO: 62028 - DNA, 3003 bp, Homo sapiens
cggtgtctagccggggcttccgcgcccggaaccctcgagcgcagctcaggttcttgatggtgctagacattccccaggagcgggggctcagctctctggaccggaaataccttgatgggctggatgtgtgccgcttccccttgctggatgccctacgcccactgccacttgactggatgtatcttgtctacaccatcatgtttctgggggcactgggcatgatgctgggcctgtgctaccggataagctgtgtgttattcctgctgccatactggtatgtgtttctcctggacaagacatcatggaacaaccactcctatctgtatgggttgttggcctttcagctaacattcatggatgcaaaccactactggtctgtggacggtctgctgaatgcccataggaggaatgcccacgtgcccctttggaactatgcagtgctccgtggccagatcttcattgtgtacttcattgcgggtgtgaaaaagctggatgcagactgggttgaaggctattccatggaatatttgtcccggcactggctcttcagtcccttcaaactgctgttgtctgaggagctgactagcctgctggtcgtgcactggggtgggctgctgcttgacctctcagctggtttcctgctcttttttgatgtctcaagatccattggcctgttctttgtgtcctacttccactgcatgaattcccagcttttcagcattggtatgttctcctacgtcatgctggccagcagccctctcttctgctcccctgagtggcctcggaagctggtgtcctactgcccccgaaggttgcaacaactgttgcccctcaaggcagcccctcagcccagtgtttcctgtgtgtataagaggagccggggcaaaagtggccagaagccagggctgcgccatcagctgggagctgccttcaccctgctctacctcctggagcagctattcctgccctattctcattttctcacccagggctataacaactggacaaatgggctgtatggctattcctgggacatgatggtgcactcccgctcccaccagcacgtgaagatcacctaccgtgatggccgcactggcgaactgggctaccttaaccctggggtatttacacagagtcggcgatggaaggatcatgcagacatgctgaagcaatatgccacttgcctgagccgcctgcttcccaagtataatgtcactgagccccagatctactttgatatttgggtctccatcaatgaccgcttccagcagaggatttttgaccctcgtgtggacatcgtgcaggccgcttggtcaccctttcagcgcacatcctgggtgcaaccactcttgatggacctgtctccctggagggccaagttacaggaaatcaagagcagcctagacaaccacactgaggtggtcttcattgcagatttccctggactgcacttggagaattttgtgagtgaagacctgggcaacactagcatccagctgctgcagggggaagtgactgtggagcttgtggcagaacagaagaaccagactcttcgagagggagaaaaaatgcagttgcctgctggtgagtaccataaggtgtatacgacatcacctagcccttcttgctacatgtacgtctatgtcaacactacagagcttgcactggagcaagacctggcatatctgcaagaattaaaggaaaaggtggagaatggaagtgaaacagggcctctacccccagagctgcagcctctgttggaaggggaagtaaaagggggccctgagccaacacctctggttcagacctttcttagacgccaacaaaggctccaggagattgaacgccggcgaaatactcctttccatgagcgattcttccgcttcttgttgcgaaagctctatgtctttcgccgcagcttcctgatgacttgtatctcacttcgaaatctgatattaggccgtccttccctggagcagctggcccaggaggtgacttatgcaaacttgagaccctttgaggcagttggagaactgaatccctcaaacacggattcttcacattctaatcctcctgagtcaaatcctgatcctgtccactcagagttctgaagggggccagatgttgggtgcagatgtagaagcagccagtcacagacccattctatgcaatggacatttatttgaaaaaaattctcaaaagttttttttttttttttgggggggcggggttctaaagctgtttttaactccgagattacaacttagaggaaccaaggaaataaagcaaataagatttaacaacccaagattaagaggccaggaagaggttagacgcaatgtgaaactgtcctcctaggataaggtttaaagtggctttttgggggctgggtgccgtggctcacgcctgtaatcccagcattttgggaggctgaggtgggcagatcacttgaggccaggagttcgagaccagcctggccaacatggcaaaaccccttctctactaaaaatacaaaaattagccagacgtggtggtgggtgcctgtaatccaactacccaggaggctgaggcatgagaatcgcttgggcccaggaggtggaggttgcagtgagccgagatcgagccactgcactcctgggcaacagagcaagacttcgtctcaaaataaataaataaagtggctcttggggaaaagcaatttaatgtaccacgatgaatagctaactgttcccaagtgtttgctatgtgcaacacaccgcgtgagcagtgttacctgcattattacattaggctgagaggtaaaataatttgcccgaagacatacagctagtgacgaatggactgatggtttgaacttaacgtctatttgacttaaggtcctgcaccctgccacttgtaattttcagaatcactgataatctgaaataatgcagcttaaaacatgttttcttaattaaaagtataattggatggtggtcaggttgtaaatgcacacaaagtaat

SEQ ID NO: 62029 - DNA, 2673 bp, Homo sapiens
tctcgggtctcatggatggtcctcatggatgcaaccactactggtctgtggacggtctgctgaatgcccataggaggaatgcccacgtgcccctttggaactatgcagtgctccgtggccagatcttcattgtgtacttcattgcgggtgtgaaaaagctggatgcagactgggttgaaggctattccatggaatatttgtcccggcactggctcttcagtcccttcaaactgctgttgtctgaggagctgactagcctgctggtcgtgcactggggtgggctgctgcttgacctctcagctggtttcctgctcttttttgatgtctcaagatccattggcctgttctttgtgtcctacttccactgcatgaattcccagcttttcagcattggtatgttctcctacgtcatgctggccagcagccctctcttctgctcccctgagtggcctcggaagctggtgtcctactgcccccgaaggttgcaacaactgttgcccctcaaggcagcccctcagcccagtgtttcctgtgtgtataagaggagccggggcaaaagtggccagaagccagggctgcgccatcagctgggagctgccttcaccctgctctacctcctggagcagctattcctgccctattctcattttctcacccagggctataacaactggacaaatgggctgtatggctattcctgggacatgatggtgcactcccgctcccaccagcacgtgaagatcacctaccgtgatggccgcactggcgaactgggctaccttaaccctggggtatttacacagagtcggcgatggaaggatcatgcagacatgctgaagcaatatgccacttgcctgagccgcctgcttcccaagtataatgtcactgagccccagatctactttgatatttgggtctccatcaatgaccgcttccagcagaggatttttgaccctcgtgtggacatcgtgcaggccgcttggtcaccctttcagcgcacatcctgggtgcaaccactcttgatggacctgtctccctggagggccaagttacaggaaatcaagagcagcctagacaaccacactgaggtggtcttcattgcagatttccctggactgcacttggagaattttgtgagtgaagacctgggcaacactagcatccagctgctgcagggggaagtgactgtggagcttgtggcagaacagaagaaccagactcttcgagagggagaaaaaatgcagttgcctgctggtgagtaccataaggtgtatacgacatcacctagcccttcttgctacatgtacgtctatgtcaacactacagagcttgcactggagcaagacctggcatatctgcaagaattaaaggaaaaggtggagaatggaagtgaaacagggcctctacccccagagctgcagcctctgttggaaggggaagtaaaagggggccctgagccaacacctctggttcagacctttcttagacgccaacaaaggctccaggagattgaacgccggcgaaatactcctttccatgagcgattcttccgcttcttgttgcgaaagctctatgtctttcgccgcagcttcctgatgacttgtatctcacttcgaaatctgatattaggccgtccttccctggagcagctggcccaggaggtgacttatgcaaacttgagaccctttgaggcagttggagaactgaatccctcaaacacggattcttcacattctaatcctcctgagtcaaatcctgatcctgtccactcagagttctgaagggggccagatgttgggtgcagatgtagaagcagccagtcacagacccattctatgcaatggacatttatttgaaaaaaattctcaaaagttttttttttttttttgggggggcggggttctaaagctgtttttaactccgagattacaacttagaggaaccaaggaaataaagcaaataagatttaacaacccaagattaagaggccaggaagaggttagacgcaatgtgaaactgtcctcctaggataaggtttaaagtggctttttgggggctgggtgccgtggctcacgcctgtaatcccagcattttgggaggctgaggtgggcagatcacttgaggccaggagttcgagaccagcctggccaacatggcaaaaccccttctctactaaaaatacaaaaattagccagacgtggtggtgggtgcctgtaatccaactacccaggaggctgaggcatgagaatcgcttgggcccaggaggtggaggttgcagtgagccgagatcgagccactgcactcctgggcaacagagcaagacttcgtctcaaaataaataaataaagtggctcttggggaaaagcaatttaatgtaccacgatgaatagctaactgttcccaagtgtttgctatgtgcaacacaccgcgtgagcagtgttacctgcattattacattaggctgagaggtaaaataatttgcccgaagacatacagctagtgacgaatggactgatggtttgaacttaacgtctatttgacttaaggtcctgcaccctgccacttgtaattttcagaatcactgataatctgaaataatgcagcttaaaacatgttttcttaattaaaagtataattggatggtggtcaggttgtaaatgcacacaaagtaat

SEQ ID NO: 62030 - DNA, 2016 bp, Homo sapiens
cggacgcgtgggtgcccattctggctagaaaaaaatgggcagcaggcagggatctcgttgtgccattggcagtgcatgacatgtcttggaagttgataatgatgaggtgggactaatatgggggtttggggcaggtatttacacagagtcggcgatggaaggatcatgcagacatgctgaagcaatatgccacttgcctgagccgcctgcttcccaagtataatgtcactgagccccagatctactttgatatttgggtctccatcaatgaccgcttccagcagaggatttttgaccctcgtgtggacatcgtgcaggccgcttggtcaccctttcagcgcacatcctgggtgcaaccactcttgatggacctgtctccctggagggccaagttacaggaaatcaagagcagcctagacaaccacactgaggtggtcttcattgcagatttccctggactgcacttggagaattttgtgagtgaagacctgggcaacactagcatccagctgctgcagggggaagtgactgtggagcttgtggcagaacagaagaaccagactcttcgagagggagaaaaaatgcagttgcctgctggtgagtaccataaggtgtatacgacatcacctagcccttcttgctacatgtacgtctatgtcaacactacagagcttgcactggagcaagacctggcatatctgcaagaattaaaggaaaaggtggagaatggaagtgaaacagggcctctacccccagagctgcagcctctgttggaaggggaagtaaaagggggccctgagccaacacctctggttcagacctttcttagacgccaacaaaggctccaggagattgaacgccggcgaaatactcctttccatgagcgattcttccgcttcttgttgcgaaagctctatgtctttcgccgcagcttcctgatgacttgtatctcacttcgaaatctgatattaggccgtccttccctggagcagctggcccaggaggtgacttatgcaaacttgagaccctttgaggcagttggagaactgaatccctcaaacacggattcttcacattctaatcctcctgagtcaaatcctgatcctgtccactcagagttctgaagggggccagatgttgggtgcagatgtagaagcagccagtcacagacccattctatgcaatggacatttatttgaaaaaaattctcaaaagttttttttttttttttgggggggcggggttctaaagctgtttttaactccgagattacaacttagaggaaccaaggaaataaagcaaataagatttaacaacccaagattaagaggccaggaagaggttagacgcaatgtgaaactgtcctcctaggataaggtttaaagtggctttttgggggctgggtgccgtggctcacgcctgtaatcccagcattttgggaggctgaggtgggcagatcacttgaggccaggagttcgagaccagcctggccaacatggcaaaaccccttctctactaaaaatacaaaaattagccagacgtggtggtgggtgcctgtaatccaactacccaggaggctgaggcatgagaatcgcttgggcccaggaggtggaggttgcagtgagccgagatcgagccactgcactcctgggcaacagagcaagacttcgtctcaaaataaataaataaagtggctcttggggaaaagcaatttaatgtaccacgatgaatagctaactgttcccaagtgtttgctatgtgcaacacaccgcgtgagcagtgttacctgcattattacattaggctgagaggtaaaataatttgcccgaagacatacagctagtgacgaatggactgatggtttgaacttaacgtctatttgacttaaggtcctgcaccctgccacttgtaattttcagaatcactgataatctgaaataatgcagcttaaaacatgttttcttaattaaaagtataattggatggtggtcaggttgtaaatgcacacaaagtaat

SEQ ID NO: 62031 - DNA, 1830 bp, Homo sapiens
cggggcggagcctagggaagcaaattctcctggcggcctccgttcagacgcggcagctgtgacccacctgcctcctccgcagagcaatggcggtgtctgccgggtccgcgcggacctcgcccagctcagataaagtacagaaagacaaggctgaactgatctcagggcccaggcaggacagccgaatagggaaactcttgggttttgagtggacagatttgtccagttggcggaggctggtgaccctgctgaatcgaccaacggaccctgcaagcttagctgtctttcgttttctttttgggttcttgatggtgctagacattccccaggagcgggggctcagctctctggaccggaaataccttgatgggctggatgtgtgccgcttccccttgctggatgccctacgcccactgccacttgactggatgtatcttgtctacaccatcatgtttctgggggcactgggcatgatgctgggcctgtgctaccggataagctgtgtgttattcctgctgccatactggtatgtgtttctcctggacaagacatcatggaacaaccactcctatctgtatgggttgttggcctttcagctaacattcatggatgcaaaccactactggtctgtggacggtctgctgaatgcccataggaggaatgcccacgtgcccctttggaactatgcagtgctccgtggccagatcttcattgtgtacttcattgcgggtgtgaaaaagctggatgcagactgggttgaaggctattccatggaatatttgtcccggcactggctcttcagtcccttcaaactgctgttgtctgaggagctgactagcctgctggtcgtgcactggggtgggctgctgcttgacctctcagctggtttcctgctcttttttgatgtctcaagatccattggcctgttctttgtgtcctacttccactgcatgaattcccagcttttcagcattggtatgttctcctacgtcatgctggccagcagccctctcttctgctcccctgagtggcctcggaagctggtgtcctactgcccccgaaggttgcaacaactgttgcccctcaaggcagcccctcagcccagtgtttcctgtgtgtataagaggagccggggcaaaagtggccagaagccagggctgcgccatcagctgggagctgccttcaccctgctctacctcctggagcagctattcctgccctattctcattttctcacccagggctataacaactggacaaatgggctgtatggctattcctgggacatgatggtgcactcccgctcccaccagcacgtgaagatcacctaccgtgatggccgcactggcgaactgggctaccttaaccctggggtatttacacagagtcggcgatggaaggatcatgcagacatgctgaagcaatatgccacttgcctgagccgcctgcttcccaagtataatgtcactgagccccagatctactttgatatttgggtctccatcaatgaccgcttccagcagaggtgggcaaggggagcagagagtgggaaaaaatgaagcacagttctttttaccaagatgaacagcccttgcttcctggtattgtcttgcttaaaaagctgtccttcctctagtgcatgtcccccttgatctggttgtgggcatagctggttgcttccagcagggggcaccatcatccaggagaaaagtgagttgacttgttcttttagacactgttgacataataccttctcaggtagctactaacccccattatacccagtgctccagatctcttctgccttctttctctgccctggactggcaa

SEQ ID NO: 62032 - DNA, 1515 bp, Homo sapiens
cggggcggagcctagggaagcaaattctcctggcggcctccgttcagacgcggcagctgtgacccacctgcctcctccgcagagcaatggcggtgtctgccgggtccgcgcggacctcgcccagctcagataaagtacagaaagacaaggctgaactgatctcagggcccaggcaggacagccgaatagggaaactcttgggttttgagtggacagatttgtccagttggcggaggctggtgaccctgctgaatcgaccaacggaccctgcaagcttagctgtctttcgttttctttttgggttcttgatggtgctagacattccccaggagcgggggctcagctctctggaccggaaataccttgatgggctggatgtgtgccgcttccccttgctggatgccctacgcccactgccacttgactggatgtatcttgtctacaccatcatgtttctgggggcactgggcatgatgctgggcctgtgctaccggataagctgtgtgttattcctgctgccatactggtatgtgtttctcctggacaagacatcatggaacaaccactcctatctgtatgggttgttggcctttcagctaacattcatggatgcaaaccactactggtctgtggacggtctgctgaatgcccataggaggaatgcccacgtgcccctttggaactatgcagtgctccgtggccagatcttcattgtgtacttcattgcgggtgtgaaaaagctggatgcagactgggttgaaggctattccatggaatatttgtcccggcactggctcttcagtcccttcaaactgctgttgtctgaggagctgactagcctgctggtcgtgcactggggtgggctgctgcttgacctctcagctggtttcctgctcttttttgatgtctcaagatccattggcctgttctttgtgtcctacttccactgcatgaattcccagcttttcagcattggtatgttctcctacgtcatgctggccagcagccctctcttctgctcccctgagtggcctcggaagctggtgtcctactgcccccgaaggttgcaacaactgttgcccctcaaggcagcccctcagcccagtgtttcctgtgtgtataagaggagccggggcaaaagtggccagaagccagggctgcgccatcagctgggagctgccttcaccctgctctacctcctggagcagctattcctgccctattctcattttctcacccagggctataacaactggacaaatgggctgtatggctattcctgggacatgatggtgcactcccgctcccaccagcacgtgaagatcacctaccgtgatggccgcactggcgaactgggctaccttaaccctggggtatttacacagagtcggcgatggaaggatcatgcagacatgctgaagcaatatgccacttgcctgagccgcctgcttcccaagtatcaaagtagatctggggctcagtgacattatacttgggaagcaggcggctcaggca

SEQ ID NO: 62033 - DNA, 1952 bp, Homo sapiens
cggggcggagcctagggaagcaaattctcctggcggcctccgttcagacgcggcagctgtgacccacctgcctcctccgcagagcaatggcggtgtctgccgggtccgcgcggacctcgcccagctcagataaagtacagaaagacaaggctgaactgatctcagggcccaggcaggacagccgaatagggaaactcttgggttttgagtggacagatttgtccagttggcggaggctggtgaccctgctgaatcgaccaacggaccctgcaagcttagctgtctttcgttttctttttgggttcttgatggtgctagacattccccaggagcgggggctcagctctctggaccggaaataccttgatgggctggatgtgtgccgcttccccttgctggatgccctacgcccactgccacttgactggatgtatcttgtctacaccatcatgtttctgggggcactgggcatgatgctgggcctgtgctaccggataagctgtgtgttattcctgctgccatactggtatgtgtttctcctggacaagacatcatggaacaaccactcctatctgtatgggttgttggcctttcagctaacattcatggatgcaaaccactactggtctgtggacggtctgctgaatgcccataggaggaatgcccacgtgcccctttggaactatgcagtgctccgtggccagatcttcattgtgtacttcattgcgggtgtgaaaaagctggatgcagactgggttgaaggctattccatggaatatttgtcccggcactggctcttcagtcccttcaaactgctgttgtctgaggagctgactagcctgctggtcgtgcactggggtgggctgctgcttgacctctcagctggtttcctgctcttttttgatgtctcaagatccattggcctgttctttgtgtcctacttccactgcatgaattcccagcttttcagcattggtatgttctcctacgtcatgctggccagcagccctctcttctgctcccctgagtggcctcggaagctggtgtcctactgcccccgaaggttgcaacaactgttgcccctcaaggcagcccctcagcccagtgtttcctgtgtgtataagaggagccggggcaaaagtggccagaagccagggctgcgccatcagctgggagctgccttcaccctgctctacctcctggagcagctattcctgccctattctcattttctcacccagggctataacaactggacaaatgggctgtatggctattcctgggacatgatggtgcactcccgctcccaccagcacgtgaagatcacctaccgtgatggccgcactggcgaactgggctaccttaaccctggggtgagatgtctgatgctgacaatttactgttcttcagagcccccttgtgctttggggtctggttttgtcttacacacaccataaagcaaaacaaatttgagtctgctttgccttttctcaagagccagattgaactatcttttatgtgggttgagatagggcaatgcattcatttccttgaactgatgggagaagatgcgcgcagtctggctcccatcaggtagtttctcttatgcctggagaacttcctttaacatttcttttagagcacgtctgctggctacagattttagtttagtttagttttcctgcatctgagaatgtctttatgaccttaattcctaaaagatatttttgctgaatatagaatttcagactgatagtcttttttttttccccctccagcacttcggaagatgcttggatggtttctgatgggacgaagaccgcgtctggctcccatcagagagccatccctcagacttccagggtggccctactagcacctcaatcgacaacatggatggaacccctgtacgggatgaacggagtgggacacccaccaggatgagatgatgg

SEQ ID NO: 62034 - DNA, 560 bp, Homo sapiens
tgaagtgaaaatggcgtgagggtgtgagagaggtttgggttaggaaacatgtttttagtgctatttccaaccaggggtcgcaaactcagcagcctgtagaaacaggggtgggaggtggggcggcagctgtgacccacctgcctcctccgcagagcaatggcggtgtctgccgggtccgcgcggacctcgcccagctcagggttcttgatggtgctagacattccccaggagcgggggctcagctctctggaccggaaataccttgatgggctggatgtgtgccgcttccccttgctggatgccctacgcccactgccacttgactggatgtatcttgtctacaccatcatgtttctgggtgaggggaactgtgggaaatattgactggcctgccagaaacacagaaatagaagcatgctggtgaatggtcaaagtctttggcaccttatttcacttctgctgtgatcaatttcatgctgttgacctgtgtgtcacttaagctgtgatcccataattctttttaaaatattaaaataacatttaattttcaaaaagtttta

SEQ ID NO: 62035 - DNA, 655 bp, Homo sapiens
cgagagggcgtctcgctctgtcgcccaggctgcagtgcagtggtgcaatcttggctcactgcaagctccacctcccgggttcacgccattctccggcatcagcctcccgagtagctgggagccaaggtgggcagatcacttgagcctaggaggccgaggctgcagtgagctaaggtggagccactgcactccagcctaggtgagagcacagaccctgtctcaaaaacaaacaaacaaacaaacaaacaaacaaaacaataacaagtgttggcaaggatgtggagaagaactctcatacattgctggtggaagtgtaaaatggtacagctacttcaatttataggaaaggtccagaatatgcaaatttgtagaagcagaaagtagattcatggttgcttagggctacaaggagggttagggaagaatagggagtgactgctattgggtatagggtttctttcagggggaacacaatattctaaagttagattgtgatgatggttgtacaaccctatgattataccagaaaacatgaactgtacactttaagtggatgaactgtatcatatataaatgattatggcctccttggccccagcagtttttgagcaagctgctttctccaaccagttccacacagaattaatgtggtgat

SEQ ID NO: 62036 - DNA, 660 bp, Homo sapiens
ataccgtcaagttcgctacaggagagattactagatctttccaagaacattgggtctatctcacagtcctaggtgtcaaaaggaaaagagaaaagcaaggtgtcaaaaggaaaaaagaggaaacttgagaaaaataggtgtctaatctctttgttaatagccaatttctaggagccaggtatggactatgtgatttttatggcatctacatataatgttgctttcttcctcacttaagttcagaagcagtaggagaccgaggagtcaagaggtgaggaacaaaatgtcagcttattacagataaagctgtttagagaacgtggcttgggcatgcaggcaaatggaactgctaacactgatcctcagagttggacagccttacctttgcaatcacaggtagatggataaacacagacctctcccctctgactcctgggacagaacatgtcttcacaggtagctgatcccaggttgagagagggctcccctcttcatactcaccaatcattcagtccaggtttgttgctctgatggaggccaccccaacccccagccccttttcaaatgtgcaccacagtagggaatgaggccaggacctgagacctggctgcctggtgggtagaccctggaatgtacaagcaaacagcccctaatgccagg

SEQ ID NO: 62037 - DNA, 600 bp, Homo sapiens
ctgcttccctcaaggtattacccagcctgtattttatagatcactaaaaagcactgagccctgccgctgcagggctggagcggaccaccttgtcctgtatagccatcagacttaattgcaggaaacctaaacagtgttaagtatgcaagctgagagcataaagttattttattaaaagaagaaagcaatggttattaccaaccaggccttgtcacccatttcagatggctctggcaagcaattaacaaagctcctacacttcctctcctcgatgagctggctctgttactgggctggtggtgaaggaactggaagatcctcctctctgcgggccaacgaggcagagcctccttgatttactaccctggcaattcctttacagtcacaaagtggtgggatccagatgaatccccggccaccgccagatcaaacgctaaggtggccaccaggcatggcctcgcgtactcactttcatcctgggcgactgtcgtaagcgttcagtctgtcattgaattattccatcagcttctttgctagagtgggttttctggaatggttctgttttagagaactagttacagtgactccatgagcctgcct

SEQ ID NO: 62038 - DNA, 323 bp, Homo sapiens
aaaagaaaagaaaaaaaagttgtatcaccagatgaggataggtgtgtttcataaaacaggcagtgaactgaagtagctggtacatgtttgaggtgtgtgcagatatacattttgtgtattcctacatggctgggttttgttgggtgcagttttttgcatccatctagagtctctcacagataaaatcatgcataagcaaatgccaagttgtgttgtgctcaaattgttcctttaacgtacaaatcatgttgaaacagttccagcaagcgttatagcagaactgatgattctcttgatctgaattttgaggcccatccaaaaaa

SEQ ID NO: 62039 - DNA, 486 bp, Homo sapiens
tttaagatattcaagaaagttgattcattctcaagtcaaaccttatgaaatcatgtttttggcacctttttctagtttcttaacctcctccaggatccaacagttccaagattgcaatacatcatcagtgtgtctgcgggtaggggaggtagagaacagcggcaggaggagaatagacaggaggggaaaagggagcacctctcttctctacccacttgataaacataatattgaaatttggtcaaatcataagaagtccatcaatcagccacatgaaaagttttccttctctaacagtgttgggggtatttgccaaattactttagaaagaactgaaattgtctaccacagttgaggaaggtaattacatatacaattttcttttcttttctttcttttttttttttttgagacagagtctcactctgttgcccaggctggagtgtagtggcactatcacagcttagcaacctccacctccctggc

SEQ ID NO: 62040 - DNA, 385 bp, Homo sapiens
aaatctgagcagtgcacctgactgttcattgcttggaaggagaaatagccaaatagttgattatataccagttcaagggctgtgacctatggtttggctagatggccaggaacctagaagtaatgtgattggaaaattgtcttcccacataagctaccatgatcccgtaaagaatcatgcttgcttttgcaccaatgattcccccaacaaccgaagtaatatctgatgcatgttcggtactcaaagaaatatgtgtgaacatcatgaatcagttaatggacaaacccactctaatctggcttccttccaaatcatgcacatgaaactgttgcatgtttccaaatccaatagacacatttctctatacatgttattccatttccca

SEQ ID NO: 62041 - DNA, 1614 bp, Homo sapiens
  misc_feature (3)..(3): n is a, c, g, or t
  misc_feature (5)..(5): n is a, c, g, or t
  misc_feature (7)..(7): n is a, c, g, or t
ggnanangggaatcaggttttgaaactgacttccagagctccactgcctccctgcaccatgccctacaacttctgcctgcccagcctgagctgccgcaccagctgctcctcccggccctgtgtgccccccagctgccacggctacaccctgcccggggcctgcaacatccctgccaatgtgagcaactgcaactggttctgcgagggctccttcaatggcagcgagaaggagactatgcagttcctgaacgaccgcctggccagctacctggagaaggtgcgtcagctggagcgggacaacgcggagctggagaacctcatccgggagcggtctcagcagcaggagcccttgctgtgccccagctaccagtcctacttcaagaccattgaggagctccagcagaagatcctgtgcagcaagtctgagaatgccaggctggtggtgcagatcgacaatgccaagctggctgcagatgacttcagaaccaagtaccagacggagcagtccctgcggcagctggtggagtccgacatcaacagcctgcgcaggattctggatgagctgaccctgtgcaggtctgacctggaggcccagatggagtccctgaaggaggagctgctgtccctcaagcagaaccatgagcaggaagtcaacaccttgcgctgccagcttggagaccgcctcaacgtggaggtggacgctgctcccgctgtggacctgaaccaggtcctgaacgagaccaggaatcagtatgaggccctggtggaaaccaaccgcagggaagtggagcaatggttcgccacgcagaccgaggagctgaacaagcaggtggtatccagctcggagcagctgcagtcctaccaggcggagatcatcgagctgagacgcacagtcaatgccctggagatcgagctgcaggcccagcacaacctgcgatactctctggaaaacacgctgacagagagcgaggcccgctacagctcccagctgtcccaggtgcagagcctgatcaccaacgtggagtcccagctggcggagatccgcagtgacctggagcggcagaaccaggagtatcaggtgctgctggacgtgcgggcgcggctggagtgtgagatcaacacataccggagcctgctggagagcgaggactgcaagctgccctccaacccctgcgccaccaccaatgcatgtgaaaagcccattggatcctgtgtcaccaatccttgtggtcctcgttcccgctgtgggccttgcaacacctttgggtactagataccctggggccagcagaagtatagcatgaagacagaactaccatcggtgggccagttctgcctctctgacaaccatcagccaccggaccccaccccgaggcatcaccacaaatcatggtctggaaggagaacaaatgcccagcgtttgggtctgactctgagcctagggctacttgatcctcctcaccccaggtccctctcctgtagtcagtctgagttctgatggtcagaggttggagctgtgacagtggcatacgaggtgttttgttctctctgctgcttctacctttattgcagttccccaaatcgcctaataaactttcctcttgcaaagcagac

SEQ ID NO: 62042 - DNA, 1626 bp, Homo sapiens
tttttcaaaattttaataacttctttccaagattttatatttgttaagcacattgccaatccttagttatttataaacttcaacttaaatgtactgataatcccattacagcaggcagttgcctacagctattacctttatttcttctttagcagtaccttagtttgatctgatagtggcaaggatccctcttcctcaaagagattaggaccttaccccaactccagaggttgcaccttcattgatctgaaacagaagtggtagtttaattctgtatagtctgattagtacgaggcagaactttttgcagtgaaggaaatcaaccatccattctgtctctctattgtggtagctactaaccatatgtgatattgagtacttgatatgtgactactgcaattgagaaattgaatgaaatgaacagaaccctactgagaagggctttcctttcaaattaaaaaatcagagctttgtgtggtaacagtcattgcctctttctcctctttctggccaacagcatgcctaaaggtgcagctgccatcaaacaaccatgaaacagcaaatgtgagaatgaaagttacatttcagagatagaactgaaggaggattaaggggatcctgggtccctgatatggcattgttgaacacccaaatcaagatgagcaattgccaaactccccaattattaaatgagaaaaaataaactccagattgtttaagacactgtttggtttcctgttactttagccatgtatgtttctgactaatatatctgcttatctactcttcaacattttttaagtgtaaaactcttattttagacatgtcagggatgctatttcagaatctaatcatttaaagcaaggagataattccatataacgaaagaagtaatgtcttagtgcagctcagctcctagcattctaagccaacagaggtgaaaaggggacatatttacacagcttaaccataaaaataatactgatttgggggcacaagaggatgtagagaaaaatataaagggaagaccagtattttagtatgctgcaagcatatacttcaactttttattgacaaatatttcaattaatctttttgtcttatatactgtagcccacatatcatcaaagtaacttcattttaattcatttcatagaaccataggattttagacaggactttggagatgattttgttgtacttcattttaagatgaggatatctgaggttcagataaattaacctcttgtgttacagagcatggaccagacccaggatgtcaggggtttccaagtcagcattttttctggtatcctctgctgcatctggctatcttgtgatgttctaattttagagtgacaaaaatgagaaccagttatatgcaaggatcatagcttgttagcagatcagggattataattcagatgttctgatttgtaaaacaatttttaattaaataaaaaggtaaattatattttaatttaaattgtgtttaaattatttaagatgttatttcatttacagtaaatatgagaacgatttcaaaatatttagaatataatataatgccattttgctccctccccctctgcccccatcgttaaaactcttgctgttttccattta

SEQ ID NO: 62043 - DNA, 310 bp, Homo sapiens
tattaaatttactagaatgttacagttacaaatttggtaatgttctttctgaaaaacagcctaattttgcagcctgaaacttgactgaaaatctcaatacttttattcatgatagaaaaataattcctggcttcatctcacaattaactaataattatgttaatataaaataaactgtgccctttctttacagtgatgatcaaagtgattctcccaggccaaaaaatcaaataagaagttaattttaaaaagacaaaacaagccattctacccagtgggcatcttcagtgtactccctctactaattggc

SEQ ID NO: 62044 - DNA, 331 bp, Homo sapiens
actaatcagtaacttatcaattacttgtaatcagtaactaaatctaccatacaccaaatataattgggagcacattagaattactgttcaaactagtcagtataatgtatcatctcaccttctccaaaggtctttttgtctttataataacctattttttattttatatatagttcattctgagaaaagcttaataatatagaatgcttactattttttaaaaggcagaagaggaactcaagaaggaagaaaaaagattttctttctaaactactctgcaggactatagaatgatatctttggtcctaagatttaacagtatattaagagt

SEQ ID NO: 62045 - DNA, 528 bp, Homo sapiens
ctctcgctcctccctttctagttccctttcagacatgcgcagtgcggccgtccctagaggcgggttaacggccgcggacctggcagttctcaggcttctccaagggagaagcccccttgccagggtctcgatttcccgccaaccaacaaaggttcatttgcctcttatggcctgcgcgggagggttgccatgttttttagattaagtactgcacgactactcgcttctgaaactgtcataagaaactgcctcagctccctgcagggtggacacacaagagcagaatctccgtgggacatctctttggagcatcaatattactacagtatttggaagacacaaatttaaataatttctaaggtaaagaatggaacatttaagacaaggctggaaagtcatctgcctttaataactcatctgtgcctcacatgtcagactttctccaagaaaaaaactaaggagaacttatttccattcttataagtagtaaaaataataaatcatatcaagtcaattgaaagtcctgtc

SEQ ID NO: 62046 - DNA, 782 bp, Homo sapiens
agcccgtccctagcggtggggtaaaggtcctgcccttttacacatgcggagtgcacccgttcctaggggtggggctaacgggcctaccgtttcagacatgctcagtgcagcctgtccttaggcgtagggtaatggtgggcgacctggcagttcttgggctccttgggatcccctcgagaagcccccttgttagtgtatgaaaccgtcagttcactgccagtaatgaaaacatcgtgtccttagtcacctgccattagccttttcgaaaccattttttctgttccctaagctgtcacaaatcctcctctgcatcccaggagtgccgcttggtcctcgggctcgcagcgtggcccacacctgggtcgggcctctcacggggacgctcccgccactgtgataaagaggagaaaacgtcacaggggaagggcctgaccctgctgcatccattttttagattaagtactgcacgactactcgcttctgaaactgtcataagaaactgcctcagctccctgcagggtggacacacaagagcagaatctccgtgggacatctctttggagcatcaatattactacagtatttggaagacacaaatttaaataatttctaaggtaaagaatggaacatttaagacaaggctggaaagtcatctgcctttaataactcatctgtgcctcacatgtcagactttctccaagaaaaaaactaaggagaacttatttccattcttataagtagtaaaaataataaatcatatcaagtcaattgaaagtcctgtc

SEQ ID NO: 62047 - DNA, 557 bp, Homo sapiens
gccgcggtttctgtatagaaggaggggatagacgaaaagaaagaaagacccgcccattcgcctcttatggcctgcgcgggagggttgccatggagtgccgcttggtcctcgggctcgcagcgtggcccacacctgggtcgggcctctcacggggacgctcccgccactgtgataaagaggagaaaacgtcacaggggaagggcctgaccctgctgcatccattttttagattaagtactgcacgactactcgcttctgaaactgtcataagaaactgcctcagctccctgcagggtggacacacaagagcagaatctccgtgggacatctctttggagcatcaatattactacagtatttggaagacacaaatttaaataatttctaaggtaaagaatggaacatttaagacaaggctggaaagtcatctgcctttaataactcatctgtgcctcacatgtcagactttctccaagaaaaaaactaaggagaacttatttccattcttataagtagtaaaaataataaatcatatcaagtcaattgaaagtcctgtc

SEQ ID NO: 62048 - DNA, 389 bp, Homo sapiens
gcttcccaggcctcatggtactagtgtggacctcctggctgtgattaatgcagttttttagattaagtactgcacgactactcgcttctgaaactgtcataagaaactgcctcagctccctgcagggtggacacacaagagcagaatctccgtgggacatctctttggagcatcaatattactacagtatttggaagacacaaatttaaataatttctaaggtaaagaatggaacatttaagacaaggctggaaagtcatctgcctttaataactcatctgtgcctcacatgtcagactttctccaagaaaaaaactaaggagaacttatttccattcttataagtagtaaaaataataaatcatatcaagtcaattgaaagtcctgtc

SEQ ID NO: 62049 - DNA, 657 bp, Homo sapiens
ctctcgctcctccctttctagttccctttcagacatgcgcagtgcggccgtccctagaggcgggttaacggccgcggacctggcagttctcaggcttctccaagggagaagcccccttgccagggtctcgatttcccgccaaccaacaaaggttcatttgcctcttatggcctgcgcgggagggttgccatggagtgccgcttggtcctcgggctcgcagcgtggcccacacctgggtcgggcctctcacggggacgctcccgccactgtgataaagaggagaaaacgtcacaggggaagggcctgaccctgctgcatccattttttagattaagtactgcacgactactcgcttctgaaactgtcataagaaactgcctcagctccctgcagggtggacacacaagagcagaatctccgtgggacatctctttggagcatcaatattactacagtatttggaagacacaaatttaaataatttctaaggtaaagaatggaacatttaagacaaggctggaaagtcatctgcctttaataactcatctgtgcctcacatgtcagactttctccaagaaaaaaactaaggagaacttatttccattcttataagtagtaaaaataataaatcatatcaagtcaattgaaagtcctgtc

SEQ ID NO: 62050 - DNA, 3106 bp, Homo sapiens
  misc_feature (3085)..(3085): n is a, c, g, or t
  misc_feature (3094)..(3094): n is a, c, g, or t
ggcacgagggagacacgggagcgcttggcacgcggagccagagccggagctgcagccgcagcgggagccgggggagctcaggggccgcaggagccgggccggagtgagcgcacctcgcggggccctcggggcaggtgggtgagcgccacccggagtcccgcgcgcaactttcagggcgcactcggcggggcggctgcgcggctgccgggactcggcgcgggactgcatggaggccaaggagaagcagcatctgttggacgccaggccggcaatccggtcatacacgggatctctgtggcaggaaggggctggctggattcctctgccccgacctggcctggacttgcaggccattgagctggctgcccagagcaaccatcactgccatgctcagaagggtcctgacagtcactgtgaccccaagaaggggaaggcccagcgccagctgtatgtagcctctgccatctgcctgttgttcatgatcggagaagtcgttgagatcttgggagccctggtctctgtactgtccatctgggtcgtgacgggggtactggtgtacctggctgtggagcggctgatctctggggactatgaaattgacggggggaccatgctgatcacgtcgggctgcgctgtggctgtgaacatcataatggggttgacccttcaccagtctggccatgggcacagccacggcaccaccaaccagcaggaggagaaccccagcgtccgagctgccttcatccatgtgatcggcgactttatgcagagcatgggtgtcctagtggcagcctatattttatacttcaagccagaatacaagtatgtagaccccatctgcaccttcgtcttctccatcctggtcctggggacaaccttgaccatcctgagagatgtgatcctggtgttgatggaagggacccccaagggcgttgacttcacagctgttcgtgatctgctgctgtcggtggagggggtagaagccctgcacagcctgcatatctgggcactgacggtggcccagcctgttctgtctgtccacatcgccattgctcagaatacagacgcccaggctgtgctgaagacagccagcagccgcctccaagggaagttccacttccacaccgtgaccatccagatcgaggactactcggaggacatgaaggactgtcaggcatgccagggcccctcagactgactgctcagccaggcaccaactggggcatgaacaggacctgcaggtggctggactgagtgtcccccaggcccagccaggactttgcctaccccagctgtgttataaaccaggtccccctcctgacctctgccccactccaggaatggagctcttcccagcctcccatctgactacagccagggtggggactcagcgggtataaagctagtgtgaccctgctcttccagctcctgggccagctctggaagggctgtatttgggcctaatcctcagcaactgttctaccactcgcaggggcaaaggtggtgagccacgggacgtccaaggggaggctggccccagcgcgcccatactgcctgcctcatgccccattctcagcctggctggcctttgcctttatgaatctgagcccctccatctgcctatagcaataggcacgggggtgaggaccctcacactctcatttgagcctccctgaggcagggagccaggaggcacctgaggcctatctgtgccttagtcacttcagctatgagccaaatgttccctttcctggaggggagaggcttcttactaggtaagagacaggtttcctctttccttatttcctcagctgtgccaacacaaaaaacaactttggcacaggtggtgggcagggggtagagagatttcagcttgggttctgcactaacagcctccaagccccctggcacttctgttgccctgagagtgtcccaggggattcagagtctccagaaagatatggctgggccaactctgttgcctacctggcctgacccagtcggagcctgacatggtggagggaaagggagacaagtggggctgcactcggtccagaggccagctaggagggaaaccgcagcttcctggggcttgtgtgtgaagattcctgacttaggggtggcttttgtttacaagatgcaagaggggaaacctgtccccgactcatcgagacaacatgcccagttatcagggagtcctgtgtcacaaggtctgtctctgccattgtaagcaagtgccttgggcgagctggcctctgccccacagtctcatctgtacaccgacagggttgatgcctccctcacagggttgagaacaagagccagttggccaagtacctgtggttgttgaagattggttacttttaccatcctggggacagggaactctgtggcccgaggctgcctcactgaggagtcaggtgggcttcccagcctccccaggggcagtgctgagtttgtcttgactgttctggcccaaggtgggaggaggtgggtttggtcacttgcctcccactttaaatctctgtctttccatctgtgaaatgacctctttgtgccttcccagcactgtcatcctgatcgcctgtgttctaggtagatgggtccttcagcccctccaggtctgtgaaaagtctgtggaaagcactggcctggagaggggtggggggttgctggtgggtgctccattccaccacaatctcaggggactcaacctcccctacccaactccccacccccacccaagccatggcaggccccaggaacttgatcctgggctttgccgtatgccaagtccttacacccctctcaagagacagtcattggctgggcacggtggctcatgcctgcaatcccagcaccttgggaggctgaggcaggcagatgacttgaggccaggagttcgagaccagcctggccaatatggcgaaacctcatttctactaaaaatacaaaaactagccaggcgtggtggcttgtgcctgtaatcccagctactcgggaggctgaggcaggagaatcgcttgaaccggggaggcagaggttgcagtgagctgagatcacaccactgcactccagcctgggngacagagcnagactccagctt

SEQ ID NO: 62051 - DNA, 1417 bp, Homo sapiens
ggcacgagggagacacgggagcgcttggcacgcggagccagagccggagctgcagccgcagcgggagccgggggagctcaggggccgcaggagccgggccggagtgagcgcacctcgcggggccctcggggcaggtgggtgagcgccacccggagtcccgcgcgcaactttcagggcgcactcggcggggcggctgcgcggctgccgggactcggcgcgggactgcatggaggccaaggagaagcagcatctgttggacgccaggccggcaatccggtcatacacgggatctctgtggcaggaaggggctggctggattcctctgccccgacctggcctggacttgcaggccattgagctggctgcccagagcaaccatcactgccatgctcagaagggtcctgacagtcactgtgaccccaagaaggggaaggcccagcgccagctgtatgtagcctctgccatctgcctgttgttcatgatcggagaagtcgttgagatcttgggagccctggtctctgtactgtccatctgggtcgtgacgggggtactggtgtacctggctgtggagcggctgatctctggggactatgaaattgacggggggaccatgctgatcacgtcgggctgcgctgtggctgtgaacatcataatggggttgacccttcaccagtctggccatgggcacagccacggcaccaccaaccagcaggaggagaaccccagcgtccgagctgccttcatccatgtgatcggcgactttatgcagagcatgggtgtcctagtggcagcctatattttatacttcaagccagaatacaagtatgtagaccccatctgcaccttcgtcttctccatcctggtcctggggacaaccttgaccatcctgagagatgtgatcctggtgttgatggaagggacccccaagggcgttgacttcacagctgttcgtgatctgctgctgtcggtggagggggtagaagccctgcacagcctgcatatctgggcactgacggtggcccagcctgttctgtctgtccacatcgccattgctcagaatacagacgcccaggctgtgctgaagacagccagcagccgcctccaagggaagttccacttccacaccgtgaccatccagatcgaggactactcggaggacatgaaggactgtcaggcatgccagggcccctcagactgactgctcagccaggcaccaactggggcatgaacaggacctgcaggtggctggactgagtgtcccccaggcccagccaggactttgcctaccccagctgtgttataaaccaggtccccctcctgacctctgccccactccaggaatggagctcttcccagcctcccatctgactacagccagggtggggactcagcgggtataaagctagtgtgaccctgc

SEQ ID NO: 62052 - DNA, 715 bp, Homo sapiens
ggcacgagggagacacgggagcgcttggcacgcggagccagagccggagctgcagccgcagcgggagccgggggagctcaggggccgcaggagccgggccggagtgagcgcacctcgcggggccctcggggcaggtgggtgagcgccacccggagtcccgcgcgcaactttcagggcgcactcggcggggcggctgcgcggctgccgggactcggcgcgggactgcatggaggccaaggagaagcagcatctgttggacgccaggccggcaatccggtcatacacgggatctctgtggcaggaaggggctggctggattcctctgccccgacctggcctggacttgcaggccattgagctggctgcccagagcaaccatcactgccatgctcagaagggtcctgacagtcactgtgaccccaagaaggggaaggcccagcgccagctgtatgtagcctctgccatctgcctgttgttcatgatcggagaagtcgttgagatcttgggagccctggtctctgtactgtccatctgggtcgtgacgggggtactggtgtacctggctgtggagcggctgatctctggggactatgaaattgacggggggaccatgctgatcacgtcgggctgcgctgtggctgtgaacatcataatcggggttgacccttcatacgtcgtctgccacagtgtcctgcctcataagcatcctctagat

SEQ ID NO: 62053 - DNA, 228 bp, Homo sapiens
agcagtagctattatggctattttatttaccctgaaaagcaactgttcatagtatcacaaggcaggcaggggtagggggcaataaaagcatttgtggcaaggatccagttatttgcaggcttctcttctgtctggctttgtttactgtcatgcaggaaaagtgccttcaccagggcacagcagtaaacctgttggctactctagtcctgcctgggttcccaggaaatt

SEQ ID NO: 62054 - DNA, 210 bp, Homo sapiens
  misc_feature (1)..(1): n is a, c, g, or t
nggagaatcactcgaacccgggacgcagaggttgcagtgagccgagatcacgacattgcactccagcctggatgacagagtgagactccatcccaaaaaaaaaaaaaaaatgttatctgttacagtgattttacaaatgtccttctaatcatcctttgtatttccttactagtctaaatagcaaaggatatccttatttctgtgttacaa

SEQ ID NO: 62055 - DNA, 544 bp, Homo sapiens
tccctccacctaaattatcaacacaaaactgtaaaacagagatatttggtcaacctgtatttattgggaattgcttgcaaacatcctgaactatagtaagtgttagaaggcaaacaagaagataagaacaactctagcttgaagaactgtgtgatgtcactgaggagcaaagtggcactcagagaaccactgcagaattatcaaatcctaaacttactgggcagtatgtgatgttagagtttggagaagtgcttgatgaatttgggctggtgtagttgagtacacttctcctgagcaagagcgtgagctgagccatgaagcattggtaggaccctggagacattgagaagtgatgctataaggtatcttaaaagtcaatgaagatgtttgtgctcaagtcaggagcaaatgcatgtttcactttgttggttggtgctgctataacaaaacatcacagactgggtaatttctaaagaacagaaatttatttttcattgttctggagactgggaattttcagacttgggaaatgtcacatgaaggc

SEQ ID NO: 62056 - DNA, 313 bp, Homo sapiens
taaactatagacttccaatagcaagcctctgtgccttcctcttaccactaagcaagcatgggtattaattcctactgaaaggcttatgctatcttttttccagaaatggaagaaaaatgaactatgaaaaagatcattttataggtcagctaccattatgagattgttgaggaaatgatataaaaaacaatttttatcaaattatctttagggcatttatatgtttattttcttactgtgttgatttaggtgactataagaagttgtatcagagcaactgattctggtgaattaaagcaagtatttctaagaa

SEQ ID NO: 62057 - DNA, 309 bp, Homo sapiens
aaaataagtagtttggactaaaatccagttgatctgcgaatggccagttgacctgggtccagtttcccccccgtcccgcccccagcctcaactgcttcagagaagagccatgttcccatttaatgcttgaggaacctgagccagagggataggtggagtcacagaccttgaggaccttggccaagattcttggggtgggggactgggttggtggcctggatgaattcccaattaggaaattacattctaagtcccggctgcctccattccctgtggggtgcgattgtcagtcacagcttggccttctac

SEQ ID NO: 62058 - DNA, 309 bp, Homo sapiens
agaaggtggctgccggggcccctctggctgaaaggaacagcccacctcttgacagataagggaccgcggatccaggttgggtcaccaaaagtgctcacgagccctcatgtgctgcggaggagccccactcacgcttagggcctcgactgggatttgactgggctggaattcccagtcacttccctacaccctgcggctcctaaaagctagccagccgtgtgtctgtctttcgagggaccaggtgaccgcctgtgctgggtgtgaggtgcagcctctccaacaggtcgatgaattatcctccagggcaaa

SEQ ID NO: 62059 - DNA, 356 bp, Homo sapiens
ttaattttaaagcagataatatttcaaatattttctttgaaatagaccatttgtcctgccttgaagtatgttagtacattttaagaaagtcagtgggttaaggagtcagtgctgttagtattcatgcttaaaacacttcccttctacctaccctaataaatgaggggctcaagagaaatatttctaattctctagcgacatggctaatttttttttttaatgtatttttgtatttttagtacagatggagtttcaccatgttggtcaggctggtctcaaactcctgagctcaagtgatctgcctacctcaggctcctgagtcactgagactgtagttgtgtgccaccatgccaggt

SEQ ID NO: 62060 - DNA, 4747 bp, Homo sapiens
ccgagacactgggaccacagcggcagctccgctgaaaactgcattcagccagtcctccggacttctggagcggggacagggcgcagggcatcagcagccaccagcaggacctgggaaatagggattcttctgcctccacttcaggttttagcagcttggtgctaaattgctgtctcaaaatgcagaggatctaatttgcagaggaaaacagccaaagaaggaagaggaggaaaaggaaaaaaaaaggggtatattgtggatgctctacttttcttggaaatgcaaaagattatgcatatttctgtcctcctttctcctgttttatggggactgatttttggtgtctcttctaacagcatacagataggggggctatttcctaggggcgccgatcaagaatacagtgcatttcgagtagggatggttcagttttccacttcggagttcagactgacaccccacatcgacaatttggaggtggcaaacagcttcgcagtcactaatgctttctgctcccagttttcgagaggagtctatgctatttttggattttatgacaagaagtctgtaaataccatcacatcattttgcggaacactccacgtctccttcatcactcccagcttcccaacagatggcacacatccatttgtcattcagatgagacccgacctcaaaggagctctccttagcttgattgaatactatcaatgggacaagtttgcatacctctatgacagtgacagaggcttatcaacactgcaagctgtgctggattctgctgctgaaaagaaatggcaagtgactgctatcaatgtgggaaacattaacaatgacaagaaagatgagatgtaccgatcactttttcaagatctggagttaaaaaaggaacggcgtgtaattctggactgtgaaagggataaagtaaacgacattgtagaccaggttattaccattggaaaacatgttaaagggtaccactacatcattgcaaatctgggatttactgatggagacctattaaaaatccagtttggaggtgcaaatgtctctggatttcagatagtggactatgatgattcgttggtatctaaatttatagaaagatggtcaacactggaagaaaaagaataccctggagctcacacaacaacaattaagtatacttctgctctgacctatgatgccgttcaagtgatgactgaagccttccgcaacctaaggaagcaaagaattgaaatctcccgaagggggaatgcaggagactgtctggcaaacccagcagtgccctggggacaaggtgtagaaatagaaagggccctcaaacaggttcaggttgaaggtctctcaggaaatataaagtttgaccagaatggaaaaagaataaactatacaattaacatcatggagctcaaaactaatgggccccggaagattggctactggagtgaagtggacaaaatggttgttacccttactgagctcccttctggaaatgacacctctgggcttgagaataagactgttgttgtcaccacaattttggaatctccgtatgttatgatgaagaaaaatcatgaaatgcttgaaggcaatgagcgctatgagggctactgtgttgacctggctgcagaaatcgccaaacattgtgggttcaagtacaagttgacaattgttggtgatggcaagtatggggccagggatgcagacacgaaaatttggaatgggatggttggagaacttgtatatgggaaagctgatattgcaattgctccattaactattacccttgtgagagaagaggtgattgacttctcaaagcccttcatgagcctcgggatatctatcatgatcaagaagcctcagaagtccaaaccaggagtgttttcctttcttgatcctttagcctatgagatctggatgtgcattgtttttgcctacattggggtcagtgtagttttattcctggtcagcagatttagcccctacgagtggcacactgaggagtttgaagatggaagagaaacacaaagtagtgaatcaactaatgaatttgggatttttaatagtctctggttttccttgggtgcctttatgcggcaaggatgcgatatttcgccaagatccctctctgggcgcattgttggaggtgtgtggtggttctttaccctgatcataatctcctcctacacggctaacttagctgccttcctgactgtagagaggatggtgtctcccatcgaaagtgctgaggatctttctaagcaaacagaaattgcttatggaacattagactctggctccactaaagagtttttcaggagatctaaaattgcagtgtttgataaaatgtggacctacatgcggagtgcggagccctctgtgtttgtgaggactacggccgaaggggtggctagagtgcggaagtccaaagggaaatatgcctacttgttggagtccacgatgaacgagtacattgagcaaaggaagccttgcgacaccatgaaagttggtggaaacctggattccaaaggctatggcatcgcaacacctaaaggatcctcattaggaaccccagtaaatcttgcagtattgaaactcagtgagcaaggcgtcttagacaagctgaaaaacaaatggtggtacgataaaggtgaatgtggagccaaggactctggaagtaaggaaaagaccagtgccctcagtctgagcaacgttgctggagtattctacatccttgtcgggggccttggtttggcaatgctggtggctttgattgagttctgttacaagtcaagggccgaggcgaaacgaatgaaggtggcaaagaatgcacagaatattaacccatcttcctcgcagaattcacagaattttgcaacttataaggaaggttacaacgtatatggcatcgaaagtgttaaaatttaggggatgaccttgaatgatgccatgaggaacaaggcaaggctgtcaattacaggaagtactggagaaaatggacgtgttatgactccagaatttcccaaagcagtgcatgctgtcccttacgtgagtcctggcatgggaatgaatgtcagtgtgactgatctctcgtgattgataagaaccttttgagtgccttacacaatggttttcttgtgtgtttattgtcaaagtggtgagaggcatccagtatcttgaagacttttctttcagccaagaattcttaaatatgtggagttcatcttgaattgtaaggaatgattaattaaaacacaacatctttttctactcgagttacagacaaagcgtggtggacatgcacagctaacatggaagtactataatttacctgaagtctttgtacagacaacaaacctgtttctgcagccactattgttagtctcttgattcataatgacttaagcacacttgacatcaactgcatcaagatgtgacatgttttataaaaaaaggaaaaaaaacatttaaaactaaaaaatatttttaggtattttcacaaacaaactggcttttaaataaatttgcttccatattggttgaataagacaaaaacaattaaactgagtgggaagtgaataaaaaaaggctttaggtatcgattccatatttttcaaagccaaatatgtaaatgctaaggaaagtaaacaaagaggagattccaatcttgtaatttaatattgttattaaaactttaatgtatcctattctttaacatttggtgttaatataaaattacttggcaatgcttgacatttgaaataaacatttttctattgttttattgcaagtggtccaattaattttgcttagctacagtttggtcataaatcaagtgagtttaaagacactaccaagttgttaggtgcccagagaaaatttctcccttttaaaaaggccaggtgatttttcaaatgtaatcttgcccccaaagtaatatctgaatatctttttgacatgtctaaatatatatatatataaagaaatatttgttaacacaaaagcatttgatctatgtagataaatgctaatagatttaaaaagctaatattaacaaataccagaatacgtgaagttccatttttaaagtgtttgagcttacagaagagaaacattcattttaaatgaagtaaaaaatgccttgaaagtaattctttagatagttgcccattgattaaattccaaaaactaaatatgtttttagctttaaaattataaaagctgtcataaactttatatattatgaattttaaaatatgtttgagtctcctgcaatatagtttcatcccattgacatcaattaaaaataaccctaatatattatttttatatttattcctcaggtggaatggctattttaatatgcccagtgtggataaaatgtcacatttctgtaacttttgactaaagagcctatatttatctagttaatgaatttaaaggatctatctttcccttcataaaatacctcttatttccattaaagccccccaagtttaattaatttaggattttgaatgattattgacatccaatagttatttttaatatttgtattcttgttatttctggaagaaagcctttgtgtagcacttggtattttgcaaagtgcttttaaaacattcttacttaccgtatttcatagaagggaaggaaaaatgtaaggtttaacagtaagcacttgcattgaacatggaggcatgtggtatcatgatattcttcactaaatttagctgtccctaat

SEQ ID NO: 62061 - DNA, 645 bp, Homo sapiens
atggctaatatctgcaggagtagctatttatattttaggagaataatatctgttttgcttcttttgcaatgttttaatcatttatttcatatttactctgttaaaaggaatacacaagatctagctaaagcattgaaaatgttccccattttctttaaggaacgctacagtttacacagataattcctaccctggtgcttacatcggtgaacaattggggaatgtcttgaagagtgttcctcatgtttctgcgagttattcacctttccattcccacccgatactgtgtaaattctttctttccctttgttacatgatttcatgatgatgtcaagttgtctttattctatctaatgaaagatgatctccttaaaaataaggattatttcccttgtttttactccaaatttcagcactggttggcacatagctagtacacaaaaaatgcatattgaatgaataaggaaaaattgaactggatcttcaacacccaggctttggatagatggaagagagatgtggatcagcatgacaagctgttggtgaaatgaaatggagaaaatggtgttcgttataggacagaattttgtgacaaactattttgttgtattttcttttacaaaaaaaaatgggcttagcagtgaa

SEQ ID NO: 62062 - DNA, 2956 bp, Homo sapiens
acatcatgagtggataaacttttatgagtatttgtaaatttcttgaaattgctttcttatgggattcatgtcataaactatttgggcattacaattatgaaagtattccagaaatcagaagttttgacctgtgtgtatgttattaaatttagctactctgtactccttgcccaaaatgtttaatgatttccagtttcattaactagtagatacattgaaaaatataaaattaaatattcccctataagtcaatatttgcataatactgctaacttgtttttttattaggtcattcatttcactttacaaatccatttcatacttgttattagatccctctctgggcgcattgttggaggtgtgtggtggttctttaccctgatcataatctcctcctacacggctaacttagctgccttcctgactgtagagaggatggtgtctcccatcgaaagtgctgaggatctttctaagcaaacagaaattgcttatggaacattagactctggctccactaaagagtttttcaggagatctaaaattgcagtgtttgataaaatgtggacctacatgcggagtgcggagccctctgtgtttgtgaggactacggccgaaggggtggctagagtgcggaagtccaaagggaaatatgcctacttgttggagtccacgatgaacgagtacattgagcaaaggaagccttgcgacaccatgaaagttggtggaaacctggattccaaaggctatggcatcgcaacacctaaaggatcctcattaggaaccccagtaaatcttgcagtattgaaactcagtgagcaaggcgtcttagacaagctgaaaaacaaatggtggtacgataaaggtgaatgtggagccaaggactctggaagtaaggaaaagaccagtgccctcagtctgagcaacgttgctggagtattctacatccttgtcgggggccttggtttggcaatgctggtggctttgattgagttctgttacaagtcaagggccgaggcgaaacgaatgaaggtggcaaagaatgcacagaatattaacccatcttcctcgcagaattcacagaattttgcaacttataaggaaggttacaacgtatatggcatcgaaagtgttaaaatttaggggatgaccttgaatgatgccatgaggaacaaggcaaggctgtcaattacaggaagtactggagaaaatggacgtgttatgactccagaatttcccaaagcagtgcatgctgtcccttacgtgagtcctggcatgggaatgaatgtcagtgtgactgatctctcgtgattgataagaaccttttgagtgccttacacaatggttttcttgtgtgtttattgtcaaagtggtgagaggcatccagtatcttgaagacttttctttcagccaagaattcttaaatatgtggagttcatcttgaattgtaaggaatgattaattaaaacacaacatctttttctactcgagttacagacaaagcgtggtggacatgcacagctaacatggaagtactataatttacctgaagtctttgtacagacaacaaacctgtttctgcagccactattgttagtctcttgattcataatgacttaagcacacttgacatcaactgcatcaagatgtgacatgttttataaaaaaaggaaaaaaaacatttaaaactaaaaaatatttttaggtattttcacaaacaaactggcttttaaataaatttgcttccatattggttgaataagacaaaaacaattaaactgagtgggaagtgaataaaaaaaggctttaggtatcgattccatatttttcaaagccaaatatgtaaatgctaaggaaagtaaacaaagaggagattccaatcttgtaatttaatattgttattaaaactttaatgtatcctattctttaacatttggtgttaatataaaattacttggcaatgcttgacatttgaaataaacatttttctattgttttattgcaagtggtccaattaattttgcttagctacagtttggtcataaatcaagtgagtttaaagacactaccaagttgttaggtgcccagagaaaatttctcccttttaaaaaggccaggtgatttttcaaatgtaatcttgcccccaaagtaatatctgaatatctttttgacatgtctaaatatatatatatataaagaaatatttgttaacacaaaagcatttgatctatgtagataaatgctaatagatttaaaaagctaatattaacaaataccagaatacgtgaagttccatttttaaagtgtttgagcttacagaagagaaacattcattttaaatgaagtaaaaaatgccttgaaagtaattctttagatagttgcccattgattaaattccaaaaactaaatatgtttttagctttaaaattataaaagctgtcataaactttatatattatgaattttaaaatatgtttgagtctcctgcaatatagtttcatcccattgacatcaattaaaaataaccctaatatattatttttatatttattcctcaggtggaatggctattttaatatgcccagtgtggataaaatgtcacatttctgtaacttttgactaaagagcctatatttatctagttaatgaatttaaaggatctatctttcccttcataaaatacctcttatttccattaaagccccccaagtttaattaatttaggattttgaatgattattgacatccaatagttatttttaatatttgtattcttgttatttctggaagaaagcctttgtgtagcacttggtattttgcaaagtgcttttaaaacattcttacttaccgtatttcatagaagggaaggaaaaatgtaaggtttaacagtaagcacttgcattgaacatggaggcatgtggtatcatgatattcttcactaaatttagctgtccctaat

SEQ ID NO: 62063 - DNA, 369 bp, Homo sapiens
tttatacttccttttattcctgttagattcacatatataaaagacatttctatttagaacaagtccagtaaatgtggttctaatttcagattcagacatggctttgaaaataattaaatgctttgctaatagacaagtcatttatccatacacctgtctgctgtaaccttttccagattggctactggagtgaagtggacaaaatggttgttacccttactgagctcccttctggaaatgacacctctgggcttgagaataagactgttgttgtcaccacaattttggtaatttgctacatatgccatgttttactttgtattttcttatggctaatatctgcaggagtagctatttatattttaggag

SEQ ID NO: 62064 - DNA, 692 bp, Homo sapiens
ctttttctttgatccagtgacataaccacgattcctttttcaccatgactccaggtactattactttcctttttttcccttacagaaagctgatattgcaattgctccattaactattacccttgtgagagaagaggtgattgacttctcaaagcccttcatgagcctcgggatatctatcatgatcaagaagcctcagaagtccaaaccaggagtgttttcctttcttgatcctttagcctatgagatctggatgtgcattgtttttgcctacattggggtcagtgtagttttattcctggtcagcagatttagcccctacgagtggcacactgaggagtttgaagatggaagagaaacacaaagtagtgaatcaactaatgaatttgggatttttaatagtctctggttttccttgggtgcctttatgcggcaaggatgcgatatttcgccaaggttggttactcacctgcttcaactttgtgcatttcaggtctcaagtggacattcatggtgtttatggattcaccctaaagaagttaccagctgccgacttcctgtccaagcagtttaagactcttgaaggacatcctcttagcttcggcataagtctgtgaaatatttgaacaatgttctttgaatgttgctcatctatttctctggtgaaattatacacaccatgaagaggctat

SEQ ID NO: 62065 - DNA, 2538 bp, Homo sapiens
ccgagacactgggaccacagcggcagctccgctgaaaactgcattcagccagtcctccggacttctggagcggggacagggcgcagggcatcagcagccaccagcaggacctgggaaatagggattcttctgcctccacttcaggttttagcagcttggtgctaaattgctgtctcaaaatgcagaggatctaatttgcagaggaaaacagccaaagaaggaagaggaggaaaaggaaaaaaaaaggggtatattgtggatgctctacttttcttggaaatgcaaaagattatgcatatttctgtcctcctttctcctgttttatggggactgatttttggtgtctcttctaacagcatacagataggggggctatttcctaggggcgccgatcaagaatacagtgcatttcgagtagggatggttcagttttccacttcggagttcagactgacaccccacatcgacaatttggaggtggcaaacagcttcgcagtcactaatgctttctgctcccagttttcgagaggagtctatgctatttttggattttatgacaagaagtctgtaaataccatcacatcattttgcggaacactccacgtctccttcatcactcccagcttcccaacagatggcacacatccatttgtcattcagatgagacccgacctcaaaggagctctccttagcttgattgaatactatcaatgggacaagtttgcatacctctatgacagtgacagaggcttatcaacactgcaagctgtgctggattctgctgctgaaaagaaatggcaagtgactgctatcaatgtgggaaacattaacaatgacaagaaagatgagatgtaccgatcactttttcaagatctggagttaaaaaaggaacggcgtgtaattctggactgtgaaagggataaagtaaacgacattgtagaccaggttattaccattggaaaacatgttaaagggtaccactacatcattgcaaatctgggatttactgatggagacctattaaaaatccagtttggaggtgcaaatgtctctggatttcagatagtggactatgatgattcgttggtatctaaatttatagaaagatggtcaacactggaagaaaaagaataccctggagctcacacaacaacaattaagtatacttctgctctgacctatgatgccgttcaagtgatgactgaagccttccgcaacctaaggaagcaaagaattgaaatctcccgaagggggaatgcaggagactgtctggcaaacccagcagtgccctggggacaaggtgtagaaatagaaagggccctcaaacaggttcaggttgaaggtctctcaggaaatataaagtttgaccagaatggaaaaagaataaactatacaattaacatcatggagctcaaaactaatgggccccggaagattggctactggagtgaagtggacaaaatggttgttacccttactgagctcccttctggaaatgacacctctgggcttgagaataagactgttgttgtcaccacaattttggaatctccgtatgttatgatgaagaaaaatcatgaaatgcttgaaggcaatgagcgctatgagggctactgtgttgacctggctgcagaaatcgccaaacattgtgggttcaagtacaagttgacaattgttggtgatggcaagtatggggccagggatgcagacacgaaaatttggaatgggatggttggagaacttgtatatgggaaagctgatattgcaattgctccattaactattacccttgtgagagaagaggtgattgacttctcaaagcccttcatgagcctcgggatatctatcatgatcaagaagcctcagaagtccaaaccaggagtgttttcctttcttgatcctttagcctatgagatctggatgtgcattgtttttgcctacattggggtcagtgtagttttattcctggtcagcagatttagcccctacgagtggcacactgaggagtttgaagatggaagagaaacacaaagtagtgaatcaactaatgaatttgggatttttaatagtctctggttttccttgggtgcctttatgcggcaaggatgcgatatttcgccaaggttggttactcacctgcttcaactttgtgcatttcaggtctcaagtggacattcatggtgtttatggattcaccctaaagaagttaccagctgccgacttcctgtccaagcagtttaagactcttgaaggacatcctcttagcttcggcataagtctgtgaaatatttgaacaatgttctttgaatgttgctcatctatttctctggtgaaattatacacaccatgaagaggctataaaatgcataaggttcctatcattccatgccttcttggaggggtaccgtgtttttgctgcatattctcattttacagtcatctgtgtgttgatccacagacctgtatatgggaaaatgggcaacattatttattaactgcaaagtaacaccttgttagataaaacttcgttggcacaca

SEQ ID NO: 62066 - DNA, 343 bp, Homo sapiens
atcaaaaatgtgctagcagcactctacacaacaactattagaactccaagtatgaagaacaattctttcctataactaagattctaagaataaaattaaaaaggaaagaagactctcaatgggggaatctacagcatcaaaagattatttggcaaagcaagataacagctgtggtgtaagaaaagcttaatttcatcgtattatacaaaactgagaaaattaaaactgaatgagagagcagagatcattttctctaatttttagcagccaattttcatgttttgatagggataagttgaatataaaaatataaataaaataattatgtctcaaatgaaatttg

SEQ ID NO: 62067 - DNA, 253 bp, Homo sapiens
agaacgtgcctactggtacagcctgatgaaactgaaataaaaatgacaactaatctggaagacaaccagcaaccaatcaccaatcaaactgaacaaataatgccttctctgccccatttcctcttctgtcaattttaataaaatcatagttctcagtactccttgccatcctggtactcagcactccttgccccaattttaataaaatcaagagaagagaaaatggggcagagaggacattccaggcagcact

SEQ ID NO: 62068 - DNA, 1018 bp, Homo sapiens
ttgtacactaaaaatgacaaaaaactgaggaaaaaattaaacacacaaatgggaaagacatctcatgttcaaggactggaagaccttatattgttaaaatgtacatactatccaaagtaatctactgattcaatgcaatctctatcaaatttcagtgtcattttttgcaaaatgagaaaaagccatcctgaaatcagtaagtaatctcaaaggaccccaaatagccaaaacaaccttgattaagaacaaaactgtaggcttcacactttctgatttcaaaacttgttacaaagctacagtgatcaaaatagtactagcatacagacatgtaaaccaatggaacagaacagacagcccagatataaacccctgtgtatgtggtcaaatgatgagccaagactacgcaatggggaaagaataatctcttcaacaaatagtgctggaaaaactggatgtccacatgcaacagaatgaagatggatccttatcttaaaccataaataaaaaataactaaaaattgattaaagacctaaacataagacctgaaaccataaaactagaaggaaacatagagaagcttcatgatactgaatttggcaatgatttcttggctgcaaaacaaaaagcacaggcaacaaaggcaaaaatagacacagaattacatcaaacttacaaacttctgtgcagcaaggcaagcaatcaaccaaaaccagaatgaaaccaaggaagagtgaaaaggcaacctacagaatgagagaaaatatttgcaaatcatgtattggataggggtttaatatccagaataaaaaaaaaactcctacaactcagtaacaaaacaaaaaccacaaataacacaactttaaaatgagctaaggacttgaatagacatttttacaaagaagatacataaatggccaaaaaaaatatgaaaagctactcaacatcactaatcatcggcaaaactcacatcaaatcacactgaggtatcacctcacaccagttaaaattacctctatc

SEQ ID NO: 62069 - DNA, 221 bp, Homo sapiens
agcaaccagattataaccagtggtttgaaaatatttcctatgaacactttaataatggaggatgcatcattctagatgaagtgaatgagaaaccatacaattggtggagaattgccatttattttgatttgagtttccaaagactgtgcagtatggccaatgaattaaggagaacatcttctaaattacgagattataaatacttttttgctatcagccat

SEQ ID NO: 62070 - DNA, 322 bp, Homo sapiens
ttgctgagtgattttgaacgttgacaccagtgtggagccagtgtgggtgtggggagcagtgccttcctcaggtcccagctggtcctgatatgccacgtagtggatggcatctgtcttggtccatgggcttggtgggaacatgcttctgcttgtgtgttttccatacctgagggctgacgtagcttaaaccacagggcatcatgccaaacactcactgctgggcaggtttatttctggggatgtcagggtactggggtgtaggcactaagcaggatagagttagggtgtctggctagtaaggggttctggacgcctctggggc

SEQ ID NO: 62071 - DNA, 321 bp, Homo sapiens
cccatgtctcttcctcctctgcccctgctctgtccctcccatcctcatcttacaccgggaccaacaggaggcagtagcctccttctgggtctccctgcccaccccctgcgcccatctgtgtggcacacacagccagagggtacccgtgagcacccgagcggtcacgtccctctgctcagaactttcctgccgctctgtctcctgcgggcccacaaggccccatcacctctctgttctcaccccccctggagacctcagagcctttgcacgggctggcccctctgccaggagctcacttcccagtgtctgcacagggctccc

SEQ ID NO: 62072 - DNA, 273 bp, Homo sapiens
cacagcgagttatactgaggctcaggatcagtccgcgaaacgtggacccgggcctgcacgagggttgatgggtgagggtggcgggtgaacttgagtagaggtaaggaaagatcttacggccttcttcctagtcctaaaagcgtccctcgcagcccgcctgcttgctggcagcctcaccctgctggcttccaggagggctttgtcaagcactgcagcggtgttggaaaccttgttgcaaagtccaagcctaagcgagtgggcgagacgcgcaga

SEQ ID NO: 62073 - DNA, 98 bp, Homo sapiens
gcgcaccttcgaacaaagagtagaagatgtccgacttattcgagagcagcatccaaccaaaatcccggtgataatagaacgatacaagggtgagaagc

SEQ ID NO: 62074 - DNA, 6271 bp, Homo sapiens
  misc_feature (61)..(61): n is a, c, g, or t
  misc_feature (2286)..(2286): n is a, c, g, or t
  misc_feature (2941)..(2941): n is a, c, g, or t
  misc_feature (3221)..(3221): n is a, c, g, or t
  misc_feature (3239)..(3239): n is a, c, g, or t
  misc_feature (3241)..(3241): n is a, c, g, or t
  misc_feature (4151)..(4151): n is a, c, g, or t
  misc_feature (4379)..(4379): n is a, c, g, or t
  misc_feature (4971)..(4973): n is a, c, g, or t
ttccagcgtcgactcacggagtccttcggatgagagcgtctgggtgccagacgaggccggngccttgccctcccaagacactgttcttcaagagaaagaccagaagagaaggcaaaaatgaatgttgaagtagtaaaagtcatgccccaggacttagtgacattcaaggatgtggcaatagatttttcccaggaagaatggcaatggatgaaccctgctcagaagcgtttatacaggagtatgatgttggagaactatcagagcctggtatcacttggtctttgcatttctaagccatatgtgatctccttattggagcaagggagagagccttgggagatgacgagtgagatgacaagaagcccattctcagattgggaatctatatatgtgacacaggaattacctctgaagcagttcatgtatgatgatgcatgcatggagggaattactagctatggacttgagtgttccacttttgaagaaaattggaaatgggaagacctttttgagaagcagatgggaagtcatgagatgtttagcaagaaagaaataatcactcataaagaaaccatcactaaggaaacagaattcaaatatactaaatttgggaaatgtatccatctggaaaacatagaagagagtatttataatcacacatcagataaaaaaagcttctccaaaaattctatggtaataaaacacaagaaagtctatgtaggaaagaagctttttaaatgtaatgaatgtgacaaaaccttcacccatagctcatcccttactgttcattttagaattcatactggtgaaaaaccatatgcatgtgaggaatgtggaaaagccttcaagcaaaggcaacaccttgctcaacatcacagaacacatactggagagaaactctttgaatgtaaagaatgtaggaaagccttcaaacaaagtgaacaccttattcagcatcaaagaattcatactggagaaaaaccatataaatgtaaggaatgcagaaaagccttcagacagcctgcacaccttgctcagcatcagagaattcatactggagagaaaccctatgaatgtaaagaatgtggcaaagccttcagtgatggctcgtcttttgctcgacatcagagatgtcacactggcaaaagaccctatgaatgtattgagtgtgggaaggcttttaggtataacacatcttttattcgtcactggaggagttatcatactggagagaagccttttaattgcattgattgtgggaaagccttcagtgttcacataggacttattctgcataggagaattcatacaggagagaaaccttacaaatgtggtgtgtgtggaaaaaccttcagctcgggttcatcccgtactgtacatcagagaattcatacaggagagaaaccttatgaatgtgatatatgtgggaaagattttagccatcatgcatcactcactcagcatcaaagagtacattctggagagaaaccgtatgaatgcaaggaatgtgggaaagcctttaggcagaatgtacaccttgttagtcatttgagaattcatactggtgaaaaaccctatgaatgtaaagaatgtggaaaagcttttagaatcagttcacagctggctactcatcagagaattcatactggagagaagccttatgaatgtattgaatgtggaaatgctttcaaacagagatcacaccttgcccaacatcagaaaactcatacaggagagaaaccttatgagtgtaatgaatgcgggaaagccttcagccaaacttccaatcttactcaacatcaaagaattcatactggagagaaaccctataaatgtactgaatgtggaaaggcttttagtgatagctcatcctgtgctcagcatcaaagactccacactggccaaaggccctatcagtgttttgaatgtgggaaggcgttcagaagaaagttatccttaatttgtcatcaaagaagtcatactggagaagaaccttaagaatgtagtgcatgtggccaagcctttagttatcaccaatcccctactgttaatcagagatgtcccactggataaaaaacatataaatgtaagaaatgtagaaaaaccttcagccaggaggctggcaagatggccgaataggaacagctctgatctgcagttcccagtgagatcaacgcagaaggtgggtgctttctgtatttccagctgaggtacctggctcatctcattgggactggttagacagtgggtgcagcccacggagggtgagctgaagcagggtggggngtaacctcacctgggaagtgcaaggagtcggggatctccctcccctagccaagggaagccatgagggactgtgccatgaggaatggtgcactccggcacagatactacgcttttcccatggtcttcgcaacccacagaccaggagatccccttgggtgcctatgccaccaaggccctgggtttcaagcacaaaactgggcggccattcgggcagacaccgagctagctgtaggagtttttttgatagcccagtggcacctggaatgccagtgaaacagaaccgcttactcccttgttaagggggctgaagccggggagccaagtggttcccatgcccactgagcccagcaagctaagatccactggcttggaattctccctgccagcacagcagtctgaagtcaacctgggatgatcaagcttggtggggggaggggcgccaaccattaccaaagcttgaataggtggttttcccctcacagcgtaaacaaagccatggggaagttccagctgagcagagccctccacagctcagcaaagcctctgtagccagactgcctctctagattcctcctctctgggcagcgcatctttgaaaaaagtgcagataaaaccctcatctccctgggacaaagcacgtgggggaaaggggtgnctgtgggcacagcttcagcagacttaaacattcctgcctgccagctctgaagagagcagcagttcttccagcacagcgcttgagctctgctaagggacagactgcctcctcaagtgggtccctgacccccatgcctcctgacggggagacacctcccagcaggggtccacagacacctcatacaggagagctctggctggcatctggtgggtgcccctctgggacaaagcttccagaggaaggaacaggcagcaatctttgctgttctgcagcctccacnggtgatacccaggcagananggtctggagtggacctccagcaaactccagcagacctgcagccgaggggcctcactgttagaaggaaaactaacaggaatataatcaacatcaacaaaggacatccacacagaaaccccatctgaaggttaccagcatcaaagaccaaaggtagataaattcacgaagatgaggagaaaccagtgcaaaaagcctgaaaattccaaaaaccagaatgcctcttctcctccaaaggatcacaactccttgccggcaagggaacaaaactggatagagaatgagtttgacaaattgacagaagtaggcttcagaaggtgggaaataacaaactcctctgagctaaaggagcatgttctaacccaatgcaaggaagctaagaaccttgaaaaaaggttagaggaattgctaactagaataaccagtttagagaagaacataaatgacctgatggagctgaaaaacacagcatgagaacttcgtgaagcatacagaagaaaaaccttcagccagattgaatgctttacagggaagaattcatactgcagagcggtcttaacaatgtaaagaatgtgcaaatgtcctcagacaagatgcacaccttgctcattagtgagttcatttcaggcagccagctcttcctcacccactacatcaccaagtcctgtggatatatctgctaaatatttttggaatttatccacttcttttggttccccagtccaaaacacagtcatttcacctggactatttcaatcattacacaggtgtccaaccttttgtcttccctgggccacattggaagaagaaaaattgtcttgtgccacacatacaatacactaacattaacaatagctgatgagctaagaaaaaaaaaaagtctgtgcatagttttagtgatacaccacctccnataagcaaaaaagtcctcacattcaatgggttgcatacccatgaattctaaaacttcatcctcttttgtccctttcgagttaacattacagccacagtgacctttcaaaaatgcaaattaagttactcttaaaactctagttaaaatacttgatgtacataaagtgcttagcaaaatgaccaactcatactaagtgcttagtaaatgttagataagtattctccaganttgatgtaaattatttttaaacagtgcattcttgaaagcagtatggcagtcataaaaattttggaaccaaaacagtatctttttttaagctaaaaaaaagttttaaatggtgtctttctatgttgcccagggtggtctcaaactcctgtgctcaagtgaccctcccacctcattctcaagtggctgcaattacaggcaaccagcctgacttaaaacagtatcttaaggtagatggtgattagcacatgtagtatgcttaacatttaatattataataagacatcacagcggctgtctcatgattaaggctgtgttcccttgttggtgaggaaattaattatgacttgataaatagaacatgttttaagaagtggctatatagctctggataaaacgaacaaaagaattagaattcctgcggggaatatatacaagactttatttagtcaagtaaaaaaaaatcactaatgtttaactgaagaaagagaaattgaataatatagttctatttcaacatgtgggttcacagatttattctaaccttccaagtaaagttgttccactagtaaagttgttctggagtatatttttnnnaaaaaaaacacttaaaatgttccacttctttcatgaggctaagtcaactctgatatcaaaccaaggggaaagaaatgaaattataggtgagtttacttagttatatacaaaaggaaattattagcctctgctgatggagaacagaggctgtgaataaatggagatccataacatgatcctacatgaatgtttcaatattgtaatcctgtaagttacttttacattgacagttctgaaattcatgttgagtgttaattaggcaggaatcagaagggaggttttgtagaaggtcgtatccatgggttttttatatttgaaaagtgttttcgatgtatcattgggggagattaaatgtctttgacagttgtccaactagaaataaagtcagcatcccatttgactccttacacagaagttcattctatactcattacagatgtaagaggttaagatggtagaggagaatgtagagtatttctgtgcctttaggttcaggaggtctttgataagcaggacaaggtccagaagccatgaagagagaatgacaggactgtgtagaagatttaaacctttttcatggcgtaagatactgtatgcaaagttaaaaggcatatgacaggctgagagatatcttaaacatacattagaaaggatatagcccttgaaaaagggctgttggaaagcagcaaggataaggtgcacagtcttgcagagcatgtcaacaaaatttattggatgaagaaattaaaatggttaaatagaagaagttctcaacctcactaatgatcagataagtgcagattgtaaaagtcctcatccccaccaacacaaaccagcagaaattttatgtgaatgtgaagtttggataatatccagtattgtcgcaggtgtgagaaaccgtattttcaaatattgagagggtaaattagaggaaagccattttagagggcaatgtggtgttacctgtcagcattttgaatataattaccctttgccacaattctacacctagtcagttatgttctcaaaaagcacaagtgcagaaatatagatgcataagcaaatgtgttgcagaattgtgaaaaatttggaaaaaatgtttagtgctattaaagttatgggttacttaagttacagaaaatcagtttagtagatcactgtgtagttacggaaaatgagatggatctctactcaaagatgtcttgcagtttatgaactgagatgtaacttcatgactaacatgatgacatcgttattaactacataaactttataaagcttaaaaaatgcattcatag

SEQ ID NO: 62075 - DNA, 5923 bp, Homo sapiens
  misc_feature (61)..(61): n is a, c, g, or t
  misc_feature (2286)..(2286): n is a, c, g, or t
  misc_feature (2941)..(2941): n is a, c, g, or t
  misc_feature (3221)..(3221): n is a, c, g, or t
  misc_feature (3239)..(3239): n is a, c, g, or t
  misc_feature (3241)..(3241): n is a, c, g, or t
  misc_feature (4151)..(4151): n is a, c, g, or t
  misc_feature (4379)..(4379): n is a, c, g, or t
  misc_feature (4971)..(4973): n is a, c, g, or t
ttccagcgtcgactcacggagtccttcggatgagagcgtctgggtgccagacgaggccggngccttgccctcccaagacactgttcttcaagagaaagaccagaagagaaggcaaaaatgaatgttgaagtagtaaaagtcatgccccaggacttagtgacattcaaggatgtggcaatagatttttcccaggaagaatggcaatggatgaaccctgctcagaagcgtttatacaggagtatgatgttggagaactatcagagcctggtatcacttggtctttgcatttctaagccatatgtgatctccttattggagcaagggagagagccttgggagatgacgagtgagatgacaagaagcccattctcagattgggaatctatatatgtgacacaggaattacctctgaagcagttcatgtatgatgatgcatgcatggagggaattactagctatggacttgagtgttccacttttgaagaaaattggaaatgggaagacctttttgagaagcagatgggaagtcatgagatgtttagcaagaaagaaataatcactcataaagaaaccatcactaaggaaacagaattcaaatatactaaatttgggaaatgtatccatctggaaaacatagaagagagtatttataatcacacatcagataaaaaaagcttctccaaaaattctatggtaataaaacacaagaaagtctatgtaggaaagaagctttttaaatgtaatgaatgtgacaaaaccttcacccatagctcatcccttactgttcattttagaattcatactggtgaaaaaccatatgcatgtgaggaatgtggaaaagccttcaagcaaaggcaacaccttgctcaacatcacagaacacatactggagagaaactctttgaatgtaaagaatgtaggaaagccttcaaacaaagtgaacaccttattcagcatcaaagaattcatactggagaaaaaccatataaatgtaaggaatgcagaaaagccttcagacagcctgcacaccttgctcagcatcagagaattcatactggagagaaaccctatgaatgtaaagaatgtggcaaagccttcagtgatggctcgtcttttgctcgacatcagagatgtcacactggcaaaagaccctatgaatgtattgagtgtgggaaggcttttaggtataacacatcttttattcgtcactggaggagttatcatactggagagaagccttttaattgcattgattgtgggaaagccttcagtgttcacataggacttattctgcataggagaattcatacaggagagaaaccttacaaatgtggtgtgtgtggaaaaaccttcagctcgggttcatcccgtactgtacatcagagaattcatacaggagagaaaccttatgaatgtgatatatgtgggaaagattttagccatcatgcatcactcactcagcatcaaagagtacattctggagagaaaccgtatgaatgcaaggaatgtgggaaagcctttaggcagaatgtacaccttgttagtcatttgagaattcatactggtgaaaaaccctatgaatgtaaagaatgtggaaaagcttttagaatcagttcacagctggctactcatcagagaattcatactggagagaagccttatgaatgtattgaatgtggaaatgctttcaaacagagatcacaccttgcccaacatcagaaaactcatacaggagagaaaccttatgagtgtaatgaatgcgggaaagccttcagccaaacttccaatcttactcaacatcaaagaattcatactggagagaaaccctataaatgtactgaatgtggaaaggcttttagtgatagctcatcctgtgctcagcatcaaagactccacactggccaaaggccctatcagtgttttgaatgtgggaaggcgttcagaagaaagttatccttaatttgtcatcaaagaagtcatactggagaagaaccttaagaatgtagtgcatgtggccaagcctttagttatcaccaatcccctactgttaatcagagatgtcccactggataaaaaacatataaatgtaagaaatgtagaaaaaccttcagccaggaggctggcaagatggccgaataggaacagctctgatctgcagttcccagtgagatcaacgcagaaggtgggtgctttctgtatttccagctgaggtacctggctcatctcattgggactggttagacagtgggtgcagcccacggagggtgagctgaagcagggtggggngtaacctcacctgggaagtgcaaggagtcggggatctccctcccctagccaagggaagccatgagggactgtgccatgaggaatggtgcactccggcacagatactacgcttttcccatggtcttcgcaacccacagaccaggagatccccttgggtgcctatgccaccaaggccctgggtttcaagcacaaaactgggcggccattcgggcagacaccgagctagctgtaggagtttttttgatagcccagtggcacctggaatgccagtgaaacagaaccgcttactcccttgttaagggggctgaagccggggagccaagtggttcccatgcccactgagcccagcaagctaagatccactggcttggaattctccctgccagcacagcagtctgaagtcaacctgggatgatcaagcttggtggggggaggggcgccaaccattaccaaagcttgaataggtggttttcccctcacagcgtaaacaaagccatggggaagttccagctgagcagagccctccacagctcagcaaagcctctgtagccagactgcctctctagattcctcctctctgggcagcgcatctttgaaaaaagtgcagataaaaccctcatctccctgggacaaagcacgtgggggaaaggggtgnctgtgggcacagcttcagcagacttaaacattcctgcctgccagctctgaagagagcagcagttcttccagcacagcgcttgagctctgctaagggacagactgcctcctcaagtgggtccctgacccccatgcctcctgacggggagacacctcccagcaggggtccacagacacctcatacaggagagctctggctggcatctggtgggtgcccctctgggacaaagcttccagaggaaggaacaggcagcaatctttgctgttctgcagcctccacnggtgatacccaggcagananggtctggagtggacctccagcaaactccagcagacctgcagccgaggggcctcactgttagaaggaaaactaacaggaatataatcaacatcaacaaaggacatccacacagaaaccccatctgaaggttaccagcatcaaagaccaaaggtagataaattcacgaagatgaggagaaaccagtgcaaaaagcctgaaaattccaaaaaccagaatgcctcttctcctccaaaggatcacaactccttgccggcaagggaacaaaactggatagagaatgagtttgacaaattgacagaagtaggcttcagaaggtgggaaataacaaactcctctgagctaaaggagcatgttctaacccaatgcaaggaagctaagaaccttgaaaaaaggttagaggaattgctaactagaataaccagtttagagaagaacataaatgacctgatggagctgaaaaacacagcatgagaacttcgtgaagcatacagaagaaaaaccttcagccagattgaatgctttacagggaagaattcatactgcagagcggtcttaacaatgtaaagaatgtgcaaatgtcctcagacaagatgcacaccttgctcattagtgagttcatttcaggcagccagctcttcctcacccactacatcaccaagtcctgtggatatatctgctaaatatttttggaatttatccacttcttttggttccccagtccaaaacacagtcatttcacctggactatttcaatcattacacaggtgtccaaccttttgtcttccctgggccacattggaagaagaaaaattgtcttgtgccacacatacaatacactaacattaacaatagctgatgagctaagaaaaaaaaaaagtctgtgcatagttttagtgatacaccacctccnataagcaaaaaagtcctcacattcaatgggttgcatacccatgaattctaaaacttcatcctcttttgtccctttcgagttaacattacagccacagtgacctttcaaaaatgcaaattaagttactcttaaaactctagttaaaatacttgatgtacataaagtgcttagcaaaatgaccaactcatactaagtgcttagtaaatgttagataagtattctccaganttgatgtaaattatttttaaacagtgcattcttgaaagcagtatggcagtcataaaaattttggaaccaaaacagtatctttttttaagctaaaaaaaagttttaaatggtgtctttctatgttgcccagggtggtctcaaactcctgtgctcaagtgaccctcccacctcattctcaagtggctgcaattacaggcaaccagcctgacttaaaacagtatcttaaggtagatggtgattagcacatgtagtatgcttaacatttaatattataataagacatcacagcggctgtctcatgattaaggctgtgttcccttgttggtgaggaaattaattatgacttgataaatagaacatgttttaagaagtggctatatagctctggataaaacgaacaaaagaattagaattcctgcggggaatatatacaagactttatttagtcaagtaaaaaaaaatcactaatgtttaactgaagaaagagaaattgaataatatagttctatttcaacatgtgggttcacagatttattctaaccttccaagtaaagttgttccactagtaaagttgttctggagtatatttttnnnaaaaaaaacacttaaaatgttccacttctttcatgaggctaagtcaactctgatatcaaaccaaggggaaagaaatgaaattataggtgagtttacttagttatatacaaaaggaaattattagcctctgctgatggagaacagaggctgtgaataaatggagatccataacatgatcctacatgaatgtttcaatattgtaatcctgtaagttacttttacattgacagttctgaaattcatgttgagtgttaattaggcaggaatcagaagggaggttttgtagaaggtcgtatccatgggttttttatatttgaaaagtgttttcgatgtatcattgggggagattaaatgtctttgacagttgtccaactagaaataaagtcagcatcccatttgactccttacacagaagttcattctatactcattacagatgtaagaggttaagatggtagaggagaatgtagagtatttctgtgcctttaggttcaggaggtctttgataagcaggacaaggtccagaagccatgaagagagaaatctagggagggagaagagagatagtgggtatgcttctctagctccccatcttccaggtccacctcttgacttcctgttcccctaaacctgagcacatcacgccaggcctctctgctgccaggacagcatcagctcactcctcagcaataatctagggtatgtgggaaggtcagggctgtggtaaggaatagaatcaaagaggggtgtgatacggggtgggggcacttggccgcctgctaaacttggacattaattttatatcatgacccccttttaagcccagtgagctgggcttcagtttttcccaggccatgcacatttaatttatttcagcgtaactctaatcgtcattttcactgcatatctttattttttatcttgtcgatttaagaaatgtgaagattgat

SEQ ID NO: 62076 - DNA, 3120 bp, Homo sapiens
gactaatggccctaactaagtattaacccctgccaagaaaagagctacttcctcttgaagtaaatgaagatagtgatgctttctcttaaactttacttataaaaagcatcaaaggggggaatgaagcaggaaatataaaaggaaaaacaagtaaagggaaaacaagtcctttcctgaccagtctgactcactccaaagtcctgctggagctatgataattatctgcaaggccaggcaggggctccgaaggagggctccaggagcagggatgagaaaaacaagttctccttatcagtttccctgtttgaaattctctccccataacattattctttgttctgctctcacaactatttttgtaactatttctgcaagtctgtaaagattttgtaagttcttgtttttctttctgtagcatggcaaggtcacaagacatgtttaagtaaggtaggctcatgttgcaaatcctgttgtaaaacctgtcaacggtatgattaactgcctttgttctgcttctgtaagactgctttctcacctcgcaggttttgcgccaaaaacccgacttgcccctgcctgatgcatgtataaaagtcaagccctgtctttgttccgggctcagcctttggatgttaatccgctgggccagtggccacctaaataaaaccttcctgttgcacccagtgatctctccggcctcctggttcccacaacatataagcattccttttctctgcaacctagcccgcatctgtcattgactttttgaacaataggcattctgactggatgagatggtatctcactgtggtttttctctgcatttttctaataattaacaacgtgaattttgttttcatgtgcttgtcagccacatgtatgtcttcttttgaaaagtatctgttcatgtttttgcttactttttaattaggtttttggttttctttttgttgttgttgttgttttctgagatggagtcttgctgtgtcaccaggatggagtgcagtggcatgatctcgactcactgcaacctccacctcccaggttcagatgattcttctgcttcagtctcctgagtagctgggatcacagggaccattgacatttatggatgtggccatagaattctctttggaggagtggcaatgcctggacactgcacagcagaatttatataggcatgtgatgtgagagaactacagaaacctggttttcttgggtgaaggtattgctgtctctaagccagacctgattacctgtctggagcaaggaaaagagccctggaatatgaagagacatgagatggtagctaaacatttagttatgttttattattttgcccaacacctttggccagagcagaacataagagattctttccagaaagtgaccctaagaagatatagaaaatgtggatatgagaatttacagttaagaaaaggctgtaaaagtgtggttgagtgtaaacagcacaaaggagattatagtggacttaaccaatgtttgaaaactaccttgagcaaaatatttcaatgtaataaatatgtagaagttttccataaaatttcaaattcaaatagacacaagatgagacatactgaaaataaacattttaaatgtaaagaatgtcgcaaaacattttgcatgctttcacacctaactcaacataaaagaatccaaactagagtgaatttctacaaatgtgaagcatatggaagagcctttaactggtcctcaacccttaataaacataagagaattcatactggagaaaaaccttacaaatgtaaagaatgtggcaaagcctttaaccagacctcacaccttattagacataagagaattcatactgaagagaaaccctacaaatgtgaagaatgtggcaaagcctttaaccagtcatcgacccttactacacataatataattcatactggggaaattccctacaaatgtgagaaatgtgttagagcttttaaccaagcctcaaagcttactgaacataagttaattcataccggagagaaacgttatgaatgtgaagaatgcggcaaagcttttaaccgatcctcaaaacttactgaacataagtacattcatactggagagaagctgtacaaatgtgaagaatgtggtaaagcctttaaccagtcctcaacccttactacacataagagaattcatagtggagagaagccctacaaatgtgaagaatgtggcaaagcttttaaacaattttcaaatcttactgaccataaaaaaattcatactggagagaaaccctacaaatgtgaggaatgtggcaaagcttttaaccaactctcaaaccttactagacataaggtaattcatactggagagaaaccctacaaatgtggagaatgtggcaaagcctttaaccagtcctcagcccttaatacacataagataatccatactggagagaatccccacaaatgtagagaatctggcaaagttttccacctatcctcaaaacttagtacatgtaagaaaattcatactggagagaaactctacaaatgtgaagaatgtggcaaagcctttaactgatcttcaacccttattggacataagagaattcatactggagagaaaccctacaaatgtgaagaatgtggcaaagcttttaaccaatcttcaacacttactacacataagataattcatactgaagagaaacagtacaaatgtgatgaatgtggcaaagcttctacctgatcctcaaaactcattgaacacaagaaaattcatactggagagaaaccttacaagtgtgaagaatgtggcaaaacttctaaccatttctcaacctttactaaacataagatgattcatactggagagaagttacacaaatgtgatgaatgtgacaaagcttttaaccaatcttcaaccctttctacacataaaagaattcatactggagagaaaccctacaaatgtgaagaatgtggcagagcttttaattgatcatcaaaccttattaaacataagaaaattcatattggagagaaaccctacaaatgtgaagaatgtggaaaagcttttaaccagttctcaactcttactacacataaaataattcatactggagagaaacca

SEQ ID NO: 62077 - DNA, 538 bp, Homo sapiens
ggtctctggcggcagccggagcttctggtgtagtcttcactgctctgtgtcttctgctcctagaggcccagcttctgtggcctcgttaccatgcaggtattgggagatccacagctaagacgccaggacccactggaagcctagacaatgggaccattgacatttatggatgtggccatagaattctctttggaggagtggcaatgcctggacactgcacagcagaatttatataggcatgtgatgtgagagaactacagaaacctggttttcttgggtgaaggtattgctgtctctaagccagacctgattacctgtctggagcaaggaaaagagccctggaatatgaagagacatgagatggtagctaaacatttaggctggagtacaatggcgtgatcttggctcaacgcaacctccacctcccggattcaagcaattctcctgcctcagcctccagagtagctgggattacaggcatgcgccaccatatctggctaattcttcattttcagtagacaaggtttctccatgttgg

SEQ ID NO: 62078 - DNA, 4168 bp, Homo sapiens
acgcgtccgcccacgcgtccggagaagttacacaaatgtgatgaatgtgacaaagcttttaaccaatcttcaaccctttctacacataaaagaattcatactggagagaaaccctacaaatgtgaagaatgtggcagagcttttaattgatcatcaaaccttattaaacataagaaaattcatattggagagaaaccctacaaatgtgaagaatgtggaaaagcttttaaccagttctcaactcttactacacataaaataattcatactggagagaaaccatataaatgtgaagaatgtggcaaagctttcaacctatacgtaaaccttactacacataagaaaattcatactggagagaaaccctacaagtgtgaagaatgtggcaaagcttttagccaagtgtcaactcttactatacataaaagaattcatacagcagaatttatataggcatgtgatgtgagagaactacagaaacctggttttcttgggtgaaggtattgctgtctctaagccagacctgattacctgtctggagcaaggaaaagagccctggaatatgaagagacatgagatggtagctaaacatttagttatgttttattattttgcccaacacctttggccagagcagaacataagagattctttccagaaagtgaccctaagaagatatagaaaatgtggatatgagaatttacagttaagaaaaggctgtaaaagtgtggttgagtgtaaacagcacaaaggagattatagtggacttaaccaatgtttgaaaactaccttgagcaaaatatttcaatgtaataaatatgtagaagttttccataaaatttcaaattcaaatagacacaagatgagacatactgaaaataaacattttaaatgtaaagaatgtcgcaaaacattttgcatgctttcacacctaactcaacataaaagaatccaaactagagtgaatttctacaaatgtgaagcatatggaagagcctttaactggtcctcaacccttaataaacataagagaattcatactggagaaaaaccttacaaatgtaaagaatgtggcaaagcctttaaccagacctcacaccttattagacataagagaattcatactgaagagaaaccctacaaatgtgaagaatgtggcaaagcctttaaccagtcatcgacccttactacacataatataattcatactggggaaattccctacaaatgtgagaaatgtgttagagcttttaaccaagcctcaaagcttactgaacataagttaattcataccggagagaaacgttatgaatgtgaagaatgcggcaaagcttttaaccgatcctcaaaacttactgaacataagtacattcatactggagagaagctgtacaaatgtgaagaatgtgacaaggcctttaacctgtcctcaacgcttactaaacataaggtaattcatactggagagaaactgtacaaatgtaaagaatgtggtaaagcttttaaacagttctcacaccttgctatacataatataattcatactggagagaaactctacaaatgtgaagaatgtggcaaagcttttaactcatcctcaaaccttactgcacataagaaaaatcgtactggagagaaaccctacaaatgtgaagaatgtggcaaagctaacctatcatcaacccttactccacataagacaattcatatttgagagaaaccctgcaaatgtgaagaatgtggcaatgcttgtaactaaatctcaaactttactaaacataagaaaattaatactggaaactttacaaacctgaaagatgtgacaatgattttgacaacaccttcaaacttttctaaacataaaataaatcatactggtgagaaatcttaaaaatatgaagaatggtacaaagcctttaaatggttgtcacacttgattgtaggtaagataatttatactggaggaaactcccagaagtgtgaagaatgtggcaaaacttttaatttttcacaccttagagcacaggaaagcacttcagaaaaattgtacaaatataaatgtggaaaagccattaatatctgcttacatcttactcaacattagagagttagtgcttaataaaagcattataaaagcaattagtgtaaaatcagaaaatgaaagttttttttttttttttagatggagtcttgctctgtcacccaggctggagtgcagtggtgtgatcttggctcactgcaacctctgcctcccaggttcaagcaattctcctgccttagcctccagagtagctgagaatacaggcacacaccaccacatttggctaatttttttatttttagtagagactggctatcaccatgttggccaggctgatcttgaactcctgacctcaagtgatccacatgcctctgcctcccaaagtgctgggattataggtgtgagtcactgtgcctgacaaatataagcctttaaagagaagaaggttttcattttgaagacaaacattaggtacataaagagggttgtagtgtctttacttgtatcacagattttattgtacacattatgtactaaaggaaaatcctgaagcagtgctcaaactttgatcaacatcagggagtttatattggagaaaaactgcaaatgtaatatatttggaaaaacatttttcaaaaactactgcttagaaaacaccaggggatttatactaaaatatatttttgcagatgcagtaagtataaaagaaatttaatccaaaattaagtgtgtgtaaatatcagagaattcacagtagaaatatctaaggcactgacattttagacattgaactaatcagtgtgctgagtacagaaaataatccaaaattaaagttggtagataaattatttgtatataactttaaaagaggtagaaatatttttagttataattacatttaaagtatacttttttctttgaaaaaattacaaaatttttaaaaagtgaatgatgtaattcaactcaaattacttcatgcttttcattctattcacatgtgaaagcatgtgatcaattgctgcttcatcaaagatatgagacattcttttttgttaggtgggcaatattttttaccttttctatggaagagtaaagacattacaatgtaggatgcatgataaaaatctaagtggagaggctctttgtgtttaatttataatattgaatgatgtatgagggaagtgttcagaggaatattctgcattctagtgaaaatatcttttattttagttaaaattaaattaaaattagtagtatatctttttactaactacttttatgtaataaaatgcagcacatttaaaaaattttagattattgtgaacttaattttttaattaaactttttttttaacatgttaagaccaattgtgcattcagtgaagtattatcatgccactaacttcaacctatcccaccttactcaagggtgttggtaaaagatagtaacaatgtactatttaataacagagtggactaacatctctaataatttctcttgccagtgactttaaactaaagaacttaattaaagaacattgttcccataggttaaatttttattctttttcttatttaaacatatttttcttaacttttgtgggtacatagtgtgtgtatatatttatgccatatatggcatattttgatacaggcatatgaataggtattaatcacatcagggcaaatgaaatatccatcaactccagcatttatcatttgtattacaaaccgattctacacttttagttactttaaaatgtacaagtaaattgctattgactatagggtcattttcatgggtataataaaaattatatacaagtataaataaaatcctgagtcttaaaattctgagtcctgcttaaacattttaaaaattttgttatgtatttttctttgaacatgtctctctgcctgcaaacataacagaattttagtattggtttacatagagttaactatacccatatattactctaaaaataaatgttaagtgcaagaaagttatggactgtttttgtgtgagtgtgagtttgtacctattttcaaaagaaaagagcaatattggaacaaaacaaatattttaataaattaatgtactagacaactgaaaacttcaaaaat

SEQ ID NO: 62079 - DNA, 4890 bp, Homo sapiens
gactaatggccctaactaagtattaacccctgccaagaaaagagctacttcctcttgaagtaaatgaagatagtgatgctttctcttaaactttacttataaaaagcatcaaaggggggaatgaagcaggaaatataaaaggaaaaacaagtaaagggaaaacaagtcctttcctgaccagtctgactcactccaaagtcctgctggagctatgataattatctgcaaggccaggcaggggctccgaaggagggctccaggagcagggatgagaaaaacaagttctccttatcagtttccctgtttgaaattctctccccataacattattctttgttctgctctcacaactatttttgtaactatttctgcaagtctgtaaagattttgtaagttcttgtttttctttctgtagcatggcaaggtcacaagacatgtttaagtaaggtaggctcatgttgcaaatcctgttgtaaaacctgtcaacggtatgattaactgcctttgttctgcttctgtaagactgctttctcacctcgcaggttttgcgccaaaaacccgacttgcccctgcctgatgcatgtataaaagtcaagccctgtctttgttccgggctcagcctttggatgttaatccgctgggccagtggccacctaaataaaaccttcctgttgcacccagtgatctctccggcctcctggttcccacaacatataagcattccttttctctgcaacctagcccgcatctgtcattgactttttgaacaataggcattctgactggatgagatggtatctcactgtggtttttctctgcatttttctaataattaacaacgtgaattttgttttcatgtgcttgtcagccacatgtatgtcttcttttgaaaagtatctgttcatgtttttgcttactttttaattaggtttttggttttctttttgttgttgttgttgttttctgagatggagtcttgctgtgtcaccaggatggagtgcagtggcatgatctcgactcactgcaacctccacctcccaggttcagatgattcttctgcttcagtctcctgagtagctgggatcacagggaccattgacatttatggatgtggccatagaattctctttggaggagtggcaatgcctggacactgcacagcagaatttatataggcatgtgatgtgagagaactacagaaacctggttttcttgggtgaaggtattgctgtctctaagccagacctgattacctgtctggagcaaggaaaagagccctggaatatgaagagacatgagatggtagctaaacatttagttatgttttattattttgcccaacacctttggccagagcagaacataagagattctttccagaaagtgaccctaagaagatatagaaaatgtggatatgagaatttacagttaagaaaaggctgtaaaagtgtggttgagtgtaaacagcacaaaggagattatagtggacttaaccaatgtttgaaaactaccttgagcaaaatatttcaatgtaataaatatgtagaagttttccataaaatttcaaattcaaatagacacaagatgagacatactgaaaataaacattttaaatgtaaagaatgtcgcaaaacattttgcatgctttcacacctaactcaacataaaagaatccaaactagagtgaatttctacaaatgtgaagcatatggaagagcctttaactggtcctcaacccttaataaacataagagaattcatactggagaaaaaccttacaaatgtaaagaatgtggcaaagcctttaaccagacctcacaccttattagacataagagaattcatactgaagagaaaccctacaaatgtgaagaatgtggcaaagcctttaaccagtcatcgacccttactacacataatataattcatactggggaaattccctacaaatgtgagaaatgtgttagagcttttaaccaagcctcaaagcttactgaacataagttaattcataccggagagaaacgttatgaatgtgaagaatgcggcaaagcttttaaccgatcctcaaaacttactgaacataagtacattcatactggagagaagctgtacaaatgtgaagaatgtgacaaggcctttaacctgtcctcaacgcttactaaacataaggtaattcatactggagagaaactgtacaaatgtaaagaatgtggtaaagcttttaaacagttctcacaccttgctatacataatataattcatactggagagaaactctacaaatgtgaagaatgtggcaaagcttttaactcatcctcaaaccttactgcacataagaaaaatcgtactggagagaaaccctacaaatgtgaagaatgtggcaaagctaacctatcatcaacccttactccacataagacaattcatatttgagagaaaccctgcaaatgtgaagaatgtggcaatgcttgtaactaaatctcaaactttactaaacataagaaaattaatactggaaactttacaaacctgaaagatgtgacaatgattttgacaacaccttcaaacttttctaaacataaaataaatcatactggtgagaaatcttaaaaatatgaagaatggtacaaagcctttaaatggttgtcacacttgattgtaggtaagataatttatactggaggaaactcccagaagtgtgaagaatgtggcaaaacttttaatttttcacaccttagagcacaggaaagcacttcagaaaaattgtacaaatataaatgtggaaaagccattaatatctgcttacatcttactcaacattagagagttagtgcttaataaaagcattataaaagcaattagtgtaaaatcagaaaatgaaagttttttttttttttttagatggagtcttgctctgtcacccaggctggagtgcagtggtgtgatcttggctcactgcaacctctgcctcccaggttcaagcaattctcctgccttagcctccagagtagctgagaatacaggcacacaccaccacatttggctaatttttttatttttagtagagactggctatcaccatgttggccaggctgatcttgaactcctgacctcaagtgatccacatgcctctgcctcccaaagtgctgggattataggtgtgagtcactgtgcctgacaaatataagcctttaaagagaagaaggttttcattttgaagacaaacattaggtacataaagagggttgtagtgtctttacttgtatcacagattttattgtacacattatgtactaaaggaaaatcctgaagcagtgctcaaactttgatcaacatcagggagtttatattggagaaaaactgcaaatgtaatatatttggaaaaacatttttcaaaaactactgcttagaaaacaccaggggatttatactaaaatatatttttgcagatgcagtaagtataaaagaaatttaatccaaaattaagtgtgtgtaaatatcagagaattcacagtagaaatatctaaggcactgacattttagacattgaactaatcagtgtgctgagtacagaaaataatccaaaattaaagttggtagataaattatttgtatataactttaaaagaggtagaaatatttttagttataattacatttaaagtatacttttttctttgaaaaaattacaaaatttttaaaaagtgaatgatgtaattcaactcaaattacttcatgcttttcattctattcacatgtgaaagcatgtgatcaattgctgcttcatcaaagatatgagacattcttttttgttaggtgggcaatattttttaccttttctatggaagagtaaagacattacaatgtaggatgcatgataaaaatctaagtggagaggctctttgtgtttaatttataatattgaatgatgtatgagggaagtgttcagaggaatattctgcattctagtgaaaatatcttttattttagttaaaattaaattaaaattagtagtatatctttttactaactacttttatgtaataaaatgcagcacatttaaaaaattttagattattgtgaacttaattttttaattaaactttttttttaacatgttaagaccaattgtgcattcagtgaagtattatcatgccactaacttcaacctatcccaccttactcaagggtgttggtaaaagatagtaacaatgtactatttaataacagagtggactaacatctctaataatttctcttgccagtgactttaaactaaagaacttaattaaagaacattgttcccataggttaaatttttattctttttcttatttaaacatatttttcttaacttttgtgggtacatagtgtgtgtatatatttatgccatatatggcatattttgatacaggcatatgaataggtattaatcacatcagggcaaatgaaatatccatcaactccagcatttatcatttgtattacaaaccgattctacacttttagttactttaaaatgtacaagtaaattgctattgactatagggtcattttcatgggtataataaaaattatatacaagtataaataaaatcctgagtcttaaaattctgagtcctgcttaaacattttaaaaattttgttatgtatttttctttgaacatgtctctctgcctgcaaacataacagaattttagtattggtttacatagagttaactatacccatatattactctaaaaataaatgttaagtgcaagaaagttatggactgtttttgtgtgagtgtgagtttgtacctattttcaaaagaaaagagcaatattggaacaaaacaaatattttaataaattaatgtactagacaactgaaaacttcaaaaat

SEQ ID NO: 62080 - DNA, 4055 bp, Homo sapiens
acgcgtccgcccacgcgtccggagaagttacacaaatgtgatgaatgtgacaaagcttttaaccaatcttcaaccctttctacacataaaagaattcatactggagagaaaccctacaaatgtgaagaatgtggcagagcttttaattgatcatcaaaccttattaaacataagaaaattcatattggagagaaaccctacaaatgtgaagaatgtggaaaagcttttaaccagttctcaactcttactacacataaaataattcatactggagagaaaccatataaatgtgaagaatgtggcaaagctttcaacctatacgtaaaccttactacacataagaaaattcatactggagagaaaccctacaagtgtgaagaatgtggcaaagcttttagccaagtgtcaactcttactatacataaaagaattcatacagcagaatttatataggcatgtgatgtgagagaactacagaaacctggttttcttgggtgaaggtattgctgtctctaagccagacctgattacctgtctggagcaaggaaaagagccctggaatatgaagagacatgagatggtagctaaacatttagttatgttttattattttgcccaacacctttggccagagcagaacataagagattctttccagaaagtgaccctaagaagatatagaaaatgtggatatgagaatttacagttaagaaaaggctgtaaaagtgtggttgagtgtaaacagcacaaaggagattatagtggacttaaccaatgtttgaaaactaccttgagcaaaatatttcaatgtaataaatatgtagaagttttccataaaatttcaaattcaaatagacacaagatgagacatactgaaaataaacattttaaatgtaaagaatgtcgcaaaacattttgcatgctttcacacctaactcaacataaaagaatccaaactagagtgaatttctacaaatgtgaagcatatggaagagcctttaactggtcctcaacccttaataaacataagagaattcatactggagaaaaaccttacaaatgtaaagaatgtggcaaagcctttaaccagacctcacaccttattagacataagagaattcatactgaagagaaaccctacaaatgtgaagaatgtggcaaagcctttaaccagtcatcgacccttactacacataatataattcatactggggaaattccctacaaatgtgagaaatgtgttagagcttttaaccaagcctcaaagcttactgaacataagttaattcataccggagagaaacgttatgaatgtgaagaatgcggcaaagcttttaaccgatcctcaaaacttactgaacataagtacattcatactggagagaagctgtacaaatgtgaagaatgtgacaaggcctttaacctgtcctcaacgcttactaaacataaggtaattcatactggagagaaactgtacaaatgtaaagaatgtggtaaagcttttaaacagttctcacaccttgctatacataatataattcatactggagagaaactctacaaatgtgaagaatgtggcaaagcttttaactcatcctcaaaccttactgcacataagaaaaatcgtactggagagaaaccctacaaatgtgaagaatgtggcaaagctaacctatcatcaacccttactccacataagacaattcatatttgagagaaaccctgcaaatgtgaagaatgtggcaatgcttgtaactaaatctcaaactttactaaacataagaaaattaatactggaaactttacaaacctgaaagatgtgacaatgattttgacaacaccttcaaacttttctaaacataaaataaatcatactggtgagaaatcttaaaaatatgaagaatggtacaaagcctttaaatggttgtcacacttgattgtaggtaagataatttatactggaggaaactcccagaagtgtgaagaatgtggcaaaacttttaatttttcacaccttagagcacaggaaagcacttcagaaaaattgtacaaatataaatgtggaaaagccattaatatctgcttacatcttactcaacattagagagttagtgcttaataaaagcattataaaagcaattagtgtaaaatcagaaaatgaaagttttttttttttttttagatggagtcttgctctgtcacccaggctggagtgcagtggtgtgatcttggctcactgcaacctctgcctcccaggttcaagcaattctcctgccttagcctccagagtagctgagaatacaggcacacaccaccacatttggctaatttttttatttttagtagagactggctatcaccatgttggccaggctgatcttgaactcctgacctcaagtgatccacatgcctctgcctcccaaagtgctgggattataggtgtgagtcactgtgcctgacaaatataagcctttaaagagaagaaggttttcattttgaagacaaacattaggtacataaagagggttgtagtgtctttacttgtatcacagattttattgtacacattatgtactaaaggaaaatcctgaagcagtgctcaaactttgatcaacatcagggagtttatattggagaaaaactgcaaatgtaatatatttggaaaaacatttttcaaaaactactgcttagaaaacaccaggggatttatactaaaatatatttttgcagatgcagtaagtataaaagaaatttaatccaaaattaagtgtgtgtaaatatcagagaattcacagtagaaatatctaaggcactgacattttagacattgaactaatcagtgtgctgagtacagaaaataatccaaaattaaagttggtagataaattatttgtatataactttaaaagaggtagaaatatttttagttataattacatttaaagtatacttttttctttgaaaaaattacaaaatttttaaaaagtgaatgatgtaattcaactcaaattacttcatgcttttcattctattcacatgtgaaagcatgtgatcaattgctgcttcatcaaagatatgagacattcttttttgttaggtgggcaatattttttaccttttctatggaagagtaaagacattacaatgtaggatgcatgataaaaatctaagtggagaggctctttgtgtttaatttataatattgaatgatgtatgagggaagtgttcagaggaatattctgcattctagtgaaaatatcttttattttagttaaaattaaattaaaattagtagtatatctttttactaactacttttatgtaataaaatgcagcacatttaaaaaattttagattattgtgaacttaattttttaattaaactttttttttaacatgttaagaccaattgtgcattcagtgaagtattatcatgccactaacttcaacctatcccaccttactcaagggtgttggtaaaagatagtaacaatgtactatttaataacagagtggactaacatctctaataatttctcttgccagtgactttaaactaaagaacttaattaaagaacattgttcccataggttaaatttttattctttttcttatttaaacatatttttcttaacttttgtgggtacatagtgtgtgtatatatttatgccatatatggcatattttgatacaggcatatgaataggtattaatcacatcagggcaaatgaaatatccatcaactccagcatttatcatttgtattacaaaccgattctacacttttagttactttaaaatgtacaagtaaattgctattgactatagggtcattttcatgggtataataaaaattatatacaagtataaataaaatcctgagtcttaaaattctgagtcctgcttaaacattttaaaaattttgttatgtatttttctttgaacatgtctctctgcctgcaaacataacagaattttagtattggtttacatagagttaactatacccatatattactctaaaaataaatgttaagtgcaagaaagttatgga

SEQ ID NO: 62081 - DNA, 2988 bp, Homo sapiens
aaacttactacacataagaaaattcatacaggagagaaaccttacaaatgtgaaaaatgtgctaaagcttttagccagtcttcaaccctttctacatataagataattcacactggagagaaatgctacaaatgtgaagaatgtggcaaagtttttaaccgatcttcaaaccttacagaccataaaaaaattcatacaggagagaaatcctacaaatgtgaagaatgtgacaaggcctttaacctgtcctcaacgcttactaaacataaggtaattcatactggagagaaactgtacaaatgtaaagaatgtggtaaagcttttaaacagttctcacaccttgctatacataatataattcatactggagagaaactctacaaatgtgaagaatgtggcaaagcttttaactcatcctcaaaccttactgcacataagaaaaatcgtactggagagaaaccctacaaatgtgaagaatgtggcaaagctaacctatcatcaacccttactccacataagacaattcatatttgagagaaaccctgcaaatgtgaagaatgtggcaatgcttgtaactaaatctcaaactttactaaacataagaaaattaatactggaaactttacaaacctgaaagatgtgacaatgattttgacaacaccttcaaacttttctaaacataaaataaatcatactggtgagaaatcttaaaaatatgaagaatggtacaaagcctttaaatggttgtcacacttgattgtaggtaagataatttatactggaggaaactcccagaagtgtgaagaatgtggcaaaacttttaatttttcacaccttagagcacaggaaagcacttcagaaaaattgtacaaatataaatgtggaaaagccattaatatctgcttacatcttactcaacattagagagttagtgcttaataaaagcattataaaagcaattagtgtaaaatcagaaaatgaaagttttttttttttttttagatggagtcttgctctgtcacccaggctggagtgcagtggtgtgatcttggctcactgcaacctctgcctcccaggttcaagcaattctcctgccttagcctccagagtagctgagaatacaggcacacaccaccacatttggctaatttttttatttttagtagagactggctatcaccatgttggccaggctgatcttgaactcctgacctcaagtgatccacatgcctctgcctcccaaagtgctgggattataggtgtgagtcactgtgcctgacaaatataagcctttaaagagaagaaggttttcattttgaagacaaacattaggtacataaagagggttgtagtgtctttacttgtatcacagattttattgtacacattatgtactaaaggaaaatcctgaagcagtgctcaaactttgatcaacatcagggagtttatattggagaaaaactgcaaatgtaatatatttggaaaaacatttttcaaaaactactgcttagaaaacaccaggggatttatactaaaatatatttttgcagatgcagtaagtataaaagaaatttaatccaaaattaagtgtgtgtaaatatcagagaattcacagtagaaatatctaaggcactgacattttagacattgaactaatcagtgtgctgagtacagaaaataatccaaaattaaagttggtagataaattatttgtatataactttaaaagaggtagaaatatttttagttataattacatttaaagtatacttttttctttgaaaaaattacaaaatttttaaaaagtgaatgatgtaattcaactcaaattacttcatgcttttcattctattcacatgtgaaagcatgtgatcaattgctgcttcatcaaagatatgagacattcttttttgttaggtgggcaatattttttaccttttctatggaagagtaaagacattacaatgtaggatgcatgataaaaatctaagtggagaggctctttgtgtttaatttataatattgaatgatgtatgagggaagtgttcagaggaatattctgcattctagtgaaaatatcttttattttagttaaaattaaattaaaattagtagtatatctttttactaactacttttatgtaataaaatgcagcacatttaaaaaattttagattattgtgaacttaattttttaattaaactttttttttaacatgttaagaccaattgtgcattcagtgaagtattatcatgccactaacttcaacctatcccaccttactcaagggtgttggtaaaagatagtaacaatgtactatttaataacagagtggactaacatctctaataatttctcttgccagtgactttaaactaaagaacttaattaaagaacattgttcccataggttaaatttttattctttttcttatttaaacatatttttcttaacttttgtgggtacatagtgtgtgtatatatttatgccatatatggcatattttgatacaggcatatgaataggtattaatcacatcagggcaaatgaaatatccatcaactccagcatttatcatttgtattacaaaccgattctacacttttagttactttaaaatgtacaagtaaattgctattgactatagggtcattttcatgggtataataaaaattatatacaagtataaataaaatcctgagtcttaaaattctgagtcctgcttaaacattttaaaaattttgttatgtatttttctttgaacatgtctctctgcctgcaaacataacagaattttagtattggtttacatagagttaactatacccatatattactctaaaaataaatgttaagtgcaagaaagttatggactgtttttgtgtgagtgtgagtttgtacctattttcaaaagaaaagagcaatattggaacaaaacaaatattttaataaattaatgtactagacaactgaaaacttcaaaaat

SEQ ID NO: 62082 - DNA, 337 bp, Homo sapiens
gtatatcaggacacaacagatccaaacgcatctctgcaaatatcgctcagctgaggagatgcagagattactgaaattttaatccattaattaaaagatattatcttcattcattcttcatgaattactacctcagttgctttgctatataaattttcccaactcaaatgctcttctccccactaccccccgacaccaatcccaaacaactcaagctcctatccttccatgaaacattttttccaaagacattccgggtcccactgattaatcttttctcagaacttctattagagagtctatcccacatagttgaatcttggagtctattctattt

SEQ ID NO: 62083 - DNA, 1016 bp, Homo sapiens
aattggcaacccggaagcggtcggtagtgcggcgctgtttaaagatggcggcggaggaacctcagcagcagaagcaggagccgctgggcagcgactccgaaggtgttaactgtctggcctatgatgaagccatcatggctcagcaggaccgaattcagcaagagattgctgtgcagaaccctctggtgtcagagcggctggagctctcggtcctatacaaggagtatgctgaagatgacaacatctatcaacagaagatcaaggacctccacaaaaagtactcgtacatccgcaagaccaggcctgacggcaactgtttctatcgggctttcggattctcccacttggaggcactgctggatgacagcaaggagttgcagcggttcaaggctgtgtctgccaagagcaaggaagacctggtgtcccagggcttcactgaattcacaattgaggatttccacaacacgttcatggacctgattgagcaggtggagaagcagacctctgtcgccgacctgctggcctccttcaatgaccagagcacctccgactaccttgtggtctacctgcggctgctcacctcgggctacctgcagcgcgagagcaagttcttcgagcacttcatcgagggtggacggactgtcaaggagttctgccagcaggaggtggagcccatgtgcaaggagagcgaccacatccacatcattgcgctggcccaggccctcagcgtgtccatccaggtggagtacatggaccgcggcgagggcggcaccaccaatccgcacatcttccctgagggctccgagcccaaggtctaccttctctaccggcctggacactacgatatcctctacaaatagggctggctccagcccgctgctgccctgctgcccccctctgccaggcgctagacatgtacagaggtttttctgtggttgtaaatggtcctatttcacccccttcttcctgtcacatgacccccccccatgttttattaaagggggtgctggtggtga

SEQ ID NO: 62084 - DNA, 1720 bp, Homo sapiens
atggtgctaaggaaaatacgtgcggcgctgtttaaagatggcggcggaggaacctcagcagcagaagcaggagccgctgggcagcgactccgaaggtgttaactgtctggcctatgatgaagccatcatggctcagcaggaccgaattcagcaagagattgctgtgcagaaccctctggtgtcagagcggctggagctctcggtcctatacaaggagtatgctgaagatgacaacatctatcaacagaagatcaaggacctccacaaaaagtactcgtacatccgcaagaccaggcctgacggcaactgtttctatcgggctttcggattctcccacttggaggcactgctggatgacagcaaggagttgcagcggttcaaggctgtgtctgccaagagcaaggaagacctggtgtcccagggcttcactgaattcacaattgaggatttccacaacacgttcatggacctgattgagcaggtggagaagcagacctctgtcgccgacctgctggcctccttcaatgaccagagcacctccgactaccttgtggtctacctgcggctgctcacctcgggctacctgcagcgcgagagcaagttcttcgagcacttcatcgagggtggacggactgtcaaggagttctgccagcaggaggtggagcccatgtgcaaggagagcgaccacatccacatcattgcgctggcccaggccctcagcgtgtccatccaggtggagtacatggaccgcggcgagggcggcaccaccaatccgcacatcttccctgagggctccgagcccaaggtctaccttctctaccggcctggacactacgatatcctctacaaatagggctggctccagcccgctgctgccctgctgcccccctctgccaggcgctagacatgtacagaggtttttctgtggttgtaaatggtcctatttcacccccttcttcctgtcacatgacccccccccatgttttattaaagggggtgctggtggtgagccgtgtgtgcgtgtccctgctctgctgcccgcctggctgctctgtctgctgccccctccccccaggtgggtccccctgcttttcacctatctactcctgagcttccccaacaggagcaggtttgaggggccaggcctcttggaggcccctcctgcttcgttgggttctgcttccttcccttcttagctggctcaggggcttctatgggatcctggaagttccttagggacttgcccagggtcccagggccacccacacttcatctgctccctcataggccccacctccacgtcccggctgggccccagaccccagcttcctgccctccaccgggagtctgcatggttgggagtcctgggtggaggggcctttgtgaggctggacccggctcagggcaggtggaggagctgggcctcccacagggtgcccgggcagtgccatcctggtgggggagggcagccttcaaacgtgtggggtctacagtcctcaggtctaggcagggctgccggttctccacctccccatccgccccaggccccctgcctgtgcctgccttgcaccccctctgcttgggccacggtgtctctgcattgcctgcctttttgccttcacctcttttcttccccgccccctgcacattcggggtctcagcccccaggctgtgagctccttgggggcaggccctcaataaatgtgaactgctgctgccg

SEQ ID NO: 62085 - DNA, 1786 bp, Homo sapiens
aattggcaacccggaagcggtcggtagtgcggcgctgtttaaagatggcggcggaggaacctcagcagcagaagcaggagccgctgggcagcgactccgaaggtgttaactgtctggcctatgatgaagccatcatggctcagcaggaccgaattcagcaagagattgctgtgcagaaccctctggtgtcagagcggctggagctctcggtcctatacaaggagtatgctgaagatgacaacatctatcaacagaagatcaaggacctccacaaaaagtactcgtacatccgcaagaccaggcctgacggcaactgtttctatcgggctttcggattctcccacttggaggcactgctggatgacagcaaggagttgcagcggttcaaggctgtgtctgccaagagcaaggaagacctggtgtcccagggcttcactgaattcacaattgaggatttccacaacacgttcatggacctgattgagcaggtggagaagcagacctctgtcgccgacctgctggcctccttcaatgaccagagcacctccgactaccttgtggtctacctgcggctgctcacctcgggctacctgcagcgcgagagcaagttcttcgagcacttcatcgagggtggacggactgtcaaggagttctgccagcaggaggtggagcccatgtgcaaggagagcgaccacatccacatcattgcgctggcccaggccctcagcgtgtccatccaggtggagtacatggaccgcggcgagggcggcaccaccaatccgcacatcttccctgagggctccgagcccaaggtctaccttctctaccggcctggacactacgatatcctctacaaatagggctggctccagcccgctgctgccctgctgcccccctctgccaggcgctagacatgtacagaggtttttctgtggttgtaaatggtcctatttcacccccttcttcctgtcacatgacccccccccatgttttattaaagggggtgctggtggtgagccgtgtgtgcgtgtccctgctctgctgcccgcctggctgctctgtctgctgccccctccccccaggtgggtccccctgcttttcacctatctactcctgagcttccccaacaggagcaggtttgaggggccaggcctcttggaggcccctcctgcttcgttgggttctgcttccttcccttcttagctggctcaggggcttctatgggatcctggaagttccttagggacttgcccagggtcccagggccacccacacttcatctgctccctcataggccccacctccacgtcccggctgggccccagaccccagcttcctgccctccaccgggagtctgcatggttgggagtcctgggtggaggggcctttgtgaggctggacccggctcagggcaggtggaggagctgggcctcccacagggtgcccgggcagtgccatcctggtgggggagggcagccttcaaacgtgtggggtctacagtcctcaggtctaggcagggctgccggttctccacctccccatccgccccaggccccctgcctgtgcctgccttgcaccccctctgcttgggccacggtgtctctgcattgcctgcctttttgccttcacctcttttcttccccgccccctgcacattcggggtctcagcccccaggctgtgagctccttgggggcaggccctcaataaatgtgaactgctgctgccgcctctgccgtccgcctgtgcctctgcccgcctggctcaccgagagctcttgccagcccc

SEQ ID NO: 62086 - DNA, 1152 bp, Homo sapiens
  misc_feature (1144)..(1144): n is a, c, g, or t
aattggcaacccggaagcggtcggtagtgcggcgctgtttaaagatggcggcggaggaacctcagcagcagaagcaggagccgctgggcagcgactccgaaggtgttaactgtctggcctatgatgaagccatcatggctcagcaggaccgaattcagcaagagattgctgtgcagaaccctctggtgtcagagcggctggagctctcggtcctatacaaggagtatgctgaagatgacaacatctatcaacagaagatcaaggacctccacaaaaagtactcgtacatccgcaagaccaggcctgacggcaactgtttctatcgggctttcggattctcccacttggaggcactgctggatgacagcaaggagttgcagcggttcaaggctgtgtctgccaagagcaaggaagacctggtgtcccagggcttcactgaattcacaattgaggatttccacaacacgttcatggacctgattgagcaggtggagaagcagacctctgtcgccgacctgctggcctccttcaatgaccagagcacctccgactaccttgtggtctacctgcggctgctcacctcgggctacctgcagcgcgagagcaagttcttcgagcacttcatcgagggtggacggactgtcaaggagttctgccagcaggaggtggagcccatgtgcaaggagagcgaccacatccacatcattgcgctggcccaggccctcagcgtgtccatccaggtggagtacatggaccgcggcgagggcggcaccaccaatccgcacatcttccctgagggctccgagcccaaggtctaccttctctaccggcctggacactacgatatcctctacaaatagggctggctccagcccgctgctgccctgctgcccccctctgccaggcgctagacatgtacagaggtttttctgtggttgtaaatggtcctatttcacccccttcttcctgtcacatgacccccccccatgttttattaaagggggtgctggtggtgagccgtgtgtgcgtgtccctgctctgctgcccgcctggctgctctgtctgctgccctccccagtggtccctgctttactactatctgacttctacagacagttgaggcagctcttgagcctctctcgtngtttctct

SEQ ID NO: 62087 - DNA, 1711 bp, Homo sapiens
aattggcaacccggaagcggtcggtagtgcggcgctgtttaaagatggcggcggaggaacctcagcagcagaagcaggagccgctgggcagcgactccgaaggtgttaactgtctggcctatgatgaagccatcatggctcagcaggaccgaattcagcaagagattgctgtgcagaaccctctggtgtcagagcggctggagctctcggtcctatacaaggagtatgctgaagatgacaacatctatcaacagaagatcaaggacctccacaaaaagtactcgtacatccgcaagaccaggcctgacggcaactgtttctatcgggctttcggattctcccacttggaggcactgctggatgacagcaaggagttgcagcggttcaaggctgtgtctgccaagagcaaggaagacctggtgtcccagggcttcactgaattcacaattgaggatttccacaacacgttcatggacctgattgagcaggtggagaagcagacctctgtcgccgacctgctggcctccttcaatgaccagagcacctccgactaccttgtggtctacctgcggctgctcacctcgggctacctgcagcgcgagagcaagttcttcgagcacttcatcgagggtggacggactgtcaaggagttctgccagcaggaggtggagcccatgtgcaaggagagcgaccacatccacatcattgcgctggcccaggccctcagcgtgtccatccaggtggagtacatggaccgcggcgagggcggcaccaccaatccgcacatcttccctgagggctccgagcccaaggtctaccttctctaccggcctggacactacgatatcctctacaaatagggctggctccagcccgctgctgccctgctgcccccctctgccaggcgctagacatgtacagaggtttttctgtggttgtaaatggtcctatttcacccccttcttcctgtcacatgacccccccccatgttttattaaagggggtgctggtggtgaaaaaaaaaaaaaaaaaaaaaaaaaaaaaaaaaaaaaaaaaaaaaaaaaaaaaaaagagagaggggcgcgcgcgcccccaaaaatatctcccccgcggggggcgcccaaccccacgcgcgcccccccgagtttctgtgggcacaagagaggggcgccccacaaagagaggagcgacggcgtatatatatataaacaccgcgagacggcgcgcgtggcgcgcgcgcgggattataaacacagcggggggcgagcggcgggggaacaacacgcggcggacaagcggggagaagaactctctatcggaggacaagagagacgcgcgcctctctatctctgtcgcggggggagggggtgcgacgagaaacatattgtgtgtggggggcgacacacatctctctccctacctagacgagagatatatatcaaacgcctctctctagagagggagcgatacattctctatcacacatcttctctacaagcgtgtcgtgtcatcaagggggggtgggtgagtacacacccgcgacgagggcgtgctgacaatgtagtgtgtggcgccaacgggtgcctgtagtgaaaaaagcctgtctctggcgcacctctcgcgtgtgcagctctctatttcattatatcagccgcaaaacaacctctttatttatatccacccggggggggcgctcctataacgaaacaca

SEQ ID NO: 62088 - DNA, 1831 bp, Homo sapiens
aattggcaacccggaagcggtcggtagtgcggcgctgtttaaagatggcggcggaggaacctcagcagcagaagcaggagccgctgggcagcgactccgaaggtgttaactgtctggcctatgatgaagccatcatggctcagcaggaccgaattcagcaagagattgctgtgcagaaccctctggtgtcagagcggctggagctctcggtcctatacaaggagtatgctgaagatgacaacatctatcaacagaagatcaaggacctccacaaaaagtactcgtacatccgcaagaccaggcctgacggcaactgtttctatcgggctttcggattctcccacttggaggcactgctggatgacagcaaggagttgcagcggttcaaggctgtgtctgccaagagcaaggaagacctggtgtcccagggcttcactgaattcacaattgaggatttccacaacacgttcatggacctgattgagcaggtggagaagcagacctctgtcgccgacctgctggcctccttcaatgaccagagcacctccgactaccttgtggtctacctgcggctgctcacctcgggctacctgcagcgcgagagcaagttcttcgagcacttcatcgagggtggacggactgtcaaggagttctgccagcaggtgccgtccccctcccctttactctcggccgggggagtgcagtgggcccacagggcctggggcggggtgcggagaccagggcctgaccggcacctgtgccacaggaggtggagcccatgtgcaaggagagcgaccacatccacatcattgcgctggcccaggccctcagcgtgtccatccaggtggagtacatggaccgcggcgagggcggcaccaccaatccgcacatcttccctgagggctccgagcccaaggtctaccttctctaccggcctggacactacgatatcctctacaaatagggctggctccagcccgctgctgccctgctgcccccctctgccaggcgctagacatgtacagaggtttttctgtggttgtaaatggtcctatttcacccccttcttcctgtcacatgacccccccccatgttttattaaagggggtgctggtggtgagccgtgtgtgcgtgtccctgctctgctgcccgcctggctgctctgtctgctgccccctccccccaggtgggtccccctgcttttcacctatctactcctgagcttccccaacaggagcaggtttgaggggccaggcctcttggaggcccctcctgcttcgttgggttctgcttccttcccttcttagctggctcaggggcttctatgggatcctggaagttccttagggacttgcccagggtcccagggccacccacacttcatctgctccctcataggccccacctccacgtcccggctgggccccagaccccagcttcctgccctccaccgggagtctgcatggttgggagtcctgggtggaggggcctttgtgaggctggacccggctcagggcaggtggaggagctgggcctcccacagggtgcccgggcagtgccatcctggtgggggagggcagccttcaaacgtgtggggtctacagtcctcaggtctaggcagggctgccggttctccacctccccatccgccccaggccccctgcctgtgcctgccttgcaccccctctgcttgggccacggtgtctctgcattgcctgcctttttgccttcacctcttttcttccccgccccctgcacattcggggtctcagcccccaggctgtgagctccttgggggcaggccctcaataaatgtgaactgctgctgccg

SEQ ID NO: 62089 - DNA, 1683 bp, Homo sapiens
cggccctgggatgtgaggggcctgcgggatctgtccctgaggcctgcgactttttctggtgttaactgtctggcctatgatgaagccatcatggctcagcaggaccgaattcagcaagagattgctgtgcagaaccctctggtgtcagagcggctggagctctcggtcctatacaaggagtatgctgaagatgacaacatctatcaacagaagatcaaggacctccacaaaaagtactcgtacatccgcaagaccaggcctgacggcaactgtttctatcgggctttcggattctcccacttggaggcactgctggatgacagcaaggagttgcagcggttcaaggctgtgtctgccaagagcaaggaagacctggtgtcccagggcttcactgaattcacaattgaggatttccacaacacgttcatggacctgattgagcaggtggagaagcagacctctgtcgccgacctgctggcctccttcaatgaccagagcacctccgactaccttgtggtctacctgcggctgctcacctcgggctacctgcagcgcgagagcaagttcttcgagcacttcatcgagggtggacggactgtcaaggagttctgccagcaggaggtggagcccatgtgcaaggagagcgaccacatccacatcattgcgctggcccaggccctcagcgtgtccatccaggtggagtacatggaccgcggcgagggcggcaccaccaatccgcacatcttccctgagggctccgagcccaaggtctaccttctctaccggcctggacactacgatatcctctacaaatagggctggctccagcccgctgctgccctgctgcccccctctgccaggcgctagacatgtacagaggtttttctgtggttgtaaatggtcctatttcacccccttcttcctgtcacatgacccccccccatgttttattaaagggggtgctggtggtgagccgtgtgtgcgtgtccctgctctgctgcccgcctggctgctctgtctgctgccccctccccccaggtgggtccccctgcttttcacctatctactcctgagcttccccaacaggagcaggtttgaggggccaggcctcttggaggcccctcctgcttcgttgggttctgcttccttcccttcttagctggctcaggggcttctatgggatcctggaagttccttagggacttgcccagggtcccagggccacccacacttcatctgctccctcataggccccacctccacgtcccggctgggccccagaccccagcttcctgccctccaccgggagtctgcatggttgggagtcctgggtggaggggcctttgtgaggctggacccggctcagggcaggtggaggagctgggcctcccacagggtgcccgggcagtgccatcctggtgggggagggcagccttcaaacgtgtggggtctacagtcctcaggtctaggcagggctgccggttctccacctccccatccgccccaggccccctgcctgtgcctgccttgcaccccctctgcttgggccacggtgtctctgcattgcctgcctttttgccttcacctcttttcttccccgccccctgcacattcggggtctcagcccccaggctgtgagctccttgggggcaggccctcaataaatgtgaactgctgctgccg

SEQ ID NO: 62090 - DNA, 1791 bp, Homo sapiens
  misc_feature (42)..(42): n is a, c, g, or t
caacaacgtcacggccaacggatgcgcaggcccccggtgagngttgtaaaagatcggacgagggtgcggcgctgtttaaagatggcggcggaggaacctcagcagcagaagcaggagccgctgggcagcgactccgaaggtgttaactgtctggcctatgatgaagccatcatggctcagcaggaccgaattcagcaagaggacatgacagatccctgcctcctccagattgctgtgcagaaccctctggtgtcagagcggctggagctctcggtcctatacaaggagtatgctgaagatgacaacatctatcaacagaagatcaaggacctccacaaaaagtactcgtacatccgcaagaccaggcctgacggcaactgtttctatcgggctttcggattctcccacttggaggcactgctggatgacagcaaggagttgcagcggttcaaggctgtgtctgccaagagcaaggaagacctggtgtcccagggcttcactgaattcacaattgaggatttccacaacacgttcatggacctgattgagcaggtggagaagcagacctctgtcgccgacctgctggcctccttcaatgaccagagcacctccgactaccttgtggtctacctgcggctgctcacctcgggctacctgcagcgcgagagcaagttcttcgagcacttcatcgagggtggacggactgtcaaggagttctgccagcaggaggtggagcccatgtgcaaggagagcgaccacatccacatcattgcgctggcccaggccctcagcgtgtccatccaggtggagtacatggaccgcggcgagggcggcaccaccaatccgcacatcttccctgagggctccgagcccaaggtctaccttctctaccggcctggacactacgatatcctctacaaatagggctggctccagcccgctgctgccctgctgcccccctctgccaggcgctagacatgtacagaggtttttctgtggttgtaaatggtcctatttcacccccttcttcctgtcacatgacccccccccatgttttattaaagggggtgctggtggtgagccgtgtgtgcgtgtccctgctctgctgcccgcctggctgctctgtctgctgccccctccccccaggtgggtccccctgcttttcacctatctactcctgagcttccccaacaggagcaggtttgaggggccaggcctcttggaggcccctcctgcttcgttgggttctgcttccttcccttcttagctggctcaggggcttctatgggatcctggaagttccttagggacttgcccagggtcccagggccacccacacttcatctgctccctcataggccccacctccacgtcccggctgggccccagaccccagcttcctgccctccaccgggagtctgcatggttgggagtcctgggtggaggggcctttgtgaggctggacccggctcagggcaggtggaggagctgggcctcccacagggtgcccgggcagtgccatcctggtgggggagggcagccttcaaacgtgtggggtctacagtcctcaggtctaggcagggctgccggttctccacctccccatccgccccaggccccctgcctgtgcctgccttgcaccccctctgcttgggccacggtgtctctgcattgcctgcctttttgccttcacctcttttcttccccgccccctgcacattcggggtctcagcccccaggctgtgagctccttgggggcaggccctcaataaatgtgaactgctgctgccg

SEQ ID NO: 62091 - DNA, 2080 bp, Homo sapiens
  misc_feature (42)..(42): n is a, c, g, or t
caacaacgtcacggccaacggatgcgcaggcccccggtgagngttgtaaaagatcggacgagggtgcggcgctgtttaaagatggcggcggaggaacctcagcagcagaagcaggagccgctgggcagcgactccgaaggtgttaactgtctggcctatgatgaagccatcatggctcagcaggaccgaattcagcaagagattgctgtgcagaaccctctggtgtcagagcggctggagctctcggtcctatacaaggagtatgctgaagatgacaacatctatcaacagaagatcaaggacctccacaaaaagtactcgtacatccgcaagaccaggcctgacggcaactgtttctatcgggctttcggattctcccacttggaggcactgctggatgacagcaaggagttgcagcggtgagaagggtgggcactgggcaccgaggcaggtgggtgtctacctcctccccgggcgagtaggatgtgtctcgagtagggtgtctccctccttcccgggcgatgggctggactctggccttgccaggcggggcagtgctgtctcggccctggcgtctgggctggtcgaggagcccatgctgggcccgcctttccatcccacccccaggttcaaggctgtgtctgccaagagcaaggaagacctggtgtcccagggcttcactgaattcacaattgaggatttccacaacacggtgagccctggtgcctgtcttgggctgggccatgggggaggggttcacctggtgaggaccacccatctcctccccgtcatcttgccctttctccctccgtggctgcagttcatggacctgattgagcaggtggagaagcagacctctgtcgccgacctgctggcctccttcaatgaccagagcacctccgactaccttgtggtctacctgcggctgctcacctcgggctacctgcagcgcgagagcaagttcttcgagcacttcatcgagggtggacggactgtcaaggagttctgccagcaggaggtggagcccatgtgcaaggagagcgaccacatccacatcattgcgctggcccaggccctcagcgtgtccatccaggtggagtacatggaccgcggcgagggcggcaccaccaatccgcacatcttccctgagggctccgagcccaaggtctaccttctctaccggcctggacactacgatatcctctacaaatagggctggctccagcccgctgctgccctgctgcccccctctgccaggcgctagacatgtacagaggtttttctgtggttgtaaatggtcctatttcacccccttcttcctgtcacatgacccccccccatgttttattaaagggggtgctggtggtgagccgtgtgtgcgtgtccctgctctgctgcccgcctggctgctctgtctgctgccccctccccccaggtgggtccccctgcttttcacctatctactcctgagcttccccaacaggagcaggtttgaggggccaggcctcttggaggcccctcctgcttcgttgggttctgcttccttcccttcttagctggctcaggggcttctatgggatcctggaagttccttagggacttgcccagggtcccagggccacccacacttcatctgctccctcataggccccacctccacgtcccggctgggccccagaccccagcttcctgccctccaccgggagtctgcatggttgggagtcctgggtggaggggcctttgtgaggctggacccggctcagggcaggtggaggagctgggcctcccacagggtgcccgggcagtgccatcctggtgggggagggcagccttcaaacgtgtggggtctacagtcctcaggtctaggcagggctgccggttctccacctccccatccgccccaggccccctgcctgtgcctgccttgcaccccctctgcttgggccacggtgtctctgcattgcctgcctttttgccttcacctcttttcttccccgccccctgcacattcggggtctcagcccccaggctgtgagctccttgggggcaggccctcaataaatgtgaactgctgctgccg

SEQ ID NO: 62092 - DNA, 1921 bp, Homo sapiens
  misc_feature (42)..(42): n is a, c, g, or t
caacaacgtcacggccaacggatgcgcaggcccccggtgagngttgtaaaagatcggacgagggtgcggcgctgtttaaagatggcggcggaggaacctcagcagcagaagcaggagccgctgggcagcgactccgaaggtgttaactgtctggcctatgatgaagccatcatggctcagcaggaccgaattcagcaagagattgctgtgcagaaccctctggtgtcagagcggctggagctctcggtcctatacaaggagtatgctgaagatgacaacatctatcaacagaagatcaagtgtttctatcgggctttcggattctcccacttggaggcactgctggatgacagcaaggagttgcagcggtgagaagggtgggcactgggcaccgaggcaggtgggtgtctacctcctccccgggcgagtaggatgtgtctcgagtagggtgtctccctccttcccgggcgatgggctggactctggccttgccaggcggggcagtgctgtctcggccctggcgtctgggctggtcgaggagcccatgctgggcccgcctttccatcccacccccaggttcaaggctgtgtctgccaagagcaaggaagacctggtgtcccagggcttcactgaattcacaattgaggatttccacaacacgttcatggacctgattgagcaggtggagaagcagacctctgtcgccgacctgctggcctccttcaatgaccagagcacctccgactaccttgtggtctacctgcggctgctcacctcgggctacctgcagcgcgagagcaagttcttcgagcacttcatcgagggtggacggactgtcaaggagttctgccagcaggaggtggagcccatgtgcaaggagagcgaccacatccacatcattgcgctggcccaggccctcagcgtgtccatccaggtggagtacatggaccgcggcgagggcggcaccaccaatccgcacatcttccctgagggctccgagcccaaggtctaccttctctaccggcctggacactacgatatcctctacaaatagggctggctccagcccgctgctgccctgctgcccccctctgccaggcgctagacatgtacagaggtttttctgtggttgtaaatggtcctatttcacccccttcttcctgtcacatgacccccccccatgttttattaaagggggtgctggtggtgagccgtgtgtgcgtgtccctgctctgctgcccgcctggctgctctgtctgctgccccctccccccaggtgggtccccctgcttttcacctatctactcctgagcttccccaacaggagcaggtttgaggggccaggcctcttggaggcccctcctgcttcgttgggttctgcttccttcccttcttagctggctcaggggcttctatgggatcctggaagttccttagggacttgcccagggtcccagggccacccacacttcatctgctccctcataggccccacctccacgtcccggctgggccccagaccccagcttcctgccctccaccgggagtctgcatggttgggagtcctgggtggaggggcctttgtgaggctggacccggctcagggcaggtggaggagctgggcctcccacagggtgcccgggcagtgccatcctggtgggggagggcagccttcaaacgtgtggggtctacagtcctcaggtctaggcagggctgccggttctccacctccccatccgccccaggccccctgcctgtgcctgccttgcaccccctctgcttgggccacggtgtctctgcattgcctgcctttttgccttcacctcttttcttccccgccccctgcacattcggggtctcagcccccaggctgtgagctccttgggggcaggccctcaataaatgtgaactgctgctgccg

SEQ ID NO: 62093 - DNA, 1815 bp, Homo sapiens
aattggcaacccggaagcggtcggtagtgcggcgctgtttaaagatggcggcggaggaacctcagcagcagaagcaggagccgctgggcagcgactccgaaggtgttaactgtctggcctatgatgaagccatcatggctcagcaggaccgaattcagcaagagattgctgtgcagaaccctctggtgtcagagcggctggagctctcggtcctatacaaggagtatgctgaagatgacaacatctatcaacagaagatcaaggacctccacaaaaagtactcgtacatccgcaagaccaggcctgacggcaactgtttctatcgggctttcggattctcccacttggaggcactgctggatgacagcaaggagttgcagcggttcaaggctgtgtctgccaagagcaaggaagacctggtgtcccagggcttcactgaattcacaattgaggatttccacaacacgttcatggacctgattgagcaggtggagaagcagacctctgtcgccgacctgctggcctccttcaatgaccagagcacctccgactaccttgtggtctacctgcggctgctcacctcgggctacctgcagcgcgagagcaagttcttcgagcacttcatcgagggtggacggactgtcaaggagttctgccagcaggtgccgtccccctcccctttactctcggccgggggagtgcagtgggcccacagggcctggggcggggtgcggagaccagggcctgaccggcacctgtgccacaggaggtggagcccatgtgcaaggagagcgaccacatccacatcattgcgctggcccaggccctcagcgtgtccatccaggtggagtacatggaccgcggcgagggcggcaccaccaatccgcacatcttccctgagggctccgagcccaaggtctaccttctctaccggcctggacactacgatatcctctacaaatagggctggctccagcccgctgctgccctgctgcccccctctgccaggcgctagacatgtacagaggtttttctgtggttgtaaatggtcctatttcacccccttcttcctgtcacatgacccccccccatgttttattaaagggggtgctggtggtgaaaaaaaaaaaaaaaaaaaaaaaaaaaaaaaaaaaaaaaaaaaaaaaaaaaaaaaagagagaggggcgcgcgcgcccccaaaaatatctcccccgcggggggcgcccaaccccacgcgcgcccccccgagtttctgtgggcacaagagaggggcgccccacaaagagaggagcgacggcgtatatatatataaacaccgcgagacggcgcgcgtggcgcgcgcgcgggattataaacacagcggggggcgagcggcgggggaacaacacgcggcggacaagcggggagaagaactctctatcggaggacaagagagacgcgcgcctctctatctctgtcgcggggggagggggtgcgacgagaaacatattgtgtgtggggggcgacacacatctctctccctacctagacgagagatatatatcaaacgcctctctctagagagggagcgatacattctctatcacacatcttctctacaagcgtgtcgtgtcatcaagggggggtgggtgagtacacacccgcgacgagggcgtgctgacaatgtagtgtgtggcgccaacgggtgcctgtagtgaaaaaagcctgtctctggcgcacctctcgcgtgtgcagctctctatttcattatatcagccgcaaaacaacctctttatttatatccacccggggggggcgctcctataacgaaacaca

SEQ ID NO: 62094 - DNA, 1207 bp, Homo sapiens
gaggttacccgggaggcggaggttatggtgagcctagatcataccattgcactccagcctgggcaagaagagcgaaactccatctcaacaaaaactaaaacaaaacaaaacaaaacaaaacaaaacaaaacaaaacaaaacaccactctggagaggccgaagcaggtggaggattacgaggtcaggagatcaagatcatcctggctaacatggtgaaaccccgtctctggtccgagcggaccggtccgctcggaccaatccgcacatcttccctgagggctccgagcccaaggtctaccttctctaccggcctggacactacgatatcctctacaaatagggctggctccagcccgctgctgccctgctgcccccctctgccaggcgctagacatgtacagaggtttttctgtggttgtaaatggtcctatttcacccccttcttcctgtcacatgacccccccccatgttttattaaagggggtgctggtggtgagccgtgtgtgcgtgtccctgctctgctgcccgcctggctgctctgtctgctgccccctccccccaggtgggtccccctgcttttcacctatctactcctgagcttccccaacaggagcaggtttgaggggccaggcctcttggaggcccctcctgcttcgttgggttctgcttccttcccttcttagctggctcaggggcttctatgggatcctggaagttccttagggacttgcccagggtcccagggccacccacacttcatctgctccctcataggccccacctccacgtcccggctgggccccagaccccagcttcctgccctccaccgggagtctgcatggttgggagtcctgggtggaggggcctttgtgaggctggacccggctcagggcaggtggaggagctgggcctcccacagggtgcccgggcagtgccatcctggtgggggagggcagccttcaaacgtgtggggtctacagtcctcaggtctaggcagggctgccggttctccacctccccatccgccccaggccccctgcctgtgcctgccttgcaccccctctgcttgggccacggtgtctctgcattgcctgcctttttgccttcacctcttttcttccccgccccctgcacattcggggtctcagcccccaggctgtgagctccttgggggcaggccctcaataaatgtgaactgctgctgccg

SEQ ID NO: 62095 - DNA, 342 bp, Homo sapiens
gttaactgtctggcctatgatgaagccatcatggctcagcaggaccgaattcagcaagaggtgaggggctgcagtgggcgagggaggcagtggccagcagccccattgtggaaatgcataggctgggcatgaggcctattgtctgtctctactttggaagctccctcctccctaggctatgctaggtactggtgcttttctgggggtcgctgtgccaccgggtgaccagcccagctcttttgtagttattctgtctgttaggcatgggtcactccatctccctgctaggacatgacagatccctgcctcctccagattgctgtgcagaaccctctggtgtca

SEQ ID NO: 62096 - DNA, 1727 bp, Homo sapiens
aattggcaacccggaagcggtcggtagtgcggcgctgtttaaagatggcggcggaggaacctcagcagcagaagcaggagccgctgggcagcgactccgaaggtgttaactgtctggcctatgatgaagccatcatggctcagcaggaccgaattcagcaagagattgctgtgcagaaccctctggtgtcagagcggctggagctctcggtcctatacaaggagtatgctgaagatgacaacatctatcaacagaagatcaaggacctccacaaaaagtactcgtacatccgcaagaccaggcctgacggcaactgtttctatcgggctttcggattctcccacttggaggcactgctggatgacagcaaggagttgcagcggttcaaggctgtgtctgccaagagcaaggaagacctggtgtcccagggcttcactgaattcacaattgaggatttccacaacacgttcatggacctgattgagcaggtggagaagcagacctctgtcgccgacctgctggcctccttcaatgaccagagcacctccgactaccttgtggtctacctgcggctgctcacctcgggctacctgcagcgcgagagcaagttcttcgagcacttcatcgagggtggacggactgtcaaggagttctgccagcaggaggtggagcccatgtgcaaggagagcgaccacatccacatcattgcgctggcccaggccctcagcgtgtccatccaggtggagtacatggaccgcggcgagggcggcaccaccaatccgcacatcttccctgagggctccgagcccaaggtctaccttctctaccggcctggacactacgatatcctctacaaatagggctggctccagcccgctgctgccctgctgcccccctctgccaggcgctagacatgtacagaggtttttctgtggttgtaaatggtcctatttcacccccttcttcctgtcacatgacccccccccatgttttattaaagggggtgctggtggtgagccgtgtgtgcgtgtccctgctctgctgcccgcctggctgctctgtctgctgccccctccccccaggtgggtccccctgcttttcacctatctactcctgagcttccccaacaggagcaggtttgaggggccaggcctcttggaggcccctcctgcttcgttgggttctgcttccttcccttcttagctggctcaggggcttctatgggatcctggaagttccttagggacttgcccagggtcccagggccacccacacttcatctgctccctcataggccccacctccacgtcccggctgggccccagaccccagcttcctgccctccaccgggagtctgcatggttgggagtcctgggtggaggggcctttgtgaggctggacccggctcagggcaggtggaggagctgggcctcccacagggtgcccgggcagtgccatcctggtgggggagggcagccttcaaacgtgtggggtctacagtcctcaggtctaggcagggctgccggttctccacctccccatccgccccaggccccctgcctgtgcctgccttgcaccccctctgcttgggccacggtgtctctgcattgcctgcctttttgccttcacctcttttcttccccgccccctgcacattcggggtctcagcccccaggctgtgagctccttgggggcaggccctcaataaatgtgaactgctgctgccg

SEQ ID NO: 62097 - DNA, 1764 bp, Homo sapiens
  misc_feature (42)..(42): n is a, c, g, or t
caacaacgtcacggccaacggatgcgcaggcccccggtgagngttgtaaaagatcggacgagggtgcggcgctgtttaaagatggcggcggaggaacctcagcagcagaagcaggagccgctgggcagcgactccgaaggtgttaactgtctggcctatgatgaagccatcatggctcagcaggaccgaattcagcaagagattgctgtgcagaaccctctggtgtcagagcggctggagctctcggtcctatacaaggagtatgctgaagatgacaacatctatcaacagaagatcaaggacctccacaaaaagtactcgtacatccgcaagaccaggcctgacggcaactgtttctatcgggctttcggattctcccacttggaggcactgctggatgacagcaaggagttgcagcggttcaaggctgtgtctgccaagagcaaggaagacctggtgtcccagggcttcactgaattcacaattgaggatttccacaacacgttcatggacctgattgagcaggtggagaagcagacctctgtcgccgacctgctggcctccttcaatgaccagagcacctccgactaccttgtggtctacctgcggctgctcacctcgggctacctgcagcgcgagagcaagttcttcgagcacttcatcgagggtggacggactgtcaaggagttctgccagcaggaggtggagcccatgtgcaaggagagcgaccacatccacatcattgcgctggcccaggccctcagcgtgtccatccaggtggagtacatggaccgcggcgagggcggcaccaccaatccgcacatcttccctgagggctccgagcccaaggtctaccttctctaccggcctggacactacgatatcctctacaaatagggctggctccagcccgctgctgccctgctgcccccctctgccaggcgctagacatgtacagaggtttttctgtggttgtaaatggtcctatttcacccccttcttcctgtcacatgacccccccccatgttttattaaagggggtgctggtggtgagccgtgtgtgcgtgtccctgctctgctgcccgcctggctgctctgtctgctgccccctccccccaggtgggtccccctgcttttcacctatctactcctgagcttccccaacaggagcaggtttgaggggccaggcctcttggaggcccctcctgcttcgttgggttctgcttccttcccttcttagctggctcaggggcttctatgggatcctggaagttccttagggacttgcccagggtcccagggccacccacacttcatctgctccctcataggccccacctccacgtcccggctgggccccagaccccagcttcctgccctccaccgggagtctgcatggttgggagtcctgggtggaggggcctttgtgaggctggacccggctcagggcaggtggaggagctgggcctcccacagggtgcccgggcagtgccatcctggtgggggagggcagccttcaaacgtgtggggtctacagtcctcaggtctaggcagggctgccggttctccacctccccatccgccccaggccccctgcctgtgcctgccttgcaccccctctgcttgggccacggtgtctctgcattgcctgcctttttgccttcacctcttttcttccccgccccctgcacattcggggtctcagcccccaggctgtgagctccttgggggcaggccctcaataaatgtgaactgctgctgccg

SEQ ID NO: 62098 - DNA, 1775 bp, Homo sapiens
aattggcaacccggaagcggtcggtagtgcggcgctgtttaaagatggcggcggaggaacctcagcagcagaagcaggagccgctgggcagcgactccgaaggtgttaactgtctggcctatgatgaagccatcatggctcagcaggaccgaattcagcaagagattgctgtgcagaaccctctggtgtcagagcggctggagctctcggtcctatacaaggagtatgctgaagatgacaacatctatcaacagaagatcaaggacctccacaaaaagtactcgtacatccgcaagaccaggcctgacggcaactgtttctatcgggctttcggattctcccacttggaggcactgctggatgacagcaaggagttgcagcggttcaaggctgtgtctgccaagagcaaggaagacctggtgtcccagggcttcactgaattcacaattgaggatttccacaacacgttcatggacctgattgagcaggtggagaagcagacctctgtcgccgacctgctggcctccttcaatgaccagagcacctccgactaccttgtggtctacctgcggctgctcacctcgggctacctgcagcgcgagagcaagttcttcgagcacttcatcgagggtggacggactgtcaaggagttctgccagcaggaggtggagcccatgtgcaaggagagcgaccacatccacatcattgcgctggcccaggccctcagcgtgtccatccaggtggagtacatggaccgcggcgagggcggcaccaccaatccgcacatcttccctgagggctccgagcccaaggtctaccttctctaccggcctggacactacgatatcctctacaaatagggctggctccagcccgctgctgccctgctgcccccctctgccaggcgctagacatgtacagaggtttttctgtggttgtaaatggtcctatttcacccccttcttcctgtcacatgacccccccccatgttttattaaagggggtgctggtggtgagccgtgtgtgcgtgtccctgctctgctgcccgcctggctgctctgtctgctgccccctccccccaggtgggtccccctgcttttcacctatctactcctgagcttccccaacaggagcaggtttgaggggccaggcctcttggaggcccctcctgcttcgttgggttctgcttccttcccttcttagctggctcaggggcttctatgggatcctggaagttccttagggacttgcccagggtcccagggccacccacacttcatctgctccctcataggccccacctccacgtcccggctgggccccagaccccagcttcctgccctccaccgggagtctgcatggttgggagtcctgggtggaggggcctttgtgaggctggacccggctcagggcaggtggaggagctgggcctcccacagggtgcccgggcagtgccatcctggtgggggagggcagccttcaaacgtgtggggtctacagtcctcaggtctaggcagggctgccggttctccacctccccatccgccccaggccccctgcctgtgcctgccttgcaccccctctgcttgggccacggtgtctctgcattgcctgcctttttgccttcacctcttttcttccccgccccctgcacattcggggtctcagcccccaggctgtgagctccttgggggcaggccctcaataaatgtgaactgctgctgccgaaaaaaaaaaaaaaaaaagacatagagctcaatgactgtgggaaaaaa

SEQ ID NO: 62099 - DNA, 1707 bp, Homo sapiens
agccgtggtaccggtccgagtggtagggatgcggaggaacctcagcagcagaagcaggagccgctgggcagcgactccgaaggtgttaactgtctggcctatgatgaagccatcatggctcagcaggaccgaattcagcaagagattgctgtgcagaaccctctggtgtcagagcggctggagctctcggtcctatacaaggagtatgctgaagatgacaacatctatcaacagaagatcaaggacctccacaaaaagtactcgtacatccgcaagaccaggcctgacggcaactgtttctatcgggctttcggattctcccacttggaggcactgctggatgacagcaaggagttgcagcggttcaaggctgtgtctgccaagagcaaggaagacctggtgtcccagggcttcactgaattcacaattgaggatttccacaacacgttcatggacctgattgagcaggtggagaagcagacctctgtcgccgacctgctggcctccttcaatgaccagagcacctccgactaccttgtggtctacctgcggctgctcacctcgggctacctgcagcgcgagagcaagttcttcgagcacttcatcgagggtggacggactgtcaaggagttctgccagcaggaggtggagcccatgtgcaaggagagcgaccacatccacatcattgcgctggcccaggccctcagcgtgtccatccaggtggagtacatggaccgcggcgagggcggcaccaccaatccgcacatcttccctgagggctccgagcccaaggtctaccttctctaccggcctggacactacgatatcctctacaaatagggctggctccagcccgctgctgccctgctgcccccctctgccaggcgctagacatgtacagaggtttttctgtggttgtaaatggtcctatttcacccccttcttcctgtcacatgacccccccccatgttttattaaagggggtgctggtggtgagccgtgtgtgcgtgtccctgctctgctgcccgcctggctgctctgtctgctgccccctccccccaggtgggtccccctgcttttcacctatctactcctgagcttccccaacaggagcaggtttgaggggccaggcctcttggaggcccctcctgcttcgttgggttctgcttccttcccttcttagctggctcaggggcttctatgggatcctggaagttccttagggacttgcccagggtcccagggccacccacacttcatctgctccctcataggccccacctccacgtcccggctgggccccagaccccagcttcctgccctccaccgggagtctgcatggttgggagtcctgggtggaggggcctttgtgaggctggacccggctcagggcaggtggaggagctgggcctcccacagggtgcccgggcagtgccatcctggtgggggagggcagccttcaaacgtgtggggtctacagtcctcaggtctaggcagggctgccggttctccacctccccatccgccccaggccccctgcctgtgcctgccttgcaccccctctgcttgggccacggtgtctctgcattgcctgcctttttgccttcacctcttttcttccccgccccctgcacattcggggtctcagcccccaggctgtgagctccttgggggcaggccctcaataaatgtgaactgctgctgccg

SEQ ID NO: 62100 - DNA, 1709 bp, Homo sapiens
gcaggctgtacagccccggaagtaatgggatcgcggaggaacctcagcagcagaagcaggagccgctgggcagcgactccgaaggtgttaactgtctggcctatgatgaagccatcatggctcagcaggaccgaattcagcaagagattgctgtgcagaaccctctggtgtcagagcggctggagctctcggtcctatacaaggagtatgctgaagatgacaacatctatcaacagaagatcaaggacctccacaaaaagtactcgtacatccgcaagaccaggcctgacggcaactgtttctatcgggctttcggattctcccacttggaggcactgctggatgacagcaaggagttgcagcggttcaaggctgtgtctgccaagagcaaggaagacctggtgtcccagggcttcactgaattcacaattgaggatttccacaacacgttcatggacctgattgagcaggtggagaagcagacctctgtcgccgacctgctggcctccttcaatgaccagagcacctccgactaccttgtggtctacctgcggctgctcacctcgggctacctgcagcgcgagagcaagttcttcgagcacttcatcgagggtggacggactgtcaaggagttctgccagcaggaggtggagcccatgtgcaaggagagcgaccacatccacatcattgcgctggcccaggccctcagcgtgtccatccaggtggagtacatggaccgcggcgagggcggcaccaccaatccgcacatcttccctgagggctccgagcccaaggtctaccttctctaccggcctggacactacgatatcctctacaaatagggctggctccagcccgctgctgccctgctgcccccctctgccaggcgctagacatgtacagaggtttttctgtggttgtaaatggtcctatttcacccccttcttcctgtcacatgacccccccccatgttttattaaagggggtgctggtggtgagccgtgtgtgcgtgtccctgctctgctgcccgcctggctgctctgtctgctgccccctccccccaggtgggtccccctgcttttcacctatctactcctgagcttccccaacaggagcaggtttgaggggccaggcctcttggaggcccctcctgcttcgttgggttctgcttccttcccttcttagctggctcaggggcttctatgggatcctggaagttccttagggacttgcccagggtcccagggccacccacacttcatctgctccctcataggccccacctccacgtcccggctgggccccagaccccagcttcctgccctccaccgggagtctgcatggttgggagtcctgggtggaggggcctttgtgaggctggacccggctcagggcaggtggaggagctgggcctcccacagggtgcccgggcagtgccatcctggtgggggagggcagccttcaaacgtgtggggtctacagtcctcaggtctaggcagggctgccggttctccacctccccatccgccccaggccccctgcctgtgcctgccttgcaccccctctgcttgggccacggtgtctctgcattgcctgcctttttgccttcacctcttttcttccccgccccctgcacattcggggtctcagcccccaggctgtgagctccttgggggcaggccctcaataaatgtgaactgctgctgccg

SEQ ID NO: 62101 - DNA, 1972 bp, Homo sapiens
  misc_feature (42)..(42): n is a, c, g, or t
caacaacgtcacggccaacggatgcgcaggcccccggtgagngttgtaaaagatcggacgagggtgcggcgctgtttaaagatggcggcggaggaacctcagcagcagaagcaggagccgctgggcagcgactccgaaggtgttaactgtctggcctatgatgaagccatcatggctcagcaggaccgaattcagcaagagattgctgtgcagaaccctctggtgtcagagcggctggagctctcggtcctatacaaggagtatgctgaagatgacaacatctatcaacagaagatcaaggacctccacaaaaagtactcgtacatccgcaagaccaggcctgacggcaactgtttctatcgggctttcggattctcccacttggaggcactgctggatgacagcaaggagttgcagcggtgagaagggtgggcactgggcaccgaggcaggtgggtgtctacctcctccccgggcgagtaggatgtgtctcgagtagggtgtctccctccttcccgggcgatgggctggactctggccttgccaggcggggcagtgctgtctcggccctggcgtctgggctggtcgaggagcccatgctgggcccgcctttccatcccacccccaggttcaaggctgtgtctgccaagagcaaggaagacctggtgtcccagggcttcactgaattcacaattgaggatttccacaacacgttcatggacctgattgagcaggtggagaagcagacctctgtcgccgacctgctggcctccttcaatgaccagagcacctccgactaccttgtggtctacctgcggctgctcacctcgggctacctgcagcgcgagagcaagttcttcgagcacttcatcgagggtggacggactgtcaaggagttctgccagcaggaggtggagcccatgtgcaaggagagcgaccacatccacatcattgcgctggcccaggccctcagcgtgtccatccaggtggagtacatggaccgcggcgagggcggcaccaccaatccgcacatcttccctgagggctccgagcccaaggtctaccttctctaccggcctggacactacgatatcctctacaaatagggctggctccagcccgctgctgccctgctgcccccctctgccaggcgctagacatgtacagaggtttttctgtggttgtaaatggtcctatttcacccccttcttcctgtcacatgacccccccccatgttttattaaagggggtgctggtggtgagccgtgtgtgcgtgtccctgctctgctgcccgcctggctgctctgtctgctgccccctccccccaggtgggtccccctgcttttcacctatctactcctgagcttccccaacaggagcaggtttgaggggccaggcctcttggaggcccctcctgcttcgttgggttctgcttccttcccttcttagctggctcaggggcttctatgggatcctggaagttccttagggacttgcccagggtcccagggccacccacacttcatctgctccctcataggccccacctccacgtcccggctgggccccagaccccagcttcctgccctccaccgggagtctgcatggttgggagtcctgggtggaggggcctttgtgaggctggacccggctcagggcaggtggaggagctgggcctcccacagggtgcccgggcagtgccatcctggtgggggagggcagccttcaaacgtgtggggtctacagtcctcaggtctaggcagggctgccggttctccacctccccatccgccccaggccccctgcctgtgcctgccttgcaccccctctgcttgggccacggtgtctctgcattgcctgcctttttgccttcacctcttttcttccccgccccctgcacattcggggtctcagcccccaggctgtgagctccttgggggcaggccctcaataaatgtgaactgctgctgccg

SEQ ID NO: 62102 - DNA, 1835 bp, Homo sapiens
aattggcaacccggaagcggtcggtagtgcggcgctgtttaaagatggcggcggaggaacctcagcagcagaagcaggagccgctgggcagcgactccgaaggtgttaactgtctggcctatgatgaagccatcatggctcagcaggaccgaattcagcaagagattgctgtgcagaaccctctggtgtcagagcggctggagctctcggtcctatacaaggagtatgctgaagatgacaacatctatcaacagaagatcaaggacctccacaaaaagtactcgtacatccgcaagaccaggcctgacggcaactgtttctatcgggctttcggattctcccacttggaggcactgctggatgacagcaaggagttgcagcggttcaaggctgtgtctgccaagagcaaggaagacctggtgtcccagggcttcactgaattcacaattgaggatttccacaacacggtgagccctggtgcctgtcttgggctgggccatgggggaggggttcacctggtgaggaccacccatctcctccccgtcatcttgccctttctccctccgtggctgcagttcatggacctgattgagcaggtggagaagcagacctctgtcgccgacctgctggcctccttcaatgaccagagcacctccgactaccttgtggtctacctgcggctgctcacctcgggctacctgcagcgcgagagcaagttcttcgagcacttcatcgagggtggacggactgtcaaggagttctgccagcaggaggtggagcccatgtgcaaggagagcgaccacatccacatcattgcgctggcccaggccctcagcgtgtccatccaggtggagtacatggaccgcggcgagggcggcaccaccaatccgcacatcttccctgagggctccgagcccaaggtctaccttctctaccggcctggacactacgatatcctctacaaatagggctggctccagcccgctgctgccctgctgcccccctctgccaggcgctagacatgtacagaggtttttctgtggttgtaaatggtcctatttcacccccttcttcctgtcacatgacccccccccatgttttattaaagggggtgctggtggtgagccgtgtgtgcgtgtccctgctctgctgcccgcctggctgctctgtctgctgccccctccccccaggtgggtccccctgcttttcacctatctactcctgagcttccccaacaggagcaggtttgaggggccaggcctcttggaggcccctcctgcttcgttgggttctgcttccttcccttcttagctggctcaggggcttctatgggatcctggaagttccttagggacttgcccagggtcccagggccacccacacttcatctgctccctcataggccccacctccacgtcccggctgggccccagaccccagcttcctgccctccaccgggagtctgcatggttgggagtcctgggtggaggggcctttgtgaggctggacccggctcagggcaggtggaggagctgggcctcccacagggtgcccgggcagtgccatcctggtgggggagggcagccttcaaacgtgtggggtctacagtcctcaggtctaggcagggctgccggttctccacctccccatccgccccaggccccctgcctgtgcctgccttgcaccccctctgcttgggccacggtgtctctgcattgcctgcctttttgccttcacctcttttcttccccgccccctgcacattcggggtctcagcccccaggctgtgagctccttgggggcaggccctcaataaatgtgaactgctgctgccg

SEQ ID NO: 62103 - DNA, 1713 bp, Homo sapiens
  misc_feature (42)..(42): n is a, c, g, or t
caacaacgtcacggccaacggatgcgcaggcccccggtgagngttgtaaaagatcggacgagggtgcggcgctgtttaaagatggcggcggaggaacctcagcagcagaagcaggagccgctgggcagcgactccgaaggtgttaactgtctggcctatgatgaagccatcatggctcagcaggaccgaattcagcaagagattgctgtgcagaaccctctggtgtcagagcggctggagctctcggtcctatacaaggagtatgctgaagatgacaacatctatcaacagaagatcaagtgtttctatcgggctttcggattctcccacttggaggcactgctggatgacagcaaggagttgcagcggttcaaggctgtgtctgccaagagcaaggaagacctggtgtcccagggcttcactgaattcacaattgaggatttccacaacacgttcatggacctgattgagcaggtggagaagcagacctctgtcgccgacctgctggcctccttcaatgaccagagcacctccgactaccttgtggtctacctgcggctgctcacctcgggctacctgcagcgcgagagcaagttcttcgagcacttcatcgagggtggacggactgtcaaggagttctgccagcaggaggtggagcccatgtgcaaggagagcgaccacatccacatcattgcgctggcccaggccctcagcgtgtccatccaggtggagtacatggaccgcggcgagggcggcaccaccaatccgcacatcttccctgagggctccgagcccaaggtctaccttctctaccggcctggacactacgatatcctctacaaatagggctggctccagcccgctgctgccctgctgcccccctctgccaggcgctagacatgtacagaggtttttctgtggttgtaaatggtcctatttcacccccttcttcctgtcacatgacccccccccatgttttattaaagggggtgctggtggtgagccgtgtgtgcgtgtccctgctctgctgcccgcctggctgctctgtctgctgccccctccccccaggtgggtccccctgcttttcacctatctactcctgagcttccccaacaggagcaggtttgaggggccaggcctcttggaggcccctcctgcttcgttgggttctgcttccttcccttcttagctggctcaggggcttctatgggatcctggaagttccttagggacttgcccagggtcccagggccacccacacttcatctgctccctcataggccccacctccacgtcccggctgggccccagaccccagcttcctgccctccaccgggagtctgcatggttgggagtcctgggtggaggggcctttgtgaggctggacccggctcagggcaggtggaggagctgggcctcccacagggtgcccgggcagtgccatcctggtgggggagggcagccttcaaacgtgtggggtctacagtcctcaggtctaggcagggctgccggttctccacctccccatccgccccaggccccctgcctgtgcctgccttgcaccccctctgcttgggccacggtgtctctgcattgcctgcctttttgccttcacctcttttcttccccgccccctgcacattcggggtctcagcccccaggctgtgagctccttgggggcaggccctcaataaatgtgaactgctgctgccg

SEQ ID NO: 62104 - DNA, 1626 bp, Homo sapiens
ttgcagtcaggcagagaggcctacgccagggccgagccccccggcctgctccagcggcggcccgcgccgtgagggcctcgagtttcgctgggctacggagcacaaaggtgttaactgtctggcctatgatgaagccatcatggctcagcaggaccgaattcagcaagagattgctgtgcagaaccctctggtgtcagagcggctggagctctcggtcctatacaaggagtatgctgaagatgacaacatctatcaacagaagatcaaggacctccacaaaaagtactcgtacatccgcaagaccaggcctgacggcaactgtttctatcgggctttcggattctcccacttggaggcactgctggatgacagcaaggagttgcagcggtggagaagcagacctctgtcgccgacctgctggcctccttcaatgaccagagcacctccgactaccttgtggtctacctgcggctgctcacctcgggctacctgcagcgcgagagcaagttcttcgagcacttcatcgagggtggacggactgtcaaggagttctgccagcaggaggtggagcccatgtgcaaggagagcgaccacatccacatcattgcgctggcccaggccctcagcgtgtccatccaggtggagtacatggaccgcggcgagggcggcaccaccaatccgcacatcttccctgagggctccgagcccaaggtctaccttctctaccggcctggacactacgatatcctctacaaatagggctggctccagcccgctgctgccctgctgcccccctctgccaggcgctagacatgtacagaggtttttctgtggttgtaaatggtcctatttcacccccttcttcctgtcacatgacccccccccatgttttattaaagggggtgctggtggtgagccgtgtgtgcgtgtccctgctctgctgcccgcctggctgctctgtctgctgccccctccccccaggtgggtccccctgcttttcacctatctactcctgagcttccccaacaggagcaggtttgaggggccaggcctcttggaggcccctcctgcttcgttgggttctgcttccttcccttcttagctggctcaggggcttctatgggatcctggaagttccttagggacttgcccagggtcccagggccacccacacttcatctgctccctcataggccccacctccacgtcccggctgggccccagaccccagcttcctgccctccaccgggagtctgcatggttgggagtcctgggtggaggggcctttgtgaggctggacccggctcagggcaggtggaggagctgggcctcccacagggtgcccgggcagtgccatcctggtgggggagggcagccttcaaacgtgtggggtctacagtcctcaggtctaggcagggctgccggttctccacctccccatccgccccaggccccctgcctgtgcctgccttgcaccccctctgcttgggccacggtgtctctgcattgcctgcctttttgccttcacctcttttcttccccgccccctgcacattcggggtctcagcccccaggctgtgagctccttgggggcaggccctcaataaatgtgaactgctgctgccg

SEQ ID NO: 62105 - DNA, 553 bp, Homo sapiens
  misc_feature (42)..(42): n is a, c, g, or t
caacaacgtcacggccaacggatgcgcaggcccccggtgagngttgtaaaagatcggacgagggtgcggcgctgtttaaagatggcggcggaggaacctcagcagcagaagcaggagccgctgggcagcgactccgaaggtgttaactgtctggcctatgatgaagccatcatggctcagcaggaccgaattcagcaagagattgctgtgcagaaccctctggtgtcagagcggctggagctctcggtcctatacaaggagtatgctgaagatgacaacatctatcaacagaagatcaaggacctccacaaaaagtactcgtacatccgcaagaccaggcctgacggcaactgtttctatcgggctttcggattctcccacttggaggcactgctggatgacagcaaggagttgcagcggtgagaagggtgggcactgggcaccgaggcaggtgtgggactaggtgcaggtgtccggtgcaggtgtgggactaccggtgcaggtgtgggactaccggtgcaggtgtgggactaccggtgcaggtgtgggacta

SEQ ID NO: 62106 - DNA, 666 bp, Homo sapiens
tttttacatttgtcaaagatgtatattctgaggtctagtgagttcagacacctcggggaagcctctagcacatacatttatacgatttctttccaatataaactctcaagtagtgactgaactctggtgaagcttctgccaccctcatttcatttgtaaagcatatctgcactttgggaggctgaggtgggcggatcacttgaggtcaggagttcaagagcagcctggccaacatggtgaaaccctgtttctgccaaaaatacaaaaattagctgggcttcgtggcgggtactggtagtaccagctactcgagaggctgagtcaggagaattgcttgaaccctggaggcggaggttgcagtgagccgagatcgcgccactgcactctagcctgggtgacagagtgagactccatcacgcacacgcacgcacgaaagtgaatggcacctccctcttgtttgttcttctggccatgtgacatgcccttcacctcccaccatcattttaaccttcctcaggtttcccgagagggtgaacagacgtcagcgccatgtttcctataaagcctgcaaaattgtgagtcaattaaacctctttatacattacctagcctcaggtatttctgtctagccatgcaattatggcctaatatatttacacatggagt

SEQ ID NO: 62107 - DNA, 242 bp, Homo sapiens
tagatgttgtcctaacctctgggatccccaaataatttatacttactcatatagcttgtatatttgtcctttccctttgaagtctcatgtggaattgtagtaatctccagtattggaggtggagcctagtgggaggtgattggatgatgggggtggctttctcaagaaagttttagtaccatccccttgttgctgtccttgtgatagttctcatgaggtctggctcatgcctgtaatcccag

SEQ ID NO: 62108 - DNA, 630 bp, Homo sapiens
tctcaagcattttcattgtagaaagagatctttgtttttattttttaataactaaaatttacattgactttttaaactaagaatctttgcctccaagataaattttttctctatcttgagaacaacagtaaacaacatcaggaagttttaaaactgctttcagattatcacggttccagaaataatgtattttgtatttcagtcttaaaggagcatattccctttgcaagccctggagttcagtaagctggattcttagctagtgtctccataaagtggacacggaaaggaagagaatgtagacacatcaaaaggacgcctcgtcagttgagaaacaaggcattttcaagaagcagtaacagaagatcatgaggatgaaccaatccagtaaagacccttgtatgtagttcttagtggttcattagcgacctttaaggaagcagtatcaatgggataatgaataaagggtaaataggggttgcactatgagttacataatttgtttttcaaaaattgttaatataataagtgtgtcagttattaagttctcttctatctccaaatccaagcttctaaactttgctttgggttgctaaagcagtcactagacaagccatttctgcattgctg

SEQ ID NO: 62109 - DNA, 677 bp, Homo sapiens
tctcaagcattttcattgtagaaagagatctttgtttttattttttaataactaaaatttacattgactttttaaactaagaatctttgcctccaagataaattttttctctatcttgagaacaacagtaaacaacatcaggaagttttaaaactgctttcagattatcacggttccagaaataatgtattttgtatttcagtcttaaaggagcatattccctttgcaagccctggagttcagtaagctggattcttagctagtgtctccataaagtggacacggaaaggaagagaatgtagacacatcaaaaggacgcctcgtcagttgagaaacaaggcattttcaagaagcagtaacagaagatcatgaggatgaaccaatccagtaaagacccttaaaaatatttctgtggccttctctgcttcacctcctccatttaacttctcagtaggagttcttcagaaaagttgatgagactgaatgagtgaatggaaaagaacccattggctgagagtcaaagaaggatggtttgccattccagctgctccaactaagacttccgaggttcagtctagagagaaatcaagtcctgtgtttcccgggttcaccttgaacaagtcaccactttatccctccacatcactctcgttttagcaataaaatatcaagtaaaa

SEQ ID NO: 62110 - DNA, 380 bp, Homo sapiens
tttcaactgtgacaatttttactaagaagcctacagtgctataatggtatattatggtgattgtgccccaatatgcaggggcttgtcctgagaaaaggatgtttcaactcagagatgaaaaatgaatcaggaactaatcaggtggaatgggcacagatgtccaggctttggaaatacacgtgtaaaggccttgtatccacacctaaatctcatcttgaattgtaactcccacaattcccacgtgtcatgggaggaacccagtgggaggtgatggaattatgggggtgggtaatatttctcgtaatagtgaatgagtcccatgacatctgatggtttaaaaaatgggagtttccctacacaagctctctctttgccggcca

SEQ ID NO: 62111 - DNA, 238 bp, Homo sapiens
tgaggtgtgttcagattacacctgctgctggggcaatgcttggagacagtggtgggctgagaagaggagatgcagcagaacaaatgtttgatacaggccaggcgtggtggctcatacctgtaatcccagcactttggaaagccaaggtgggcagatcatctgaggtcaggagttcaaaaccagcctgcccaacatggtaaaaccccatctctactaaagtacaaaaattagctgggca

SEQ ID NO: 62112 - DNA, 382 bp, Homo sapiens
atatttcctcccgcagccccctctatgtgatcccagagccctctgtgcataatcttaccagtgcatttacctcagtgcttttagaattctgtttagagtgtcagtatttttcctcctgggctgtgtatatctttatgtccttggtggcttctcagagactggcatgtctatctgcttaattgatgtctgctgaatgaatcgaatgagtgagttctaataataaactgtaaaaccacctcttcgagaatgggcaggagcctctgcagctaagcagagctggggattccaaatgcagatctgaaagctgcaagaccatttctggcctcacagtcccagagctgaggatccttgctttgaaattctctgtataaactttacacaa

SEQ ID NO: 62113 - DNA, 307 bp, Homo sapiens
agccatgatagaaatttgaaggacattctcagtaactttatgtcctgttagaggaaagatttgaaagcatactggctggagaggcagaagatctgggttctggtttctacttagtttgaactttcttggacttagtctctgtatctgtaaaatgaaggactgaattaagttatccttacagccttttctaactcttaaattttaggattgattcttaatggtttaagatgtgttaacaatggaattaccctaaatgtcaaatcccattgttttttaggtaataaaaattatactgaaatcatttgaa

SEQ ID NO: 62114 - DNA, 313 bp, Homo sapiens
ttagatttaaataaaaaatgggaagtgatcttagaaacgaaacaatatatattaaagtttaaaaatgtttgacacaatagctttattctttgaaatgtatgctaaagaagtcagaggtatacttaaatgtattactatgaggatatgcattacaatattatacatgctaaaagattagaaagaaaaataaaaaactaggtaaaataagagattggctaaataaatcatgatattgctgtattaaaaattaagacccaacatcatgttttctgaggctgtttaacatacagagaaaagctcacaaaatatcaaa

SEQ ID NO: 62115 - DNA, 728 bp, Homo sapiens
aattctctattcttcctgaacaagatggataaattatattaatgtgctgtatatatatatttttaacctgagctattggagaaataagagaacctgttagatttgaaatagatttgtaacatttacaggaaatttgcttgtttataacacagtactctggccaggacgtatgcttcatcaggaaaatgtcataactgaattggaaataggaatttgaagccatttacttctctgtaaatgaaaacacattcagtcttactcttttggtgataccagataataccattttaaggccataggttcttgctttaattatatttgtcatcatgttaattaatttctgcttctgtgtatagttgcccaggtaacacatgtatgtgtctgtgtatgtatgtgaactaacaccttaattagtggagaacactggccatatggatcaccagagtttttccatattaattacctttacaagtcaatgaaggaacaaaggtaaaggcaaaagaattggaaccaggccatttttttttctagcataacacagttttcccttacttggttaacaaggaaagttgaaaaactcttaaagaaactctagcctaaagcattgagtctttcagaagggatttccaaactaaactatgaagacaaatttggacaagaagtaaatttttttcttggttatattcctctgaaaagcatattatttaataaaccgttggtcaattact

SEQ ID NO: 62116 - DNA, 461 bp, Homo sapiens
ccagaggtagatttttcttccagctctgtgcttgggcatttcccaaagcgaaacttccaaaggcacatcctgtcttcctgagtggtattctttgaggcagctgagtagcaaaactgaggctattaatgttcgcttagcaactgagcagctactgtgtatcaggggctctgcctgtgaccagggagtacacggtcttgtagaagagaaaaccgggtactcagctaactgtggtaccatgtgctaggtgccaaaggaggaacagagggccctgcgtgatctgctcaggaccgtgagggagaggtaagaagagttcaaaggagaggtcatatttcaaacagaccttgaagctgttcaaggcagagaagaaaaggatggtgttccacgaatggcctgagctaaggcaagtggaaacacgaggtttgttggaagaatcgcaaggacagcctgatgtttatagaaag

SEQ ID NO: 62117 - DNA, 371 bp, Homo sapiens
attgaatcaatacagcctgtgtttctcatgatcgcctggtccttgagactgttgataaggcattagagagcttcatggttgttgataatctgaggaacgccctctctagtgacagactgtcacggacatggaggattttttgaagtgccttttcaattttatgagttgaggatcctgcagccctggagatttataattgtccctgccactgctgctttgtgccttcttctagtttctgccttgtttatctggttttcttcccccatagtattttggcaattgtgaaaagtggttctggagaagtaccaacaaatgctcttactgcccgagaactgacacttttggaggctactgatgtttacggcaaaata

SEQ ID NO: 62118 - DNA, 421 bp, Homo sapiens
atattgagagagggggactgaggaaggactgaaccatcttcccaggggtcattggcggggtgttcagcatgagcatggagagcatagccctcctgatttgggagggaaacctcaaataactctcccaaccaaaacatgaaacatctactgttggatgcactttgtgtctagaacatcatcttcaacaagcttctgatttccaagaggggatcactgatagagctcctatgaggtgctgggcactgttctgggtgctaggaatacagtgtgaaacaaaacagataatatcctgggcttcatgagactgatattctagtagcactgcacattaaacccatgtttttgtctttgtttttgtctttgtttttgttttgtttcatttgagacagggtctcaatctgtcccccaagctggagggcag

SEQ ID NO: 62119 - DNA, 2075 bp, Homo sapiens
  misc_feature (860)..(860): n is a, c, g, or t
  misc_feature (1668)..(1668): n is a, c, g, or t
  misc_feature (1764)..(1764): n is a, c, g, or t
  misc_feature (1958)..(1958): n is a, c, g, or t
gaaacagaaacagaatgcatggctgctcaaaaagagtatctttttgtgctttcttgagggagagggttgtggaggggaaaccctccaactcgggctggctaacagggatgcttccttatgaaacgtgctcacctaagaataccagtgagaccatcggcactttctgtaattggcagcaatagagctattagaagaaacatgaaagagatagatggatctgaaatcaacatttgtaacaaaaggcctcaccatgttccccagcacaaatgtgctactgattagcagctaaaatgtgagcatccctactcaaattcaccctgttctccccatcctgaaggttctgatattaatgcataacattgtagcttataatgcttttacttaacattatcttattcatgcatcatcagagaatgatctaccaaaatgtatggagagaaagctaaaaatgtaaagtggctgttctcaatcttagctacatattagaacaacttggggagtttttaaattctgtgataaccacactgccctcagaccaatccgaattctggggcttaaatccaggtggagtgctagccacatgtagagcagctttctgctttcatatatatctgggcttaggcctcggtgagggttgggaagggcctatgacctctgaagagccttcacattacagcccaggaacagctggcccacagcaggagagatgcagagcctgaggtggagggccaagcctggggaatagggggtgctttgaagagcgtggtggtgaatggaggcttaatgaagcagaaactctactgctgtccagctgccccaaattacctgaatttagaaaggaacacaaagttacagtgagngcattttattttagctcagacaaatccaacaccatggatagaaggagggaaagtaaagatcccattcagagccttcctcctccaagaattgaggggctttctcatttttctctctgtaaaggatcatttcataattcagctctcttacttttataagccacttttaaaacccacattcctgtgtgtatttatatctatttctgtgctttctattctgttctattagtaatcagtccattcaagtgtcagtaccatgctgttttaattatggaggctttatactgtgttttaataactggtcaagctatgtcccttactgtgctgcttttttcagagttgaaaaagatttaataaaatcacaaatttaattggatttaatccttcatgtaaacaatatacaaattattttcctccttgcctctggttcttattcttttttaatcatctttggtgaatttttttctttcatataagatcttaggagtagatggagaggagtgactaaatctcacaagaacagactcaatattaccacacagtaccgaggggaaaatccacccccatgattaaatcacctcccaccagaccccacccctaacaccgagggttacaattagacatgagatttcagtggagacacagatccaaatcatatcagctactttggaagacagtatagaagtttctcttaaaactgaacgtactcttaccatatgatccagtaatgatactccttggtatttacccaaatgagttgaaaacttaacacacacacaaaaaaaacgaacccacacatggatatttttangagtttcagtcataattgccaaaatttgaaagcaaccaagatgtctttcagtaggtgaatggaaaaataaactgtggtatatccagagagtggaanatttttcattgttaaaaagaaatgagcaggccaggcacagtggctcatgcctgtaatcccagcactttgggagttcgaggtgggtggattgcctaaggtcaggagttcgagaccagcctgaccaacatggtgaaatcccgtctctactaaaaataaaaaaactagccgggcgtggtggtgggtgcctctaatcncagctactcaggaggctgaggcaggagaatcacttgaacccgggaggcggaggctgcagtgagcagagatcacgccattgcactccagcctgggcaataagagtgaaactccagctc

SEQ ID NO: 62120 - DNA, 488 bp, Homo sapiens
acctcagccaccatcgccaagcgggtacagtcagaagccccatttacaggtgaagaaacgaggctcagagagagaaggtgacgtgacatggaaaggggattcagaacgttagaaccagattcggaatcctaaaagctgagggccagacagcggctgcttctgtatgtggtgatgtggacccgaggctcgggccttcgtgacctcatgggaacacttaggatcagagcgcctgagtcttggaaacaaaatgttgaagttggagtctttgataaaatcttgaactggaagggctgggaatacctttggacacttctagacttctctgggtgggttttgtgtgtgtgtgtgtgtgagacacagccttaggaggtcctgagaacatgtgtcccctgggtggggtctattgaagtggtctctggggacctgcatgttcctccaataagctctgcaggagattctgatgcttacctgggtctgagagcctgcag

SEQ ID NO: 62121 - DNA, 1815 bp, Homo sapiens
cgcgaggagggttgctagtggagaagcaaccttggccatggaccagccggctggcctgcaggtggactacgtcttccggggtgtggagcatgccgtgcgggtgatggtttctgggcaggtgctggagctggaggtggaggaccggatgacggctgaccagtggcggggcgagttcgatgctggcttcattgaagatttgactcacaagacagggaacttcaaacagttcaacatcttctgtcatatgctggagtcagccctcactcagagtagtgagtcagtcaccctggacctgctgacctacacagacctggagtccctgcggaaccgcaagatggggggccgcccaggctccttggcccccaggtcggcccagctcaactccaagcgctacctgatcctcatctactccgtggagtttgacaggattcactacccgctgcccctcccgtaccagggcaagccagaccccgtggttctgcagggcatcatccggtcactgaaggaggaactgggccgcctgcaagggctggatggccagaacactcgggacacccgggagaatgagatctggcacctgcgggagcaggtgtcgcgcctggcgtccgagaagcgggagctggaggcgcagctgggccgatcgcgcgaggaggcgctggccgggcgcgcggcacgccaggaggccgaggcgctgcgcgggctggtgcgcgggctggagctggagctgcggcaggagcgcggcctcgggcacagggtggccggccgtcgcggccaggactgccgccgtctggccaaggagctcgaggaggcgaaggcatcggagcggagcctgcgcgcccggctgaagacgctgaccagcgagctggcattgtacaagagggggaggcggactccgccggtgcagccgcccccgacgcgggaggaccgggcctcatcgtcccgggagcgctccgcgtcgcgaggccgcggcgccgcgcgctcctcatcccgggagagcggccgcgggagccggggtcggggccgccctgcgcgcccctcgccctcgcccacaggtggtcgcgcgctccgcttcgaccccacggcctttgtgaaagccaaggaaaggaagcagagagagatccagatgaagcagcagcagcggaaccgcttaggcagtgggggaagcggggacggtccgtccgtctcctggtctcgccagacccggccccctgctgccttgactggccgaggggacgcccctaaccgctcccgaaaccgcagctcctcagtggacagtttccgcagccgctgctcgtctgccagctcctgcagcgatttggaggatttctctgagtcgctctccagagggggtcaccgccgccgtgggaagcctcccagcccaacgccctggagtgggtccaatatgaagtctccccccgtggaacgcagccaccatcagaaatctctggccaactccgggggctgggtccccatcaaagagtacagctcggagcaccaggcggctgacatggccgaaatagacgcacgcctgaaggccttgcaggagtacatgaaccgactggacatgcggtcataacgtggagaaggggtactacccctccatcccccacccacttgctgggtatggtgtggggggtggggccagggtggcctccagccctgcccagtccctgccctggccccgtccctcctgctgcccctggggtctcaggtgtgtgaggccctgaccctgccctctccccaggcagtgcatgctgggagggaggatgtgtgcattttgtaaataaacatatttgccctggggaaaaaaaaact

SEQ ID NO: 62122 - DNA, 1732 bp, Homo sapiens
cgcgaggagggttgctagtggagaagcaaccttggccatggaccagccggctggcctgcaggtggactacgtcttccggggtgtggagcatgccgtgcgggtgatggtttctgggcaggtgctggagctggaggtggaggaccggatgacggctgaccagtggcggggcgagttcgatgctggctagtagtgagtcagtcaccctggacctgctgacctacacagacctggagtccctgcggaaccgcaagatggggggccgcccaggctccttggcccccaggtcggcccagctcaactccaagcgctacctgatcctcatctactccgtggagtttgacaggattcactacccgctgcccctcccgtaccagggcaagccagaccccgtggttctgcagggcatcatccggtcactgaaggaggaactgggccgcctgcaagggctggatggccagaacactcgggacacccgggagaatgagatctggcacctgcgggagcaggtgtcgcgcctggcgtccgagaagcgggagctggaggcgcagctgggccgatcgcgcgaggaggcgctggccgggcgcgcggcacgccaggaggccgaggcgctgcgcgggctggtgcgcgggctggagctggagctgcggcaggagcgcggcctcgggcacagggtggccggccgtcgcggccaggactgccgccgtctggccaaggagctcgaggaggcgaaggcatcggagcggagcctgcgcgcccggctgaagacgctgaccagcgagctggcattgtacaagagggggaggcggactccgccggtgcagccgcccccgacgcgggaggaccgggcctcatcgtcccgggagcgctccgcgtcgcgaggccgcggcgccgcgcgctcctcatcccgggagagcggccgcgggagccggggtcggggccgccctgcgcgcccctcgccctcgcccacaggtggtcgcgcgctccgcttcgaccccacggcctttgtgaaagccaaggaaaggaagcagagagagatccagatgaagcagcagcagcggaaccgcttaggcagtgggggaagcggggacggtccgtccgtctcctggtctcgccagacccggccccctgctgccttgactggccgaggggacgcccctaaccgctcccgaaaccgcagctcctcagtggacagtttccgcagccgctgctcgtctgccagctcctgcagcgatttggaggatttctctgagtcgctctccagagggggtcaccgccgccgtgggaagcctcccagcccaacgccctggagtgggtccaatatgaagtctccccccgtggaacgcagccaccatcagaaatctctggccaactccgggggctgggtccccatcaaagagtacagctcggagcaccaggcggctgacatggccgaaatagacgcacgcctgaaggccttgcaggagtacatgaaccgactggacatgcggtcataacgtggagaaggggtactacccctccatcccccacccacttgctgggtatggtgtggggggtggggccagggtggcctccagccctgcccagtccctgccctggccccgtccctcctgctgcccctggggtctcaggtgtgtgaggccctgaccctgccctctccccaggcagtgcatgctgggagggaggatgtgtgcattttgtaaataaacatatttgccctggggaaaaaaaaact

SEQ ID NO: 62123 - DNA, 2060 bp, Homo sapiens
cgcgaggagggttgctagtggagaagcaaccttggccatggaccagccggctggcctgcaggtggactacgtcttccggggtgtggagcatgccgtgcgggtgatggtttctgggcaggtgctggagctggaggtggaggaccggatgacggctgaccagtggcggggcgagttcgatgctggcttcattgaagatttgactcacaagacagggaacttcaaacagttcaacatcttctgtcatatgctggagtcagccctcactcagagtagtgagtcagtcaccctggacctgctgacctacacagacctggagtccctgcggaaccgcaagatggggggccgcccaggctccttggcccccaggtcggcccagctcaactccaagcgctacctgatcctcatctactccgtggagtttgacaggattcactacccgctgcccctcccgtaccagggcaagccagaccccgtggttctgcagggcatcatccggtcactgaaggaggaactgggccgcctgcaagggctggatggccagaacactcgggacacccgggagaatgagatctggcacctgcgggagcaggtgtcgcgcctggcgtccgagaagcgggagctggaggcgcagctgggccgatcgcgcgaggaggcgctggccgggcgcgcggcacgccaggaggccgaggcgctgcgcgggctggtgcgcgggctggagctggagctgcggcaggagcgcggcctcgggcacagggtggccggccgtcgcggccaggactgccgccgtctggccaaggagctcgaggaggcgaaggcatcggagcggagcctgcgcgcccggctgaagacgctgaccagcgagctggcattgtacaagagggggaggcggactccgccggtgcagccgcccccgacgcgggaggaccgggcctcatcgtcccgggagcgctccgcgtcgcgaggccgcggcgccgcgcgctcctcatcccgggagagcggccgcgggagccggggtcggggccgccctgcgcgcccctcgccctcgcccacaggtggtcgcgcgctccgcttcgaccccacggcctttgtgaaagccaaggaaaggaagcagagagagatccagatgaagcagcagcagcggaaccgcttaggcagtgggggaagcggggacggtccgtccgtctcctggtctcgccagacccggccccctgctgccttgactggccgaggggacgcccctaaccgctcccgaaaccgcagctcctcagtggacagtttccgcagccgctgctcgtctgccagctcctgcagcgatttggaggatttctctgagtcgctctccagagggggtcaccgccgccgtgggaagcctcccagcccaacgccctggagtgggtccaatatgaagtctccccccgtggaacgcagccaccatcagaaatctctggccaactccgggggctgggtccccatcaaagagtacagctcggagcaccaggcggctgacatggccgaaatagacgcacgcctgaaggccttgcaggagtacatgaaccgactggacatgcggtcataacgtggagaaggggtactacccctccatcccccacccacttgctgggtgaagaaacgaggctcagagagagaaggtgacgtgacatggaaaggggattcagaacgttagaaccagattcggaatcctaaaagctgagggccagacagcggctgcttctgtatgtggtgatgtggacccgaggctcgggccttcgtgacctcatgggaacacttaggatcagagcgcctgagtcttggaaacaaaatgttgaagttggagtctttgataaaatcttgaactggaagggctgggaatacctttggacacttctagacttctctgggtgggttttgtgtgtgtgtgtgtgtgagacacagccttaggaggtcctgagaacatgtgtcccctgggtggggtctattgaagtggtctctggggacctgcatgttcctccaataagctctgcaggagattctgatgcttacctgggtctgagagcctgcag

SEQ ID NO: 62124 - DNA, 1622 bp, Homo sapiens
cgcgaggagggttgctagtggagaagcaaccttggccatggaccagccggctggcctgcaggtggactacgtcttccggggtgtggagcatgccgtgcgggtgatggtttctgggcaggtgctggagctggaggtggaggaccggatgacggctgaccagtggcggggcgagttcgatgctggcttcattgaagatttgactcacaagacagggaacttcaaacagttcaacatcttctgtcatatgctggagtcagccctcactcagagtagtgagtcagtcaccctggacctgctgacctacacagacctggagtccctgcggaaccgcaagatggggggccgcccaggctccttggcccccaggtcggcccagctcaactccaagcgctacctgatcctcatctactccgtggagtttgacaggattcactacccgctgcccctcccgtaccagggcaagccagaccccgtggttctgcagggcatcatccggtcactgaaggaggaactgggccgcctgcaagggctggatggccagaacactcgggacacccgggagaatgagatctggcacctgcgggagcaggtgtcgcgcctggcgtccgagaagcgggagctggaggcgcagctgggccgatcgcccggctgaagacgctgaccagcgagctggcattgtacaagagggggaggcggactccgccggtgcagccgcccccgacgcgggaggaccgggcctcatcgtcccgggagcgctccgcgtcgcgaggccgcggcgccgcgcgctcctcatcccgggagagcggccgcgggagccggggtcggggccgccctgcgcgcccctcgccctcgcccacaggtggtcgcgcgctccgcttcgaccccacggcctttgtgaaagccaaggaaaggaagcagagagagatccagatgaagcagcagcagcggaaccgcttaggcagtgggggaagcggggacggtccgtccgtctcctggtctcgccagacccggccccctgctgccttgactggccgaggggacgcccctaaccgctcccgaaaccgcagctcctcagtggacagtttccgcagccgctgctcgtctgccagctcctgcagcgatttggaggatttctctgagtcgctctccagagggggtcaccgccgccgtgggaagcctcccagcccaacgccctggagtgggtccaatatgaagtctccccccgtggaacgcagccaccatcagaaatctctggccaactccgggggctgggtccccatcaaagagtacagctcggagcaccaggcggctgacatggccgaaatagacgcacgcctgaaggccttgcaggagtacatgaaccgactggacatgcggtcataacgtggagaaggggtactacccctccatcccccacccacttgctgggtatggtgtggggggtggggccagggtggcctccagccctgcccagtccctgccctggccccgtccctcctgctgcccctggggtctcaggtgtgtgaggccctgaccctgccctctccccaggcagtgcatgctgggagggaggatgtgtgcattttgtaaataaacatatttgccctggggaaaaaaaaact

SEQ ID NO: 62125 - DNA, 1018 bp, Homo sapiens
cgcgaggagggttgctagtggagaagcaaccttggccatggaccagccggctggcctgcaggtggactacgtcttccggggtgtggagcatgccgtgcgggtgatggtttctgggcaggtgctggagctggaggtggaggaccggatgacggctgaccagtggcggggcgagttcgatgctggcttcattgaagatttgactcacaagacagggaacttcaaacagttcaacatcttctgtcatatgctggagtcagccctcactcagagtagtgagtcagtcaccctggacctgctgacctacacagacctggagtccctgcggaaccgcaagatggggggccgcccaggctccttggcccccaggtcggcccagctcaactccaagcgctacctgatcctcatctactccgtggagtttgacaggattcactacccgctgcccctcccgcgccctccgtctccctctagtggacagtttccgcagccgctgctcgtctgccagctcctgcagcgatttggaggatttctctgagtcgctctccagagggggtcaccgccgccgtgggaagcctcccagcccaacgccctggagtgggtccaatatgaagtctccccccgtggaacgcagccaccatcagaaatctctggccaactccgggggctgggtccccatcaaagagtacagctcggagcaccaggcggctgacatggccgaaatagacgcacgcctgaaggccttgcaggagtacatgaaccgactggacatgcggtcataacgtggagaaggggtactacccctccatcccccacccacttgctgggtatggtgtggggggtggggccagggtggcctccagccctgcccagtccctgccctggccccgtccctcctgctgcccctggggtctcaggtgtgtgaggccctgaccctgccctctccccaggcagtgcatgctgggagggaggatgtgtgcattttgtaaataaacatatttgccctggggaaaaaaaaact

SEQ ID NO: 62126 - DNA, 677 bp, Homo sapiens
cgcgaggagggttgctagtggagaagcaaccttggccatggaccagccggctggcctgcaggtggactacgtcttccggggtgtggagcatgccgtgcgggtgatggtttctgggcaggtgctggagctggaggtggaggaccggatgacggctgaccagtggcggggcgagttcgatgctggcttcattgaagatttgactcacaagacagggaacttcaaacagttcaacatcttctgtcatatgctggagtcagccctcactcagagtagtgagtcagtcaccctggacctgctgacctacacagacctggagtccctgcggaaccgcaagatggggggccgcccaggctccttggcccccaggtcggcccagctcaactccaagcgctacctgatcctcatctactccgtggagtttgacaggattcactacccgctgcccctcccgtaccagggcaagccagaccccgtggttctgcagggcatcatccggtcactgaaggaggaactgggccgccctgcccagtccctgccctggccccgtccctcctgctgcccctggggtctcaggtgtgtgaggccctgaccctgccctctccccaggcagtgcatgctgggagggaggatgtgtgcattttgtaaataaacatatttgccctggggaaaaaaaaact

SEQ ID NO: 62127 - DNA, 379 bp, Homo sapiens
aaagccctttctatgaaggttacaggctctatatctgctttcatgatgacatttgtctatgtttttgtaggattctattctgacaagcacaaaaccctgcaccaagttgaacctgtcctttgtgatgaggctgttgaacagaagagcagcgtagcagtctgtctattcttgctccacattcagctaaatgccaactccgatccctttgagatggtgaacaggctgaacccagggatcgtgtcatccctcagtatccagacttcttcagagaaccatgtggtgaaacttcttgattaaggtcgcaaaagaagagacaactatacattttgtgatgctgaagggaaatgtacaagagcactactgaagaagtccagccaaa

SEQ ID NO: 62128 - DNA, 291 bp, Homo sapiens
ggcaaaaacatcaacacatggaaggtatacactggttcggttcaaaaagggggattatcttcaggagaggtcttataggttgtaggtggacttggggattctctggtttgtgattggttaaaggagtaaggccctgtctacagcttagagttgacagaaaggaaggtaagaatgctctgtcagagtcagccacaataaaatgccctggttagcaagcctgatggcctgcaggcctgacttacacctgccttgcatggccttagggcttgttcataatttgttatcttatgg

SEQ ID NO: 62129 - DNA, 1741 bp, Homo sapiens
taaatctcataatgcatgcagttgaagtattggagagaaaacgaaagaattcctacaagacatgaaataaaacacagctacttcactgttgtcagggaaaaaaaccaactgctccaaaagaatgtgtttttctcccattctggaaatcaacatgcagtctgaatctaacattacagtgcgagatgacattgatgacatcaacaccaatatgtaccaaccactatcatatccgttaagctttcaagtgtctctcaccggatttcttatgttagaaattgtgttgggacttggcagcaacctcactgtattggtactttactgcatgaaatccaacttaatcaactctgtcagtaacattattacaatgaatcttcatgtacttgatgtaataatttgtgtgggatgtattcctctaactatagttatccttctgctttcactggagagtaacactgctctcatttgctgtttccatgaggcttgtgtatcttttgcaagtgtctcaacagcaatcaacgtttttgctatcactttggacagatatgacatctctgtaaaacctgcaaaccgaattctgacaatgggcagagctgtaatgttaatgatatccatttggattttttcttttttctctttcctgattccttttattgaggtaaattttttcagtcttcaaagtggaaatacctgggaaaacaagacacttttatgtgtcagtacaaatgaatactacactgaactgggaatgtattatcacctgttagtacagatcccaatattctttttcactgttgtagtaatgttaatcacatacaccaaaatacttcaggctcttaatattcgaataggcacaagattttcaacagggcagaagaagaaagcaagaaagaaaaagacaatttctctaaccacacaacatgaggctacagacatgtcacaaagcagtggtgggagaaatgtagtctttggtgtaagaacttcagtttctgtaataattgccctccggcgagctgtgaaacgacaccgtgaacgacgagaaagacaaaagagagtcttcaggatgtctttattgattatttctacatttcttctctgctggacaccaatttctgttttaaataccaccattttatgtttaggcccaagtgaccttttagtaaaattaagattgtgttttttagtcatggcttatggaacaactatatttcaccctctattatatgcattcactagacaaaaatttcaaaaggtcttgaaaagtaaaatgaaaaagcgagttgtttctatagtagaagctgatcccctgcctaataatgctgtaatacacaactcttggatagatcctaaaagaaacaaaaaaattacctttgaagatagtgaaataagagaaaaatgtttagtgcctcaggttgtcacagactagagaaaagtctcagtttcaccaaatccacattcaaatgagttttaaatttaaattgtaaaaactgatattactgccaaatataagaaaaatattttaagtattggttatgttgtaaattttcaatgtgaatgtcaattagataggtcatatatattcaatttcttcattacttaatgtatttgttgcatggcagtttgttaaagtactatcatgtgtatattttgtcaatattatgtccaacagaaaatattcatgtaagtcatattttttaaggaataaatacatagccttaaaacagtgtataactttaaaatgtaa

SEQ ID NO: 62130 - DNA, 1528 bp, Homo sapiens
  misc_feature (6)..(6): n is a, c, g, or t
  misc_feature (1100)..(1100): n is a, c, g, or t
attagnctagtacgaggcgggtggctctcggccttgggaaggaaggcagtgcctgctctgctgtgagccgccaggaaccctcctcctgtcaatgggggtgtagtatttttgccaaaatatcatgttcaatttcagtagtttgatcagttgaaggctagaagtgtgaagtgcagatgagtgtgtgttcttccccaaggtccccccacagctccaggacaccgctgtcctggcatttgtggccactcactttgtaggaaactcatctccttcctgaggagccgggaggctggaccagtcccgtcgtgcagtcaggtgggcggtgtgtctttccagaaggtcacgtggaaatgtctcgggacttgggtcccggagtgcccgtgaagcgtgtttttgctcctgaggtgcattttctcatcatccttgctttaccacaatgagcaatgaggtcgggttttatatgcaacttattgtatctgaattcctgtagcacacctcataggtatgatttttttaaattaaagaattcagaataaacattttttgatccaaaaaaaaaaaaaaaaaaaaaaaaacaaaaaaagaaggggggggcgcgcgcctacaaaaataatcccccgcgggggggccccacgttttggcgcgcgctccccgcgcttttttgtgtaaacacagggggcgcgccccatatgtaggggggcgcgatataataaaggcgcgggcgcgcgcggcggcgcgcggcggtttataacaacaggagcgctgcccggaggtggagggaacacagtcggtcgcccgcgtggggaactcctctgcgtgcgaaaaagcggacacccccctatcctctgctgggggggcggcgcccgctatgttcgcgggcacaccacctctccaccgcagcaagagatatatgtaagagcgccgctcgagaggcgggaacaatctacaaacacttacgagggcgttctatcatgtggtgtgctaccaccagcagcgcgcatataattgccgcgcgcggtatgaaaaaaatttaggcacccccgcgggaagtatgtatgtacttttcgggagcaacaattcttatttacccgccggggagtctngttgttgttaagaataaaaacaggcgcgcacactccacgacctaacgacagtgacccctggtacagccaacgagcagcaagctgaaccaaccgactgctatgcacacaactagagagtcgggacgaccaggcaacgaggagaatcgtccgcggcaggcgagcgagacagtcgcgacgacgcagcagggcaggggctacagcagcaccaagcgaccgcaccgcggcagacggaggcacggagcgacagaaggaaagcgggcgagctagccaacgcacccgcaggagcagtacgcccaggcagccagcagccagacagcgaacagtcaagcccgcgagaggacacaagcggcgaatcagacagcaggaccagcgcgagccagccacccagacgagacaggagagcacaaaacacgcgcccgcacggccgc

SEQ ID NO: 62131 - DNA, 487 bp, Homo sapiens
agacggatccccgatatttgtggttctggcctattcattagtgctgtaaactatgttgacatgggattggccgacactgtgatgcacacgtagctcacagactacagtactaaatgctacccttggttgtccatcaccaggatacattgcgcttgcatgactcccaaaaagacttctcgagatacctgcgctcgaatgcatggtcttcatcatgatcgtatgcagaagaatgcgtcaacctttgaggatgtcacccaggtgtcctctgcctaccagaagacagtacctgtcgaagctgtgaccagcaaaacaagtaacatcagagctaactttgaaaacctcgctaaggagaaagagcaggaggacaggcggaaggcggaggcggagagagcccagcggatggccaaggagcggcaggagcaggaagaggccaggaggaagctggaggagcaagccagagccagaaccataaatatcgcggtaccga

SEQ ID NO: 62132 - DNA, 252 bp, Homo sapiens
ccgcccagcagcagcccccgccatatatatgtgtatgtgtgtgtatatatagacatatgtatatatatgtgtgtatgtatatatataatgtatatatgtgtgggggcggccgctggccccccgagccagcgcccccccccggagctgcgccctggatcctcacactacagatcaggccttctttggttcttgggtggttttgggttttttctgttttttttttttttttattttttggagggggggggcccg

SEQ ID NO: 62133 - DNA, 251 bp, Homo sapiens
agacggatccccgatatttgtggttctggctcactgggggttcccactctccgtccatctcttcatcccagtccaggggcttcgtagcagcaagggccaggagacaggcgtgttctgtgtggtttctgtgtttcatttgtggtggtgtttttggccggggttgggaggttttttgtttgttctgtttgatgacaccatatgtgtgtaacatctccacacagagccacacagtatgtacgtgaagccagctc

SEQ ID NO: 62134 - DNA, 214 bp, Homo sapiens
acgctctctctgtggggtgtacaggctgtgctgagttcttccttccccactgcatagcctgtacaccatcactcagagcgtttcccagggctgcagaggctgtggcctgcctgtttccctgtgcctcttgtttggcctgcacatttaaatttttaaaaatatttgccaacatttgaaaagtgagagcttgactatttaaaaactcaaaaaaaaa

SEQ ID NO: 62135 - DNA, 4388 bp, Homo sapiens
  misc_feature (131)..(131): n is a, c, g, or t
  misc_feature (3960)..(3960): n is a, c, g, or t
catggccgggctagcgcttagccagctgcgtggctggacccccgggactcttgcgggccaagacgcgggaagaggcggggcagggggcggggtctgcgcggggacccggatgcggcccgaccgcgacctcnggaaccggaagtagagcctggtgcctgggagcggctggcgcggcggaatccagggccgacccgggccggaccgaccccaggcggcgacggaatcagtccccaatgcctggaaattcctcattggattactgtgttttaaacagaatttcgtgaacagccttttatctccaagcggaaagaaagatgtggaaagcttcagcaggccacgctgtgtccatcgcccaggatgacgcgggggccgatgactgggagaccgaccctgattttgtgaatgatgtgagtgagaaggagcaaagatggggtgccaagacggtgcagggctccgggcaccaggagcatatcaacatacacaagctgagggagaatgtctttcaagagcatcagacccttaaggagaaggaacttgaaacaggaccaaaagcttcccatggctatggagggaaatttggtgtggaacaagaccgaatggataagtcagctgtcggccacgaatatcagtcgaaactttccaagcactgctcgcaggtggactcggtccgtggcttcggaggcaagtttggtgtccagatggacagagttgatcagtctgctgtaggctttgaataccaggggaagactgagaagcatgcctcccagaaagactactccagtggttttggcggcaagtatggcgtgcaggccgaccgagtagacaagagcgcggtgggcttcgactaccagggcaagacggagaagcacgagtcacagagagattactccaaaggtttcggcggcaaatacggtatcgacaaggacaaagtggataagagcgccgttggctttgagtatcaaggcaaaacggagaagcacgagtcccagaaagactatgtgaaagggtttggaggaaaatttggtgtgcagacagacagacaagacaaatgtgcccttggctgggatcaccaggagaaattgcagctgcatgaatcccaaaaagattataagactggttttggaggcaaattcggtgttcagtcggagaggcaggactccgctgctgtggggtttgattacaaggagaagctggccaagcacgagtcccagcaagactactccaaaggattcggcgggaagtatggggtgcagaaggatcggatggataagaatgcgtcaacctttgaggatgtcacccaggtgtcctctgcctaccagaagacagtacctgtcgaagctgtgaccagcaaaacaagtaacatcagagctaactttgaaaacctcgctaaggagaaagagcaggaggacaggcggaaggcggaggcggagagagcccagcggatggccaaggagcggcaggagcaggaagaggccaggaggaagctggaggagcaagccagagccaaaacgcaaacgccccctgtgtcgcccgcacctcagccaaccgaggagaggctgccctcgagccccgtctatgaggatgcggcttccttcaaggcagagctgagctacagaggccctgtgagtgggacggagccggagcccgtgtacagcatggaggccgctgactaccgagaggccagcagccagcagggcctggcctatgccacagaggctgtctatgaaagcgcagaggccccgggccactatcccgcagaggacagcacctacgatgagtacgagaacgatctggggatcacagccgtcgccctgtacgactaccaggctgcgggcgatgatgagatctcatttgaccctgatgacatcatcaccaacatcgagatgattgacgacggctggtggcgcggggtgtgcaagggccggtacgggctcttcccagccaactatgtggagctgcggcagtagggcccccagcccccccccggagctgcgccctggatcctcacactacagatcaggccttctttggttcttgggtggttttgggttttttctgttttttttttttttttttttttttttttttgaaggtggggaggggaatatacacattgcttttatatttaatacttttgctgatgcttttgaaaatgtttatgccacagaatttgctaatatattgtaatcacattccttaggaggactttggtaattggttttatgcattgatggttttttttttcttttttgccaaattgactgtcacgcggcagcttcagggagctcgcattctcttgtgttcgtgttgccctcgtgcccatcaagtgcagtcgggacctcccaggacaagcacgaggcctcaggtcggccctgtggcgggtaggcaggaaggactgtcccagacgaggggcttcctctagagtctcactgctggggaggagaggactgggcctgatggaagttaacccggagctaagtcacccagagcacaggagctgccatgtcagatgggaaatctgcctatgtcataccgtgacagcccgcaggatcaggtgacttctagcagagaccctggtttttttcctgtgcccactccggcttgtcctcatctctacccatcccctgatgcccaggtcaccgggagggctgctgggagcctctcctgtccccgccgggcagtgtcactgagtccttgaaatcctcccctgccccgcgggtctctggattgggacgcacagtgcagttgaggtctgcgtcgggcttggcttttcacaaaggctgatgtcttaactgtcacccatatggtccctgggccaccgggcagcctggggcggtgtgtgtgccatgtcacagcatggcctctcggccttgggaaggaaggcagtgcctgctctgctgtgagccgccaggaaccctcctcctgtcaatgggggtgtagtatttttgccaaaatatcatgttcaatttcagtagtttgatcagttgaaggctagaagtgtgaagtgcagatgagtgtgtgttcttccccaaggtccccccacagctccaggacaccgctgtcctggcatttgtggccactcactttgtaggaaactcatctccttcctgaggagccgggaggctggaccagtcccgtcgtgcagtcaggtgggcggtgtgtctttccagaaggtcacgtggaaatgtctcgggacttgggtcccggagtgcccgtgaagcgtgtttttgctcctgaggtgcattttctcatcatccttgctttaccacaatgagcaatgaggtcgggttttatatgcaacttattgtatctgaattcctgtagcacacctcataggtatgatttttttaaattaaagaattcagaataaacattttttgatccaaaaaaaaaaaaaaaaaacaaacaaaaaaaaaaaaaaaaaaaaaaaaacaaaaaaagaaggggggggcgcgcgcctacaaaaataatcccccgcgggggggccccacgttttggcgcgcgctccccgcgcttttttgtgtaaacacagggggcgcgccccatatgtaggggggcgcgatataataaaggcgcgggcgcgcgcggcggcgcgcggcggtttataacaacaggagcgctgcccggaggtggagggaacacagtcggtcgcccgcgtggggaactcctctgcgtgcgaaaaagcggacacccccctatcctctgctgggggggcggcgcccgctatgttcgcgggcacaccacctctccaccgcagcaagagatatatgtaagagcgccgctcgagaggcgggaacaatctacaaacacttacgagggcgttctatcatgtggtgtgctaccaccagcagcgcgcatataattgccgcgcgcggtatgaaaaaaatttaggcacccccgcgggaagtatgtatgtacttttcgggagcaacaattcttatttacccgccggggagtctngttgttgttaagaataaaaacaggcgcgcacactccacgacctaacgacagtgacccctggtacagccaacgagcagcaagctgaaccaaccgactgctatgcacacaactagagagtcgggacgaccaggcaacgaggagaatcgtccgcggcaggcgagcgagacagtcgcgacgacgcagcagggcaggggctacagcagcaccaagcgaccgcaccgcggcagacggaggcacggagcgacagaaggaaagcgggcgagctagccaacgcacccgcaggagcagtacgcccaggcagccagcagccagacagcgaacagtcaagcccgcgagaggacacaagcggcgaatcagacagcaggaccagcgcgagccagccacccagacgagacaggagagcacaaaacacgcgcccgcacggccgc

SEQ ID NO: 62136 - DNA, 3274 bp, Homo sapiens
  misc_feature (131)..(131): n is a, c, g, or t
catggccgggctagcgcttagccagctgcgtggctggacccccgggactcttgcgggccaagacgcgggaagaggcggggcagggggcggggtctgcgcggggacccggatgcggcccgaccgcgacctcnggaaccggaagtagagcctggtgcctgggagcggctggcgcggcggaatccagggccgacccgggccggaccgaccccaggcggcgacggaatcagtccccaatgcctggaaattcctcattggattactgtgttttaaacagaatttcgtgaacagccttttatctccaagcggaaagaaagatgtggaaagcttcagcaggccacgctgtgtccatcgcccaggatgacgcgggggccgatgactgggagaccgaccctgattttgtgaatgatgtgagtgagaaggagcaaagatggggtgccaagacggtgcagggctccgggcaccaggagcatatcaacatacacaagctgagggagaatgtctttcaagagcatcagacccttaaggagaaggaacttgaaacaggaccaaaagcttcccatggctatggagggaaatttggtgtggaacaagaccgaatggataagtcagctgtcggccacgaatatcagtcgaaactttccaagcactgctcgcaggtggactcggtccgtggcttcggaggcaagtttggtgtccagatggacagagttgatcagtctgctgtaggctttgaataccaggggaagactgagaagcatgcctcccagaaagactactccagtggttttggcggcaagtatggcgtgcaggccgaccgagtagacaagagcgcggtgggcttcgactaccagggcaagacggagaagcacgagtcacagagagattactccaaaggtttcggcggcaaatacggtatcgacaaggacaaagtggataagagcgccgttggctttgagtatcaaggcaaaacggagaagcacgagtcccagaaagactatgtgaaagggtttggaggaaaatttggtgtgcagacagacagacaagacaaatgtgcccttggctgggatcaccaggagaaattgcagctgcatgaatcccaaaaagactactccaaaggattcggcgggaagtatggggtgcagaaggatcggatggataagaatgcgtcaacctttgaggatgtcacccaggtgtcctctgcctaccagaagacagtacctgtcgaagctgtgaccagcaaaacaagtaacatcagagctaactttgaaaacctcgctaaggagaaagagcaggaggacaggcggaaggcggaggcggagagagcccagcggatggccaaggagcggcaggagcaggaagaggccaggaggaagctggaggagcaagccagagccaaaacgcaaacgccccctgtgtcgcccgcacctcagccaaccgaggagaggctgccctcgagccccgtctatgaggatgcggcttccttcaaggcagagctgagctacagaggccctgtgagtgggacggagccggagcccgtgtacagcatggaggccgctgactaccgagaggccagcagccagcagggcctggcctatgccacagaggctgtctatgaaagcgcagaggccccgggccactatcccgcagaggacagcacctacgatgagtacgagaacgatctggggatcacagccgtcgccctgtacgactaccaggctgcgggcgatgatgagatctcatttgaccctgatgacatcatcaccaacatcgagatgattgacgacggctggtggcgcggggtgtgcaagggccggtacgggctcttcccagccaactatgtggagctgcggcagtagggcccccagcccccccccggagctgcgccctggatcctcacactacagatcaggccttctttggttcttgggtggttttgggttttttctgttttttttttttttttttttttttttttttgaaggtggggaggggaatatacacattgcttttatatttaatacttttgctgatgcttttgaaaatgtttatgccacagaatttgctaatatattgtaatcacattccttaggaggactttggtaattggttttatgcattgatggttttttttttcttttttgccaaattgactgtcacgcggcagcttcagggagctcgcattctcttgtgttcgtgttgccctcgtgcccatcaagtgcagtcgggacctcccaggacaagcacgaggcctcaggtcggccctgtggcgggtaggcaggaaggactgtcccagacgaggggcttcctctagagtctcactgctggggaggagaggactgggcctgatggaagttaacccggagctaagtcacccagagcacaggagctgccatgtcagatgggaaatctgcctatgtcataccgtgacagcccgcaggatcaggtgacttctagcagagaccctggtttttttcctgtgcccactccggcttgtcctcatctctacccatcccctgatgcccaggtcaccgggagggctgctgggagcctctcctgtccccgccgggcagtgtcactgagtccttgaaatcctcccctgccccgcgggtctctggattgggacgcacagtgcagttgaggtctgcgtcgggcttggcttttcacaaaggctgatgtcttaactgtcacccatatggtccctgggccaccgggcagcctggggcggtgtgtgtgccatgtcacagcatggcctctcggccttgggaaggaaggcagtgcctgctctgctgtgagccgccaggaaccctcctcctgtcaatgggggtgtagtatttttgccaaaatatcatgttcaatttcagtagtttgatcagttgaaggctagaagtgtgaagtgcagatgagtgtgtgttcttccccaaggtccccccacagctccaggacaccgctgtcctggcatttgtggccactcactttgtaggaaactcatctccttcctgaggagccgggaggctggaccagtcccgtcgtgcagtcaggtgggcggtgtgtctttccagaaggtcacgtggaaatgtctcgggacttgggtcccggagtgcccgtgaagcgtgtttttgctcctgaggtgcattttctcatcatccttgctttaccacaatgagcaatgaggtcgggttttatatgcaacttattgtatctgaattcctgtagcacacctcataggtatgatttttttaaattaaagaattcagaataaacattttttgatcca

SEQ ID NO: 62137 - DNA, 3927 bp, Homo sapiens
  misc_feature (131)..(131): n is a, c, g, or t
catggccgggctagcgcttagccagctgcgtggctggacccccgggactcttgcgggccaagacgcgggaagaggcggggcagggggcggggtctgcgcggggacccggatgcggcccgaccgcgacctcnggaaccggaagtagagcctggtgcctgggagcggctggcgcggcggaatccagggccgacccgggccggaccgaccccaggcggcgacggaatcagtccccaatgcctggaaattcctcattggattactgtgttttaaacagaatttcgtgaacagccttttatctccaagcggaaagaaagatgtggaaagcttcagcaggccacgctgtgtccatcgcccaggatgacgcgggggccgatgactgggagaccgaccctgattttgtgaatgatgtgagtgagaaggagcaaagatggggtgccaagacggtgcagggctccgggcaccaggagcatatcaacatacacaagctgagggagaatgtctttcaagagcatcagacccttaaggagaaggaacttgaaacaggaccaaaagcttcccatggctatggagggaaatttggtgtggaacaagaccgaatggataagtcagctgtcggccacgaatatcagtcgaaactttccaagcactgctcgcaggtggactcggtccgtggcttcggaggcaagtttggtgtccagatggacagagttgatcagtctgctgtaggctttgaataccaggggaagactgagaagcatgcctcccagaaagactactccagtggttttggcggcaagtatggcgtgcaggccgaccgagtagacaagagcgcggtgggcttcgactaccagggcaagacggagaagcacgagtcacagagagattactccaaaggtttcggcggcaaatacggtatcgacaaggacaaagtggataagagcgccgttggctttgagtatcaaggcaaaacggagaagcacgagtcccagaaaggtgtcttccgttttatcttaccctccagccagcagctagtaatgtgacaggtggtagccacaccggaaaaggaaaaacaaagcgttattgatagcccttaacgtagatgtctctttttcatgaaatgcccaacttgaaaacggcacatccagaaacacagctgctaaataggaactcgcagcttgagtgttatggcgctccagccccagcggcgttgcttatcgtggtggccacaccccgcacgtctgtgttgcccgtgtgagcctgtgctgtctcatggtgcgggtggaagccgcatgcgtgggagcttccatggggtcctgtctggcttagtcacgatgctgaggtcatagactaggttatttcctgccactctccaaggagggcctcttcatggatgttatctaaagtattaccaaagatccggaagggaagagtagattgagtgaatcatatgcgtttaactgtattgaaaacatactttccacctgtgacctgcactacccgatatatgtggttctggcctttcattgtgcatgtagactatgtgaaagggtttggaggaaaatttggtgtgcagacagacagacaagacaaatgtgcccttggctgggatcaccaggagaaattgcagctgcatgaatcccaaaaagattataagactggttttggaggcaaattcggtgttcagtcggagaggcaggactccgctgctgtggggtttgattacaaggagaagctggccaagcacgagtcccagcaagactactccaaaggattcggcgggaagtatggggtgcagaaggatcggatggataagaatgcgtcaacctttgaggatgtcacccaggtgtcctctgcctaccagaagacagtacctgtcgaagctgtgaccagcaaaacaagtaacatcagagctaactttgaaaacctcgctaaggagaaagagcaggaggacaggcggaaggcggaggcggagagagcccagcggatggccaaggagcggcaggagcaggaagaggccaggaggaagctggaggagcaagccagagccaaaacgcaaacgccccctgtgtcgcccgcacctcagccaaccgaggagaggctgccctcgagccccgtctatgaggatgcggcttccttcaaggcagagctgagctacagaggccctgtgagtgggacggagccggagcccgtgtacagcatggaggccgctgactaccgagaggccagcagccagcagggcctggcctatgccacagaggctgtctatgaaagcgcagaggccccgggccactatcccgcagaggacagcacctacgatgagtacgagaacgatctggggatcacagccgtcgccctgtacgactaccaggctgcgggcgatgatgagatctcatttgaccctgatgacatcatcaccaacatcgagatgattgacgacggctggtggcgcggggtgtgcaagggccggtacgggctcttcccagccaactatgtggagctgcggcagtagggcccccagcccccccccggagctgcgccctggatcctcacactacagatcaggccttctttggttcttgggtggttttgggttttttctgttttttttttttttttttttttttttttttgaaggtggggaggggaatatacacattgcttttatatttaatacttttgctgatgcttttgaaaatgtttatgccacagaatttgctaatatattgtaatcacattccttaggaggactttggtaattggttttatgcattgatggttttttttttcttttttgccaaattgactgtcacgcggcagcttcagggagctcgcattctcttgtgttcgtgttgccctcgtgcccatcaagtgcagtcgggacctcccaggacaagcacgaggcctcaggtcggccctgtggcgggtaggcaggaaggactgtcccagacgaggggcttcctctagagtctcactgctggggaggagaggactgggcctgatggaagttaacccggagctaagtcacccagagcacaggagctgccatgtcagatgggaaatctgcctatgtcataccgtgacagcccgcaggatcaggtgacttctagcagagaccctggtttttttcctgtgcccactccggcttgtcctcatctctacccatcccctgatgcccaggtcaccgggagggctgctgggagcctctcctgtccccgccgggcagtgtcactgagtccttgaaatcctcccctgccccgcgggtctctggattgggacgcacagtgcagttgaggtctgcgtcgggcttggcttttcacaaaggctgatgtcttaactgtcacccatatggtccctgggccaccgggcagcctggggcggtgtgtgtgccatgtcacagcatggcctctcggccttgggaaggaaggcagtgcctgctctgctgtgagccgccaggaaccctcctcctgtcaatgggggtgtagtatttttgccaaaatatcatgttcaatttcagtagtttgatcagttgaaggctagaagtgtgaagtgcagatgagtgtgtgttcttccccaaggtccccccacagctccaggacaccgctgtcctggcatttgtggccactcactttgtaggaaactcatctccttcctgaggagccgggaggctggaccagtcccgtcgtgcagtcaggtgggcggtgtgtctttccagaaggtcacgtggaaatgtctcgggacttgggtcccggagtgcccgtgaagcgtgtttttgctcctgaggtgcattttctcatcatccttgctttaccacaatgagcaatgaggtcgggttttatatgcaacttattgtatctgaattcctgtagcacacctcataggtatgatttttttaaattaaagaattcagaataaacattttttgatcca

SEQ ID NO: 62138 - DNA, 3816 bp, Homo sapiens
  misc_feature (131)..(131): n is a, c, g, or t
catggccgggctagcgcttagccagctgcgtggctggacccccgggactcttgcgggccaagacgcgggaagaggcggggcagggggcggggtctgcgcggggacccggatgcggcccgaccgcgacctcnggaaccggaagtagagcctggtgcctgggagcggctggcgcggcggaatccagggccgacccgggccggaccgaccccaggcggcgacggaatcagtccccaatgcctggaaattcctcattggattactgtgttttaaacagaatttcgtgaacagccttttatctccaagcggaaagaaagatgtggaaagcttcagcaggccacgctgtgtccatcgcccaggatgacgcgggggccgatgactgggagaccgaccctgattttgtgaatgatgtgagtgagaaggagcaaagatggggtgccaagacggtgcagggctccgggcaccaggagcatatcaacatacacaagctgagggagaatgtctttcaagagcatcagacccttaaggagaaggaacttgaaacaggaccaaaagcttcccatggctatggagggaaatttggtgtggaacaagaccgaatggataagtcagctgtcggccacgaatatcagtcgaaactttccaagcactgctcgcaggtggactcggtccgtggcttcggaggcaagtttggtgtccagatggacagagttgatcagtctgctgtaggctttgaataccaggggaagactgagaagcatgcctcccagaaagactactccagtggttttggcggcaagtatggcgtgcaggccgaccgagtagacaagagcgcggtgggcttcgactaccagggcaagacggagaagcacgagtcacagagagattactccaaaggtttcggcggcaaatacggtatcgacaaggacaaagtggataagagcgccgttggctttgagtatcaaggcaaaacggagaagcacgagtcccagaaaggtgtcttccgttttatcttaccctccagccagcagctagtaatgtgacaggtggtagccacaccggaaaaggaaaaacaaagcgttattgatagcccttaacgtagatgtctctttttcatgaaatgcccaacttgaaaacggcacatccagaaacacagctgctaaataggaactcgcagcttgagtgttatggcgctccagccccagcggcgttgcttatcgtggtggccacaccccgcacgtctgtgttgcccgtgtgagcctgtgctgtctcatggtgcgggtggaagccgcatgcgtgggagcttccatggggtcctgtctggcttagtcacgatgctgaggtcatagactaggttatttcctgccactctccaaggagggcctcttcatggatgttatctaaagtattaccaaagatccggaagggaagagtagattgagtgaatcatatgcgtttaactgtattgaaaacatactttccacctgtgacctgcactacccgatatatgtggttctggcctttcattgtgcatgtagactatgtgaaagggtttggaggaaaatttggtgtgcagacagacagacaagacaaatgtgcccttggctgggatcaccaggagaaattgcagctgcatgaatcccaaaaagactactccaaaggattcggcgggaagtatggggtgcagaaggatcggatggataagaatgcgtcaacctttgaggatgtcacccaggtgtcctctgcctaccagaagacagtacctgtcgaagctgtgaccagcaaaacaagtaacatcagagctaactttgaaaacctcgctaaggagaaagagcaggaggacaggcggaaggcggaggcggagagagcccagcggatggccaaggagcggcaggagcaggaagaggccaggaggaagctggaggagcaagccagagccaaaacgcaaacgccccctgtgtcgcccgcacctcagccaaccgaggagaggctgccctcgagccccgtctatgaggatgcggcttccttcaaggcagagctgagctacagaggccctgtgagtgggacggagccggagcccgtgtacagcatggaggccgctgactaccgagaggccagcagccagcagggcctggcctatgccacagaggctgtctatgaaagcgcagaggccccgggccactatcccgcagaggacagcacctacgatgagtacgagaacgatctggggatcacagccgtcgccctgtacgactaccaggctgcgggcgatgatgagatctcatttgaccctgatgacatcatcaccaacatcgagatgattgacgacggctggtggcgcggggtgtgcaagggccggtacgggctcttcccagccaactatgtggagctgcggcagtagggcccccagcccccccccggagctgcgccctggatcctcacactacagatcaggccttctttggttcttgggtggttttgggttttttctgttttttttttttttttttttttttttttttgaaggtggggaggggaatatacacattgcttttatatttaatacttttgctgatgcttttgaaaatgtttatgccacagaatttgctaatatattgtaatcacattccttaggaggactttggtaattggttttatgcattgatggttttttttttcttttttgccaaattgactgtcacgcggcagcttcagggagctcgcattctcttgtgttcgtgttgccctcgtgcccatcaagtgcagtcgggacctcccaggacaagcacgaggcctcaggtcggccctgtggcgggtaggcaggaaggactgtcccagacgaggggcttcctctagagtctcactgctggggaggagaggactgggcctgatggaagttaacccggagctaagtcacccagagcacaggagctgccatgtcagatgggaaatctgcctatgtcataccgtgacagcccgcaggatcaggtgacttctagcagagaccctggtttttttcctgtgcccactccggcttgtcctcatctctacccatcccctgatgcccaggtcaccgggagggctgctgggagcctctcctgtccccgccgggcagtgtcactgagtccttgaaatcctcccctgccccgcgggtctctggattgggacgcacagtgcagttgaggtctgcgtcgggcttggcttttcacaaaggctgatgtcttaactgtcacccatatggtccctgggccaccgggcagcctggggcggtgtgtgtgccatgtcacagcatggcctctcggccttgggaaggaaggcagtgcctgctctgctgtgagccgccaggaaccctcctcctgtcaatgggggtgtagtatttttgccaaaatatcatgttcaatttcagtagtttgatcagttgaaggctagaagtgtgaagtgcagatgagtgtgtgttcttccccaaggtccccccacagctccaggacaccgctgtcctggcatttgtggccactcactttgtaggaaactcatctccttcctgaggagccgggaggctggaccagtcccgtcgtgcagtcaggtgggcggtgtgtctttccagaaggtcacgtggaaatgtctcgggacttgggtcccggagtgcccgtgaagcgtgtttttgctcctgaggtgcattttctcatcatccttgctttaccacaatgagcaatgaggtcgggttttatatgcaacttattgtatctgaattcctgtagcacacctcataggtatgatttttttaaattaaagaattcagaataaacattttttgatcca

SEQ ID NO: 62139 - DNA, 4680 bp, Homo sapiens
  misc_feature (131)..(131): n is a, c, g, or t
catggccgggctagcgcttagccagctgcgtggctggacccccgggactcttgcgggccaagacgcgggaagaggcggggcagggggcggggtctgcgcggggacccggatgcggcccgaccgcgacctcnggaaccggaagtagagcctggtgcctgggagcggctggcgcggcggaatccagggccgacccgggccggaccgaccccaggcggcgacggaatcagtccccaatgcctggaaattcctcattggattactgtgttttaaacagaatttcgtgaacagccttttatctccaagcggaaagaaagatgtggaaagcttcagcaggccacgctgtgtccatcgcccaggatgacgcgggggccgatgactgggagaccgaccctgattttgtgaatgatgtgagtgagaaggagcaaagatggggtgccaagacggtgcagggctccgggcaccaggagcatatcaacatacacaagctgagggagaatgtctttcaagagcatcagacccttaaggagaaggaacttgaaacaggaccaaaagcttcccatggctatggagggaaatttggtgtggaacaagaccgaatggataagtcagctgtcggccacgaatatcagtcgaaactttccaagcactgctcgcaggtggactcggtccgtggcttcggaggcaagtttggtgtccagatggacagagttgatcagtctgctgtaggctttgaataccaggggaagactgagaagcatgcctcccagaaaggtaagacgcgaaaggtgcagaaagagcccgctccgggggccccgatggggagagtcacagccacctgaagccgtttccccgcgctccgggggccctgatggggagagtcacagccacctgaagccgtttcctgagcggtggctgttgccacaaggaggactctgccctcctcttcatgtttctggatcatctggataccacatgatggatgtattccccgttacacatccccctcggagccctggcatctgctgtcattgtggggcttctcccccttgtagcggaagccgccttcccttcatctgggcagcgctcctcctggaaaagagagctcacagattgatcggcagaaagctaacttccccccaaggctagaaaccagagttgttaaattcttgttttccttatacacatacggtcttaactgctggtgattaatcttgattacatcatgcagtctcttttttgaaagaccaaagcatatcgccaccttaaagttctcagtttattttttgcaagcttatttagttcttcctcctttgtgtcattgcatcatccgcggaacaagctctcagtccttacgcagtctcggtgcagtctaggtggaggtagctgtggtgtgggcaggcggaggatcagggtcttgtctcccatgttcagctgcatggctttcttcatatgaggctttctctttccatttttttcattttgttttgtttgtttgtttgttttgagacagagtctcgctctgttgcccaggctggagtgcagtggcacgatctcggctcactgcaacctgcgcctcctgggttcaaacgattctcctgcctcagcctcccaagtagctgggattacaggtgtgtgccactacccctggctagtttttctattttttagtaaagatggggttttgccacgttggccaggctggtctcaaactcctggcctcaagtgatccgcccacctcagcctccaaagtgctggttctttgtatgaagctttccagcttttacctgagcagttgattttcaaagtgggcatgcagcgtcatttctgactacacaaaggaactgccctgtaacagctgacagggcccagaacccccccatgcacctgttgtgaaacagggtccagcgtcacctgtatggagcagtgggtggcttgttgtacattttaaaatgtgcgcttgatgtgtttgtgagttgtaacccctacacacttttgcttagtttaacaaaaggaacagtgtagttcgtcctcaggcccccgtgctaattgctgccctgtctctccagactactccagtggttttggcggcaagtatggcgtgcaggccgaccgagtagacaagagcgcggtgggcttcgactaccagggcaagacggagaagcacgagtcacagagagattactccaaaggtttcggcggcaaatacggtatcgacaaggacaaagtggataagagcgccgttggctttgagtatcaaggcaaaacggagaagcacgagtcccagaaagactatgtgaaagggtttggaggaaaatttggtgtgcagacagacagacaagacaaatgtgcccttggctgggatcaccaggagaaattgcagctgcatgaatcccaaaaagattataagactggttttggaggcaaattcggtgttcagtcggagaggcaggactccgctgctgtggggtttgattacaaggagaagctggccaagcacgagtcccagcaagactactccaaaggattcggcgggaagtatggggtgcagaaggatcggatggataagaatgcgtcaacctttgaggatgtcacccaggtgtcctctgcctaccagaagacagtacctgtcgaagctgtgaccagcaaaacaagtaacatcagagctaactttgaaaacctcgctaaggagaaagagcaggaggacaggcggaaggcggaggcggagagagcccagcggatggccaaggagcggcaggagcaggaagaggccaggaggaagctggaggagcaagccagagccaaaacgcaaacgccccctgtgtcgcccgcacctcagccaaccgaggagaggctgccctcgagccccgtctatgaggatgcggcttccttcaaggcagagctgagctacagaggccctgtgagtgggacggagccggagcccgtgtacagcatggaggccgctgactaccgagaggccagcagccagcagggcctggcctatgccacagaggctgtctatgaaagcgcagaggccccgggccactatcccgcagaggacagcacctacgatgagtacgagaacgatctggggatcacagccgtcgccctgtacgactaccaggctgcgggcgatgatgagatctcatttgaccctgatgacatcatcaccaacatcgagatgattgacgacggctggtggcgcggggtgtgcaagggccggtacgggctcttcccagccaactatgtggagctgcggcagtagggcccccagcccccccccggagctgcgccctggatcctcacactacagatcaggccttctttggttcttgggtggttttgggttttttctgttttttttttttttttttttttttttttttgaaggtggggaggggaatatacacattgcttttatatttaatacttttgctgatgcttttgaaaatgtttatgccacagaatttgctaatatattgtaatcacattccttaggaggactttggtaattggttttatgcattgatggttttttttttcttttttgccaaattgactgtcacgcggcagcttcagggagctcgcattctcttgtgttcgtgttgccctcgtgcccatcaagtgcagtcgggacctcccaggacaagcacgaggcctcaggtcggccctgtggcgggtaggcaggaaggactgtcccagacgaggggcttcctctagagtctcactgctggggaggagaggactgggcctgatggaagttaacccggagctaagtcacccagagcacaggagctgccatgtcagatgggaaatctgcctatgtcataccgtgacagcccgcaggatcaggtgacttctagcagagaccctggtttttttcctgtgcccactccggcttgtcctcatctctacccatcccctgatgcccaggtcaccgggagggctgctgggagcctctcctgtccccgccgggcagtgtcactgagtccttgaaatcctcccctgccccgcgggtctctggattgggacgcacagtgcagttgaggtctgcgtcgggcttggcttttcacaaaggctgatgtcttaactgtcacccatatggtccctgggccaccgggcagcctggggcggtgtgtgtgccatgtcacagcatggcctctcggccttgggaaggaaggcagtgcctgctctgctgtgagccgccaggaaccctcctcctgtcaatgggggtgtagtatttttgccaaaatatcatgttcaatttcagtagtttgatcagttgaaggctagaagtgtgaagtgcagatgagtgtgtgttcttccccaaggtccccccacagctccaggacaccgctgtcctggcatttgtggccactcactttgtaggaaactcatctccttcctgaggagccgggaggctggaccagtcccgtcgtgcagtcaggtgggcggtgtgtctttccagaaggtcacgtggaaatgtctcgggacttgggtcccggagtgcccgtgaagcgtgtttttgctcctgaggtgcattttctcatcatccttgctttaccacaatgagcaatgaggtcgggttttatatgcaacttattgtatctgaattcctgtagcacacctcataggtatgatttttttaaattaaagaattcagaataaacattttttgatcca

SEQ ID NO: 62140 - DNA, 2671 bp, Homo sapiens
gaggatcccccgcgttctcctaccaggggaagactgagaagcatgcctcccagaaagactactccagtggttttggcggcaagtatggcgtgcaggccgaccgagtagacaagagcgcggtgggcttcgactaccagggcaagacggagaagcacgagtcacagagagattactccaaaggtttcggcggcaaatacggtatcgacaaggacaaagtggataagagcgccgttggctttgagtatcaaggcaaaacggagaagcacgagtcccagaaagactatgtgaaagggtttggaggaaaatttggtgtgcagacagacagacaagacaaatgtgcccttggctgggatcaccaggagaaattgcagctgcatgaatcccaaaaagattataagactggttttggaggcaaattcggtgttcagtcggagaggcaggactccgctgctgtggggtttgattacaaggagaagctggccaagcacgagtcccagcaagactactccaaaggattcggcgggaagtatggggtgcagaaggatcggatggataagaatgcgtcaacctttgaggatgtcacccaggtgtcctctgcctaccagaagacagtacctgtcgaagctgtgaccagcaaaacaagtaacatcagagctaactttgaaaacctcgctaaggagaaagagcaggaggacaggcggaaggcggaggcggagagagcccagcggatggccaaggagcggcaggagcaggaagaggccaggaggaagctggaggagcaagccagagccaaaacgcaaacgccccctgtgtcgcccgcacctcagccaaccgaggagaggctgccctcgagccccgtctatgaggatgcggcttccttcaaggcagagctgagctacagaggccctgtgagtgggacggagccggagcccgtgtacagcatggaggccgctgactaccgagaggccagcagccagcagggcctggcctatgccacagaggctgtctatgaaagcgcagaggccccgggccactatcccgcagaggacagcacctacgatgagtacgagaacgatctggggatcacagccgtcgccctgtacgactaccaggctgcgggcgatgatgagatctcatttgaccctgatgacatcatcaccaacatcgagatgattgacgacggctggtggcgcggggtgtgcaagggccggtacgggctcttcccagccaactatgtggagctgcggcagtagggcccccagcccccccccggagctgcgccctggatcctcacactacagatcaggccttctttggttcttgggtggttttgggttttttctgttttttttttttttttttttttttttttttgaaggtggggaggggaatatacacattgcttttatatttaatacttttgctgatgcttttgaaaatgtttatgccacagaatttgctaatatattgtaatcacattccttaggaggactttggtaattggttttatgcattgatggttttttttttcttttttgccaaattgactgtcacgcggcagcttcagggagctcgcattctcttgtgttcgtgttgccctcgtgcccatcaagtgcagtcgggacctcccaggacaagcacgaggcctcaggtcggccctgtggcgggtaggcaggaaggactgtcccagacgaggggcttcctctagagtctcactgctggggaggagaggactgggcctgatggaagttaacccggagctaagtcacccagagcacaggagctgccatgtcagatgggaaatctgcctatgtcataccgtgacagcccgcaggatcaggtgacttctagcagagaccctggtttttttcctgtgcccactccggcttgtcctcatctctacccatcccctgatgcccaggtcaccgggagggctgctgggagcctctcctgtccccgccgggcagtgtcactgagtccttgaaatcctcccctgccccgcgggtctctggattgggacgcacagtgcagttgaggtctgcgtcgggcttggcttttcacaaaggctgatgtcttaactgtcacccatatggtccctgggccaccgggcagcctggggcggtgtgtgtgccatgtcacagcatggcctctcggccttgggaaggaaggcagtgcctgctctgctgtgagccgccaggaaccctcctcctgtcaatgggggtgtagtatttttgccaaaatatcatgttcaatttcagtagtttgatcagttgaaggctagaagtgtgaagtgcagatgagtgtgtgttcttccccaaggtccccccacagctccaggacaccgctgtcctggcatttgtggccactcactttgtaggaaactcatctccttcctgaggagccgggaggctggaccagtcccgtcgtgcagtcaggtgggcggtgtgtctttccagaaggtcacgtggaaatgtctcgggacttgggtcccggagtgcccgtgaagcgtgtttttgctcctgaggtgcattttctcatcatccttgctttaccacaatgagcaatgaggtcgggttttatatgcaacttattgtatctgaattcctgtagcacacctcataggtatgatttttttaaattaaagaattcagaataaacattttttgatcca

SEQ ID NO: 62141 - DNA, 3094 bp, Homo sapiens
actgatttcgttgctccttttaaagtagtccttttttgtttgtttttagattactccaaaggtttcggcggcaaatacggtatcgacaaggacaaagtggataagagcgccgttggctttgagtatcaaggcaaaacggagaagcacgagtcccagaaaggtgtcttccgttttatcttaccctccagccagcagctagtaatgtgacaggtggtagccacaccggaaaaggaaaaacaaagcgttattgatagcccttaacgtagatgtctctttttcatgaaatgcccaacttgaaaacggcacatccagaaacacagctgctaaataggaactcgcagcttgagtgttatggcgctccagccccagcggcgttgcttatcgtggtggccacaccccgcacgtctgtgttgcccgtgtgagcctgtgctgtctcatggtgcgggtggaagccgcatgcgtgggagcttccatggggtcctgtctggcttagtcacgatgctgaggtcatagactaggttatttcctgccactctccaaggagggcctcttcatggatgttatctaaagtattaccaaagatccggaagggaagagtagattgagtgaatcatatgcgtttaactgtattgaaaacatactttccacctgtgacctgcactacccgatatatgtggttctggcctttcattgtgcatgtagactatgtgaaagggtttggaggaaaatttggtgtgcagacagacagacaagacaaatgtgcccttggctgggatcaccaggagaaattgcagctgcatgaatcccaaaaagattataagactggttttggaggcaaattcggtgttcagtcggagaggcaggactccgctgctgtggggtttgattacaaggagaagctggccaagcacgagtcccagcaagactactccaaaggattcggcgggaagtatggggtgcagaaggatcggatggataagaatgcgtcaacctttgaggatgtcacccaggtgtcctctgcctaccagaagacagtacctgtcgaagctgtgaccagcaaaacaagtaacatcagagctaactttgaaaacctcgctaaggagaaagagcaggaggacaggcggaaggcggaggcggagagagcccagcggatggccaaggagcggcaggagcaggaagaggccaggaggaagctggaggagcaagccagagccaaaacgcaaacgccccctgtgtcgcccgcacctcagccaaccgaggagaggctgccctcgagccccgtctatgaggatgcggcttccttcaaggcagagctgagctacagaggccctgtgagtgggacggagccggagcccgtgtacagcatggaggccgctgactaccgagaggccagcagccagcagggcctggcctatgccacagaggctgtctatgaaagcgcagaggccccgggccactatcccgcagaggacagcacctacgatgagtacgagaacgatctggggatcacagccgtcgccctgtacgactaccaggctgcgggcgatgatgagatctcatttgaccctgatgacatcatcaccaacatcgagatgattgacgacggctggtggcgcggggtgtgcaagggccggtacgggctcttcccagccaactatgtggagctgcggcagtagggcccccagcccccccccggagctgcgccctggatcctcacactacagatcaggccttctttggttcttgggtggttttgggttttttctgttttttttttttttttttttttttttttttgaaggtggggaggggaatatacacattgcttttatatttaatacttttgctgatgcttttgaaaatgtttatgccacagaatttgctaatatattgtaatcacattccttaggaggactttggtaattggttttatgcattgatggttttttttttcttttttgccaaattgactgtcacgcggcagcttcagggagctcgcattctcttgtgttcgtgttgccctcgtgcccatcaagtgcagtcgggacctcccaggacaagcacgaggcctcaggtcggccctgtggcgggtaggcaggaaggactgtcccagacgaggggcttcctctagagtctcactgctggggaggagaggactgggcctgatggaagttaacccggagctaagtcacccagagcacaggagctgccatgtcagatgggaaatctgcctatgtcataccgtgacagcccgcaggatcaggtgacttctagcagagaccctggtttttttcctgtgcccactccggcttgtcctcatctctacccatcccctgatgcccaggtcaccgggagggctgctgggagcctctcctgtccccgccgggcagtgtcactgagtccttgaaatcctcccctgccccgcgggtctctggattgggacgcacagtgcagttgaggtctgcgtcgggcttggcttttcacaaaggctgatgtcttaactgtcacccatatggtccctgggccaccgggcagcctggggcggtgtgtgtgccatgtcacagcatggcctctcggccttgggaaggaaggcagtgcctgctctgctgtgagccgccaggaaccctcctcctgtcaatgggggtgtagtatttttgccaaaatatcatgttcaatttcagtagtttgatcagttgaaggctagaagtgtgaagtgcagatgagtgtgtgttcttccccaaggtccccccacagctccaggacaccgctgtcctggcatttgtggccactcactttgtaggaaactcatctccttcctgaggagccgggaggctggaccagtcccgtcgtgcagtcaggtgggcggtgtgtctttccagaaggtcacgtggaaatgtctcgggacttgggtcccggagtgcccgtgaagcgtgtttttgctcctgaggtgcattttctcatcatccttgctttaccacaatgagcaatgaggtcgggttttatatgcaacttattgtatctgaattcctgtagcacacctcataggtatgatttttttaaattaaagaattcagaataaacattttttgatcca

SEQ ID NO: 62142 - DNA, 3045 bp, Homo sapiens
gcgcatcccgctactcattcggtttacaacgtctcgacttggacaaagtggataagagcgccgttggctttgagtatcaaggcaaaacggagaagcacgagtcccagaaaggtgtcttccgttttatcttaccctccagccagcagctagtaatgtgacaggtggtagccacaccggaaaaggaaaaacaaagcgttattgatagcccttaacgtagatgtctctttttcatgaaatgcccaacttgaaaacggcacatccagaaacacagctgctaaataggaactcgcagcttgagtgttatggcgctccagccccagcggcgttgcttatcgtggtggccacaccccgcacgtctgtgttgcccgtgtgagcctgtgctgtctcatggtgcgggtggaagccgcatgcgtgggagcttccatggggtcctgtctggcttagtcacgatgctgaggtcatagactaggttatttcctgccactctccaaggagggcctcttcatggatgttatctaaagtattaccaaagatccggaagggaagagtagattgagtgaatcatatgcgtttaactgtattgaaaacatactttccacctgtgacctgcactacccgatatatgtggttctggcctttcattgtgcatgtagactatgtgaaagggtttggaggaaaatttggtgtgcagacagacagacaagacaaatgtgcccttggctgggatcaccaggagaaattgcagctgcatgaatcccaaaaagattataagactggttttggaggcaaattcggtgttcagtcggagaggcaggactccgctgctgtggggtttgattacaaggagaagctggccaagcacgagtcccagcaagactactccaaaggattcggcgggaagtatggggtgcagaaggatcggatggataagaatgcgtcaacctttgaggatgtcacccaggtgtcctctgcctaccagaagacagtacctgtcgaagctgtgaccagcaaaacaagtaacatcagagctaactttgaaaacctcgctaaggagaaagagcaggaggacaggcggaaggcggaggcggagagagcccagcggatggccaaggagcggcaggagcaggaagaggccaggaggaagctggaggagcaagccagagccaaaacgcaaacgccccctgtgtcgcccgcacctcagccaaccgaggagaggctgccctcgagccccgtctatgaggatgcggcttccttcaaggcagagctgagctacagaggccctgtgagtgggacggagccggagcccgtgtacagcatggaggccgctgactaccgagaggccagcagccagcagggcctggcctatgccacagaggctgtctatgaaagcgcagaggccccgggccactatcccgcagaggacagcacctacgatgagtacgagaacgatctggggatcacagccgtcgccctgtacgactaccaggctgcgggcgatgatgagatctcatttgaccctgatgacatcatcaccaacatcgagatgattgacgacggctggtggcgcggggtgtgcaagggccggtacgggctcttcccagccaactatgtggagctgcggcagtagggcccccagcccccccccggagctgcgccctggatcctcacactacagatcaggccttctttggttcttgggtggttttgggttttttctgttttttttttttttttttttttttttttttgaaggtggggaggggaatatacacattgcttttatatttaatacttttgctgatgcttttgaaaatgtttatgccacagaatttgctaatatattgtaatcacattccttaggaggactttggtaattggttttatgcattgatggttttttttttcttttttgccaaattgactgtcacgcggcagcttcagggagctcgcattctcttgtgttcgtgttgccctcgtgcccatcaagtgcagtcgggacctcccaggacaagcacgaggcctcaggtcggccctgtggcgggtaggcaggaaggactgtcccagacgaggggcttcctctagagtctcactgctggggaggagaggactgggcctgatggaagttaacccggagctaagtcacccagagcacaggagctgccatgtcagatgggaaatctgcctatgtcataccgtgacagcccgcaggatcaggtgacttctagcagagaccctggtttttttcctgtgcccactccggcttgtcctcatctctacccatcccctgatgcccaggtcaccgggagggctgctgggagcctctcctgtccccgccgggcagtgtcactgagtccttgaaatcctcccctgccccgcgggtctctggattgggacgcacagtgcagttgaggtctgcgtcgggcttggcttttcacaaaggctgatgtcttaactgtcacccatatggtccctgggccaccgggcagcctggggcggtgtgtgtgccatgtcacagcatggcctctcggccttgggaaggaaggcagtgcctgctctgctgtgagccgccaggaaccctcctcctgtcaatgggggtgtagtatttttgccaaaatatcatgttcaatttcagtagtttgatcagttgaaggctagaagtgtgaagtgcagatgagtgtgtgttcttccccaaggtccccccacagctccaggacaccgctgtcctggcatttgtggccactcactttgtaggaaactcatctccttcctgaggagccgggaggctggaccagtcccgtcgtgcagtcaggtgggcggtgtgtctttccagaaggtcacgtggaaatgtctcgggacttgggtcccggagtgcccgtgaagcgtgtttttgctcctgaggtgcattttctcatcatccttgctttaccacaatgagcaatgaggtcgggttttatatgcaacttattgtatctgaattcctgtagcacacctcataggtatgatttttttaaattaaagaattcagaataaacattttttgatcca

SEQ ID NO: 62143 - DNA, 2200 bp, Homo sapiens
  misc_feature (9)..(9): n is a, c, g, or t
gcgtggtcnggcccggagtgttatggatagactactccaaaggattcggcgggaagtatggggtgcagaaggatcggatggataagaatgcgtcaacctttgaggatgtcacccaggtgtcctctgcctaccagaagacagtacctgtcgaagctgtgaccagcaaaacaagtaacatcagagctaactttgaaaacctcgctaaggagaaagagcaggaggacaggcggaaggcggaggcggagagagcccagcggatggccaaggagcggcaggagcaggaagaggccaggaggaagctggaggagcaagccagagccaaaacgcaaacgccccctgtgtcgcccgcacctcagccaaccgaggagaggctgccctcgagccccgtctatgaggatgcggcttccttcaaggcagagctgagctacagaggccctgtgagtgggacggagccggagcccgtgtacagcatggaggccgctgactaccgagaggccagcagccagcagggcctggcctatgccacagaggctgtctatgaaagcgcagaggccccgggccactatcccgcagaggacagcacctacgatgagtacgagaacgatctggggatcacagccgtcgccctgtacgactaccaggctgcgggcgatgatgagatctcatttgaccctgatgacatcatcaccaacatcgagatgattgacgacggctggtggcgcggggtgtgcaagggccggtacgggctcttcccagccaactatgtggagctgcggcagtagggcccccagcccccccccggagctgcgccctggatcctcacactacagatcaggccttctttggttcttgggtggttttgggttttttctgttttttttttttttttttttttttttttttgaaggtggggaggggaatatacacattgcttttatatttaatacttttgctgatgcttttgaaaatgtttatgccacagaatttgctaatatattgtaatcacattccttaggaggactttggtaattggttttatgcattgatggttttttttttcttttttgccaaattgactgtcacgcggcagcttcagggagctcgcattctcttgtgttcgtgttgccctcgtgcccatcaagtgcagtcgggacctcccaggacaagcacgaggcctcaggtcggccctgtggcgggtaggcaggaaggactgtcccagacgaggggcttcctctagagtctcactgctggggaggagaggactgggcctgatggaagttaacccggagctaagtcacccagagcacaggagctgccatgtcagatgggaaatctgcctatgtcataccgtgacagcccgcaggatcaggtgacttctagcagagaccctggtttttttcctgtgcccactccggcttgtcctcatctctacccatcccctgatgcccaggtcaccgggagggctgctgggagcctctcctgtccccgccgggcagtgtcactgagtccttgaaatcctcccctgccccgcgggtctctggattgggacgcacagtgcagttgaggtctgcgtcgggcttggcttttcacaaaggctgatgtcttaactgtcacccatatggtccctgggccaccgggcagcctggggcggtgtgtgtgccatgtcacagcatggcctctcggccttgggaaggaaggcagtgcctgctctgctgtgagccgccaggaaccctcctcctgtcaatgggggtgtagtatttttgccaaaatatcatgttcaatttcagtagtttgatcagttgaaggctagaagtgtgaagtgcagatgagtgtgtgttcttccccaaggtccccccacagctccaggacaccgctgtcctggcatttgtggccactcactttgtaggaaactcatctccttcctgaggagccgggaggctggaccagtcccgtcgtgcagtcaggtgggcggtgtgtctttccagaaggtcacgtggaaatgtctcgggacttgggtcccggagtgcccgtgaagcgtgtttttgctcctgaggtgcattttctcatcatccttgctttaccacaatgagcaatgaggtcgggttttatatgcaacttattgtatctgaattcctgtagcacacctcataggtatgatttttttaaattaaagaattcagaataaacattttttgatcca

SEQ ID NO: 62144 - DNA, 2314 bp, Homo sapiens
gaagctatgactacaggtcacgagactcggtgctgttaaagttgcgtgcacagagggcgtgagtagcgcacggagtacacgctagactgatgcgggctttgatacacaaggtagaagctggccaagcacgagtcccagcaagagactactccaaaggattcggcgggaagtatggggtgcagaaggatcggatggataagaatgcgtcaacctttgaggatgtcacccaggtgtcctctgcctaccagaagacagtacctgtcgaagctgtgaccagcaaaacaagtaacatcagagctaactttgaaaacctcgctaaggagaaagagcaggaggacaggcggaaggcggaggcggagagagcccagcggatggccaaggagcggcaggagcaggaagaggccaggaggaagctggaggagcaagccagagccaaaacgcaaacgccccctgtgtcgcccgcacctcagccaaccgaggagaggctgccctcgagccccgtctatgaggatgcggcttccttcaaggcagagctgagctacagaggccctgtgagtgggacggagccggagcccgtgtacagcatggaggccgctgactaccgagaggccagcagccagcagggcctggcctatgccacagaggctgtctatgaaagcgcagaggccccgggccactatcccgcagaggacagcacctacgatgagtacgagaacgatctggggatcacagccgtcgccctgtacgactaccaggctgcgggcgatgatgagatctcatttgaccctgatgacatcatcaccaacatcgagatgattgacgacggctggtggcgcggggtgtgcaagggccggtacgggctcttcccagccaactatgtggagctgcggcagtagggcccccagcccccccccggagctgcgccctggatcctcacactacagatcaggccttctttggttcttgggtggttttgggttttttctgttttttttttttttttttttttttttttttgaaggtggggaggggaatatacacattgcttttatatttaatacttttgctgatgcttttgaaaatgtttatgccacagaatttgctaatatattgtaatcacattccttaggaggactttggtaattggttttatgcattgatggttttttttttcttttttgccaaattgactgtcacgcggcagcttcagggagctcgcattctcttgtgttcgtgttgccctcgtgcccatcaagtgcagtcgggacctcccaggacaagcacgaggcctcaggtcggccctgtggcgggtaggcaggaaggactgtcccagacgaggggcttcctctagagtctcactgctggggaggagaggactgggcctgatggaagttaacccggagctaagtcacccagagcacaggagctgccatgtcagatgggaaatctgcctatgtcataccgtgacagcccgcaggatcaggtgacttctagcagagaccctggtttttttcctgtgcccactccggcttgtcctcatctctacccatcccctgatgcccaggtcaccgggagggctgctgggagcctctcctgtccccgccgggcagtgtcactgagtccttgaaatcctcccctgccccgcgggtctctggattgggacgcacagtgcagttgaggtctgcgtcgggcttggcttttcacaaaggctgatgtcttaactgtcacccatatggtccctgggccaccgggcagcctggggcggtgtgtgtgccatgtcacagcatggcctctcggccttgggaaggaaggcagtgcctgctctgctgtgagccgccaggaaccctcctcctgtcaatgggggtgtagtatttttgccaaaatatcatgttcaatttcagtagtttgatcagttgaaggctagaagtgtgaagtgcagatgagtgtgtgttcttccccaaggtccccccacagctccaggacaccgctgtcctggcatttgtggccactcactttgtaggaaactcatctccttcctgaggagccgggaggctggaccagtcccgtcgtgcagtcaggtgggcggtgtgtctttccagaaggtcacgtggaaatgtctcgggacttgggtcccggagtgcccgtgaagcgtgtttttgctcctgaggtgcattttctcatcatccttgctttaccacaatgagcaatgaggtcgggttttatatgcaacttattgtatctgaattcctgtagcacacctcataggtatgatttttttaaattaaagaattcagaataaacattttttgatcca

SEQ ID NO: 62145 - DNA, 2499 bp, Homo sapiens
ctgcagcgttagaaacacacagcagtgttcaggtgtgggcaggtagacacacctggggtggtcccgcagactgcatggagatggcagtggctctccgtggcatcactgctgcatgacagtgtgactttcatgtggatctgtgttgctgcaacggaagtctttggctggtagaatttccacatggattttttttttctcttaaaaagcaagagaacaaactgcgattgagcctctttttagcgctcagtagagcaggcgcacaggaagcagatgagaataagcccgtgctggtgcggaagactgtgctattgaagtggcgcgttgcaaagactactccaaaggattcggcgggaagtatggggtgcagaaggatcggatggataagaatgcgtcaacctttgaggatgtcacccaggtgtcctctgcctaccagaagacagtacctgtcgaagctgtgaccagcaaaacaagtaacatcagagctaactttgaaaacctcgctaaggagaaagagcaggaggacaggcggaaggcggaggcggagagagcccagcggatggccaaggagcggcaggagcaggaagaggccaggaggaagctggaggagcaagccagagccaaaacgcaaacgccccctgtgtcgcccgcacctcagccaaccgaggagaggctgccctcgagccccgtctatgaggatgcggcttccttcaaggcagagctgagctacagaggccctgtgagtgggacggagccggagcccgtgtacagcatggaggccgctgactaccgagaggccagcagccagcagggcctggcctatgccacagaggctgtctatgaaagcgcagaggccccgggccactatcccgcagaggacagcacctacgatgagtacgagaacgatctggggatcacagccgtcgccctgtacgactaccaggctgcgggcgatgatgagatctcatttgaccctgatgacatcatcaccaacatcgagatgattgacgacggctggtggcgcggggtgtgcaagggccggtacgggctcttcccagccaactatgtggagctgcggcagtagggcccccagcccccccccggagctgcgccctggatcctcacactacagatcaggccttctttggttcttgggtggttttgggttttttctgttttttttttttttttttttttttttttttgaaggtggggaggggaatatacacattgcttttatatttaatacttttgctgatgcttttgaaaatgtttatgccacagaatttgctaatatattgtaatcacattccttaggaggactttggtaattggttttatgcattgatggttttttttttcttttttgccaaattgactgtcacgcggcagcttcagggagctcgcattctcttgtgttcgtgttgccctcgtgcccatcaagtgcagtcgggacctcccaggacaagcacgaggcctcaggtcggccctgtggcgggtaggcaggaaggactgtcccagacgaggggcttcctctagagtctcactgctggggaggagaggactgggcctgatggaagttaacccggagctaagtcacccagagcacaggagctgccatgtcagatgggaaatctgcctatgtcataccgtgacagcccgcaggatcaggtgacttctagcagagaccctggtttttttcctgtgcccactccggcttgtcctcatctctacccatcccctgatgcccaggtcaccgggagggctgctgggagcctctcctgtccccgccgggcagtgtcactgagtccttgaaatcctcccctgccccgcgggtctctggattgggacgcacagtgcagttgaggtctgcgtcgggcttggcttttcacaaaggctgatgtcttaactgtcacccatatggtccctgggccaccgggcagcctggggcggtgtgtgtgccatgtcacagcatggcctctcggccttgggaaggaaggcagtgcctgctctgctgtgagccgccaggaaccctcctcctgtcaatgggggtgtagtatttttgccaaaatatcatgttcaatttcagtagtttgatcagttgaaggctagaagtgtgaagtgcagatgagtgtgtgttcttccccaaggtccccccacagctccaggacaccgctgtcctggcatttgtggccactcactttgtaggaaactcatctccttcctgaggagccgggaggctggaccagtcccgtcgtgcagtcaggtgggcggtgtgtctttccagaaggtcacgtggaaatgtctcgggacttgggtcccggagtgcccgtgaagcgtgtttttgctcctgaggtgcattttctcatcatccttgctttaccacaatgagcaatgaggtcgggttttatatgcaacttattgtatctgaattcctgtagcacacctcataggtatgatttttttaaattaaagaattcagaataaacattttttgatcca

SEQ ID NO: 62146 - DNA, 2520 bp, Homo sapiens
  misc_feature (131)..(131): n is a, c, g, or t
catggccgggctagcgcttagccagctgcgtggctggacccccgggactcttgcgggccaagacgcgggaagaggcggggcagggggcggggtctgcgcggggacccggatgcggcccgaccgcgacctcnggaaccggaagtagagcctggtgcctgggagcggctggcgcggcggaatccagggccgacccgggccggaccgaccccaggcggcgacggaatcagtccccaatgcctggaaattcctcattggattactgtgttttaaacagaatttcgtgaacagccttttatctccaagcggaaagaaagatgtggaaagcttcagcaggccacgctgtgtccatcgcccaggatgacgcgggggccgatgactgggagaccgaccctgattttgtgaatgatgtgagtgagaaggagcaaagatggggtgccaagacggtgcagggctccgggcaccaggagcatatcaacatacacaagctgagggagaatgtctttcaagagcatcagacccttaaggagaaggaacttgaaacaggaccaaaagcttcccatggctatggagggaaatttggtgtggaacaagaccgaatggataagtcagctgtcggccacgaatatcagtcgaaactttccaagcactgctcgcaggtggactcggtccgtggcttcggaggcaagtttggtgtccagatggacagagttgatcagtctgctgtaggctttgaataccaggggaagactgagaagcatgcctcccagaaagactactccagtggttttggcggcaagtatggcgtgcaggccgaccgagtagacaagagcgcggtgggcttcgactaccagggcaagacggagaagcacgagtcacagagagattactccaaaggtttcggcggcaaatacggtatcgacaaggacaaagtggataagagcgccgttggctttgagtatcaaggcaaaacggagaagcacgagtcccagaaagactatgtgaaagggtttggaggaaaatttggtgtgcagacagacagacaagacaaatgtgcccttggctgggatcaccaggagaaattgcagctgcatgaatcccaaaaagattataagactggttttggaggcaaattcggtgttcagtcggagaggcaggactccgctgctgtggggtttgattacaaggagaagctggccaagcacgagtcccagcaagactactccaaaggattcggcgggaagtatggggtgcagaaggatcggatggataagaatgcgtcaacctttgaggatgtcacccaggtgtcctctgcctaccagaagacagtacctgtcgaagctgtgaccagcaaaacaagtaacatcagagctaactttgaaaacctcgctaaggagaaagagcaggaggacaggcggaaggcggaggcggagagagcccagcggttgccctcgtgcccatcaagtgcagtcgggacctcccaggacaagcacgaggcctcaggtcggccctgtggcgggtaggcaggaaggactgtcccagacgaggggcttcctctagagtctcactgctggggaggagaggactgggcctgatggaagttaacccggagctaagtcacccagagcacaggagctgccatgtcagatgggaaatctgcctatgtcataccgtgacagcccgcaggatcaggtgacttctagcagagaccctggtttttttcctgtgcccactccggcttgtcctcatctctacccatcccctgatgcccaggtcaccgggagggctgctgggagcctctcctgtccccgccgggcagtgtcactgagtccttgaaatcctcccctgccccgcgggtctctggattgggacgcacagtgcagttgaggtctgcgtcgggcttggcttttcacaaaggctgatgtcttaactgtcacccatatggtccctgggccaccgggcagcctggggcggtgtgtgtgccatgtcacagcatggcctctcggccttgggaaggaaggcagtgcctgctctgctgtgagccgccaggaaccctcctcctgtcaatgggggtgtagtatttttgccaaaatatcatgttcaatttcagtagtttgatcagttgaaggctagaagtgtgaagtgcagatgagtgtgtgttcttccccaaggtccccccacagctccaggacaccgctgtcctggcatttgtggccactcactttgtaggaaactcatctccttcctgaggagccgggaggctggaccagtcccgtcgtgcagtcaggtgggcggtgtgtctttccagaaggtcacgtggaaatgtctcgggacttgggtcccggagtgcccgtgaagcgtgtttttgctcctgaggtgcattttctcatcatccttgctttaccacaatgagcaatgaggtcgggttttatatgcaacttattgtatctgaattcctgtagcacacctcataggtatgatttttttaaattaaagaattcagaataaacattttttgatcca

SEQ ID NO: 62147 - DNA, 1101 bp, Homo sapiens
aaaacgctccaggcacgatgtagaggatccccccatgacaaagctcattcgggacctcccaggacaagcacgaggcctcaggtcggccctgtggcgggtaggcaggaaggactgtcccagacgaggggcttcctctagagtctcactgctggggaggagaggactgggcctgatggaagttaacccggagctaagtcacccagagcacaggagctgccatgtcagatgggaaatctgcctatgtcataccgtgacagcccgcaggatcaggtgacttctagcagagaccctggtttttttcctgtgcccactccggcttgtcctcatctctacccatcccctgatgcccaggtcaccgggagggctgctgggagcctctcctgtccccgccgggcagtgtcactgagtccttgaaatcctcccctgccccgcgggtctctggattgggacgcacagtgcagttgaggtctgcgtcgggcttggcttttcacaaaggctgatgtcttaactgtcacccatatggtccctgggccaccgggcagcctggggcggtgtgtgtgccatgtcacagcatggcctctcggccttgggaaggaaggcagtgcctgctctgctgtgagccgccaggaaccctcctcctgtcaatgggggtgtagtatttttgccaaaatatcatgttcaatttcagtagtttgatcagttgaaggctagaagtgtgaagtgcagatgagtgtgtgttcttccccaaggtccccccacagctccaggacaccgctgtcctggcatttgtggccactcactttgtaggaaactcatctccttcctgaggagccgggaggctggaccagtcccgtcgtgcagtcaggtgggcggtgtgtctttccagaaggtcacgtggaaatgtctcgggacttgggtcccggagtgcccgtgaagcgtgtttttgctcctgaggtgcattttctcatcatccttgctttaccacaatgagcaatgaggtcgggttttatatgcaacttattgtatctgaattcctgtagcacacctcataggtatgatttttttaaattaaagaattcagaataaacattttttgatcca

SEQ ID NO: 62148 - DNA, 1044 bp, Homo sapiens
tagacggtccggaatttttgtcaggtcggccctgtggcgggtaggcaggaaggactgtcccagacgaggggcttcctctagagtctcactgctggggaggagaggactgggcctgatggaagttaacccggagctaagtcacccagagcacaggagctgccatgtcagatgggaaatctgcctatgtcataccgtgacagcccgcaggatcaggtgacttctagcagagaccctggtttttttcctgtgcccactccggcttgtcctcatctctacccatcccctgatgcccaggtcaccgggagggctgctgggagcctctcctgtccccgccgggcagtgtcactgagtccttgaaatcctcccctgccccgcgggtctctggattgggacgcacagtgcagttgaggtctgcgtcgggcttggcttttcacaaaggctgatgtcttaactgtcacccatatggtccctgggccaccgggcagcctggggcggtgtgtgtgccatgtcacagcatggcctctcggccttgggaaggaaggcagtgcctgctctgctgtgagccgccaggaaccctcctcctgtcaatgggggtgtagtatttttgccaaaatatcatgttcaatttcagtagtttgatcagttgaaggctagaagtgtgaagtgcagatgagtgtgtgttcttccccaaggtccccccacagctccaggacaccgctgtcctggcatttgtggccactcactttgtaggaaactcatctccttcctgaggagccgggaggctggaccagtcccgtcgtgcagtcaggtgggcggtgtgtctttccagaaggtcacgtggaaatgtctcgggacttgggtcccggagtgcccgtgaagcgtgtttttgctcctgaggtgcattttctcatcatccttgctttaccacaatgagcaatgaggtcgggttttatatgcaacttattgtatctgaattcctgtagcacacctcataggtatgatttttttaaattaaagaattcagaataaacattttttgatcca

SEQ ID NO: 62149 - DNA, 2826 bp, Homo sapiens
  misc_feature (131)..(131): n is a, c, g, or t
catggccgggctagcgcttagccagctgcgtggctggacccccgggactcttgcgggccaagacgcgggaagaggcggggcagggggcggggtctgcgcggggacccggatgcggcccgaccgcgacctcnggaaccggaagtagagcctggtgcctgggagcggctggcgcggcggaatccagggccgacccgggccggaccgaccccaggcggcgacggaatcagtccccaatgcctggaaattcctcattggattactgtgttttaaacagaatttcgtgaacagccttttatctccaagcggaaagaaagatgtggaaagcttcagcaggccacgctgtgtccatcgcccaggatgacgcgggggccgatgactgggagaccgaccctgattttgtgaatgatgtgagtgagaaggagcaaagatggggtgccaagacggtgcagggctccgggcaccaggagcatatcaacatacacaagctgagggagaatgtctttcaagagcatcagacccttaaggagaaggaacttgaaacaggaccaaaagcttcccatggctatggagggaaatttggtgtggaacaagaccgaatggataagtcagctgtcggccacgaatatcagtcgaaactttccaagcactgctcgcaggtggactcggtccgtggcttcggaggcaagtttggtgtccagatggacagagttgatcagtctgctgtaggctttgaataccaggggaagactgagaagcatgcctcccagaaagactactccagtggttttggcggcaagtatggcgtgcaggccgaccgagtagacaagagcgcggtgggcttcgactaccagggcaagacggagaagcacgagtcacagagagattactccaaaggtttcggcggcaaatacggtatcgacaaggacaaagtggataagagcgccgttggctttgagtatcaaggcaaaacggagaagcacgagtcccagaaagactatgtgaaagggtttggaggaaaatttggtgtgcagacagacagacaagacaaatgtgcccttggctgggatcaccaggagaaattgcagctgcatgaatcccaaaaagattataagactggttttggaggcaaattcggtgttcagtcggagaggcaggactccgctgctgtggggtttgattacaaggagaagctggccaagcacgagtcccagcaagactactccaaaggattcggcgggaagtatggggtgcagaaggatcggatggataagaatgcgtcaacctttgaggatgtcacccaggtgtcctctgcctaccagaagacagtacctgtcgaagctgtgaccagcaaaacaagtaacatcagagctaactttgaaaacctcgctaaggagaaagagcaggaggacaggcggaaggcggaggcggagagagcccagcggatggccaaggagcggcaggagcaggaagaggccaggaggaagctggaggagcaagccagagccaaaacgcaaacgccccctgtgtcgcccgcacctcagccaaccgaggagaggctgccctcgagccccgtctatgaggatgcggcttccttcaaggcagagctgagctacagaggccctgtgagtgggacggagccggagcccgtgtacagcatggaggccgctgactaccgagaggccagcagccagcagggcctggcctatgccacagaggctgtctatgaaagcgcagaggccccgggccactatcccgcagaggacagcacctacgatgagtacgagaacgatctggggatcacagccgtcgccctgtacgactaccaggctgcgggcgatgatgagatctcatttgaccctgatgacatcatcaccaacatcgagatgattgacgacggctggtggcgcggggtgtgcaagggccggtacgggctcttcccagccaactatgtggagctgcggcagtagggcccccagcccccccccggagctgcgccctggatcctcacactacagatcaggccttctttggttcttgggtggttttgggttttttctgttttttttttttttttttttttttttttttgaaggtggggaggggaatatacacattgcttttatatttaatacttttgctgatgcttttgaaaatgtttatgccacagaatttgctaatatattgtaatcacattccttaggaggactttggtaattggttttatgcattgatggttttttttttcttttttgccaaattgactgtcacgcggcagcttcagggagctcgcattctcttgtgttcgtgttgccctcgtgcccatcaagtgcagtcgggacctcccaggacaagcacgaggcctcaggtcggccctgtggcgggtaggcaggaaggactgtcccagacgaggggcttcctctagagtctcactgctggggaggagaggactgggcctgatggaagttaacccggagctaagtcacccagagcacaggagctgccatgtcagatgggaaatctgcctatgtcataccgtgacagcccgcaggatcaggtgacttctagcagagaccctggtttttttcctgtgcccactccggcttgtcctcatctctacccatcccctgatgcccaggtcaccgggagggctgctgggagcctctcctgtccccgccgggcagtgtcactgagtccttgaaatcctcccctgccccgcgggtctctggattgggacgcacaccgccccaggctgcccgtggcccagggaccatatgggtgacagttaagacatcgcctttgtgaaaagccaagcccgacgcagcctcg

SEQ ID NO: 62150 - DNA, 914 bp, Homo sapiens
aagtcagacaggctggtggtaatcggacgaggtgtcagatgggaaatctgcctatgtcataccgtgacagcccgcaggatcaggtgacttctagcagagaccctggtttttttcctgtgcccactccggcttgtcctcatctctacccatcccctgatgcccaggtcaccgggagggctgctgggagcctctcctgtccccgccgggcagtgtcactgagtccttgaaatcctcccctgccccgcgggtctctggattgggacgcacagtgcagttgaggtctgcgtcgggcttggcttttcacaaaggctgatgtcttaactgtcacccatatggtccctgggccaccgggcagcctggggcggtgtgtgtgccatgtcacagcatggcctctcggccttgggaaggaaggcagtgcctgctctgctgtgagccgccaggaaccctcctcctgtcaatgggggtgtagtatttttgccaaaatatcatgttcaatttcagtagtttgatcagttgaaggctagaagtgtgaagtgcagatgagtgtgtgttcttccccaaggtccccccacagctccaggacaccgctgtcctggcatttgtggccactcactttgtaggaaactcatctccttcctgaggagccgggaggctggaccagtcccgtcgtgcagtcaggtgggcggtgtgtctttccagaaggtcacgtggaaatgtctcgggacttgggtcccggagtgcccgtgaagcgtgtttttgctcctgaggtgcattttctcatcatccttgctttaccacaatgagcaatgaggtcgggttttatatgcaacttattgtatctgaattcctgtagcacacctcataggtatgatttttttaaattaaagaattcagaataaacattttttgatcca

SEQ ID NO: 62151 - DNA, 928 bp, Homo sapiens
aaaattactataccgaccaggttaagcctgtcgattaaggtgaatctgtcagatgggaaatctgcctatgtcataccgtgacagcccgcaggatcaggtgacttctagcagagaccctggtttttttcctgtgcccactccggcttgtcctcatctctacccatcccctgatgcccaggtcaccgggagggctgctgggagcctctcctgtccccgccgggcagtgtcactgagtccttgaaatcctcccctgccccgcgggtctctggattgggacgcacagtgcagttgaggtctgcgtcgggcttggcttttcacaaaggctgatgtcttaactgtcacccatatggtccctgggccaccgggcagcctggggcggtgtgtgtgccatgtcacagcatggcctctcggccttgggaaggaaggcagtgcctgctctgctgtgagccgccaggaaccctcctcctgtcaatgggggtgtagtatttttgccaaaatatcatgttcaatttcagtagtttgatcagttgaaggctagaagtgtgaagtgcagatgagtgtgtgttcttccccaaggtccccccacagctccaggacaccgctgtcctggcatttgtggccactcactttgtaggaaactcatctccttcctgaggagccgggaggctggaccagtcccgtcgtgcagtcaggtgggcggtgtgtctttccagaaggtcacgtggaaatgtctcgggacttgggtcccggagtgcccgtgaagcgtgtttttgctcctgaggtgcattttctcatcatccttgctttaccacaatgagcaatgaggtcgggttttatatgcaacttattgtatctgaattcctgtagcacacctcataggtatgatttttttaaattaaagaattcagaataaacattttttgatcca

SEQ ID NO: 62152 - DNA, 2304 bp, Homo sapiens
  misc_feature (131)..(131): n is a, c, g, or t
catggccgggctagcgcttagccagctgcgtggctggacccccgggactcttgcgggccaagacgcgggaagaggcggggcagggggcggggtctgcgcggggacccggatgcggcccgaccgcgacctcnggaaccggaagtagagcctggtgcctgggagcggctggcgcggcggaatccagggccgacccgggccggaccgaccccaggcggcgacggaatcagtccccaatgcctggaaattcctcattggattactgtgttttaaacagaatttcgtgaacagccttttatctccaagcggaaagaaagatgtggaaagcttcagcaggccacgctgtgtccatcgcccaggatgacgcgggggccgatgactgggagaccgaccctgattttgtgaatgatgtgagtgagaaggagcaaagatggggtgccaagacggtgcagggctccgggcaccaggagcatatcaacatacacaagctgagggagaatgtctttcaagagcatcagacccttaaggagaaggaacttgaaacaggaccaaaagcttcccatggctatggagggaaatttggtgtggaacaagaccgaatggataagtcagctgtcggccacgaatatcagtcgaaactttccaagcactgctcgcaggtggactcggtccgtggcttcggaggcaagtttggtgtccagatggacagagttgatcagtctgctgtaggctttgaataccaggggaagactgagaagcatgcctcccagaaagactactccagtggttttggcggcaagtatggcgtgcaggccgaccgagtagacaagagcgcggtgggcttcgactaccagggcaagacggagaagcacgagtcacagagagattactccaaaggtttcggcggcaaatacggtatcgacaaggacaaagtggataagagcgccgttggctttgagtatcaaggcaaaacggagaagcacgagtcccagaaagactatgtgaaagggtttggaggaaaatttggtgtgcagacagacagacaagacaaatgtgcccttggctgggatcaccaggagaaattgcagctgcatgaatcccaaaaagattataagactggttttggaggcaaattcggtgttcagtcggagaggcaggactccgctgctgtggggtttgattacaaggagaagctggccaagcacgagtcccagcaagactactccaaaggattcggcgggaagtatggggtgcagaaggatcggatggataagaatgcgtcaacctttgaggatgtcacccaggtgtcctctgcctaccagaagacagtacctgtcgaagctgtgaccagcaaaacaagtaacatcagagctaactttgaaaacctcgctaaggagaaagagcaggaggacaggcggaaggcggaggcggagagagcccagcggatggccaaggagcggcaggagcaggaagaggccaggaggaagctggaggagcaagccagagccaaaacgcaaacgccccctgtgtcgcccgcacctcagccaaccgaggagaggctgccctcgagccccgtctatgaggatgcggcttccttcaaggcagagctgagctacagaggccctgtgagtgggacggagccggagcccgtgtacagcatggaggccgctgactaccgagaggccagcagccagcagggcctggcctatgccacagaggctgtctatgaaagcgcagaggccccgggccactatcccgcagaggacagcacctacgatgagtacgagaacgatctggggatcacagccgtcgccctgtacgactaccaggctgcgggcgatgatgagatctcatttgaccctgatgacatcatcaccaacatcgagatgattgacgacggctggtggcgcggggtgtgcaagggccgcttcagggagctcgcattctcttgtgttcgtgttgccctcgtgcccatcaagtgcagtcgggacctcccaggacaagcacgaggccgaaactcatctccttcctgaggagccgggaggctggaccagtcccgtcgtgcagtcaggtgggcggtgtgtctttccagaaggtcacgtggaaatgtctcgggacttgggtcccggagtgcccgtgaagcgtgtttttgctcctgaggtgcattttctcatcatccttgctttaccacaatgagcaatgaggtcgggttttatatgcaacttattgtatctgaattcctgtagcacacctcataggtatgatttttttaaattaaagaattcagaataaacattttttgatcca

SEQ ID NO: 62153 - DNA, 1933 bp, Homo sapiens
  misc_feature (131)..(131): n is a, c, g, or t
catggccgggctagcgcttagccagctgcgtggctggacccccgggactcttgcgggccaagacgcgggaagaggcggggcagggggcggggtctgcgcggggacccggatgcggcccgaccgcgacctcnggaaccggaagtagagcctggtgcctgggagcggctggcgcggcggaatccagggccgacccgggccggaccgaccccaggcggcgacggaatcagtccccaatgcctggaaattcctcattggattactgtgttttaaacagaatttcgtgaacagccttttatctccaagcggaaagaaagatgtggaaagcttcagcaggccacgctgtgtccatcgcccaggatgacgcgggggccgatgactgggagaccgaccctgattttgtgaatgatgtgagtgagaaggagcaaagatggggtgccaagacggtgcagggctccgggcaccaggagcatatcaacatacacaagctgagggagaatgtctttcaagagcatcagacccttaaggagaaggaacttgaaacaggaccaaaagcttcccatggctatggagggaaatttggtgtggaacaagaccgaatggataagtcagctgtcggccacgaatatcagtcgaaactttccaagcactgctcgcaggtggactcggtccgtggcttcggaggcaagtttggtgtccagatggacagagttgatcagtctgctgtaggctttgaataccaggggaagactgagaagcatgcctcccagaaagactactccagtggttttggcggcaagtatggcgtgcaggccgaccgagtagacaagagcgcggtgggcttcgactaccagggcaagacggagaagcacgagtcacagagagattactccaaaggtttcggcggcaaatacggtatcgacaaggacaaagtggataagagcgccgttggctttgagtatcaaggcaaaacggagaagcacgagtcccagaaagactatgtgaaagggtttggaggaaaatttggtgtgcagacagacagacaagacaaatgtgcccttggctgggatcaccaggagaaattgcagctgcatgaatcccaaaaagattataagactggttttggaggcaaattcggtgttcagtcggagaggcaggactccgctgctgtggggtttgattacaaggagaagctggccaagcacgagtcccagcaagactactccaaaggattcggcgggaagtatggggtgcagaaggatcggatggataagaatgcgtcaacctttgaggatgtcacccaggtgtcctctgcctaccagaagacagtacctgtcgaagctgtgaccagcaaaacaagtaacatcagagctaactttgaaaacctcgctaaggagaaagagcaggaggacaggcggaaggcggaggcggagagagcccagcggatggccaaggagcggcaggagcaggaagaggccaggaggaagctggaggagcaagccagagccaaaacgcaaacgccccctgtgtcgcccgcacctcagccaaccgaggagaggctgccctcgagccccgtctatgaggatgcggcttccttcaaggcagagctgagctacagaggccctgtgagtgggacggagccggagcccgtgtacagcatggaggccgctgactaccgagaggccagcagccagcagggcctggcctatgccacagaggctgtctatgaaagcgcagaggccccgggccactatcccgcagaggacagcacctacgatgagtacgagaacgatctggggatcacagccgtcgccctgtacgactaccaggctgcgggcgatgatgagatctcatttgaccctgatgacatcatcaccaacatcgagatgatacacgagctggtagcatgaaattggaacctctaggtagctcacat

SEQ ID NO: 62154 - DNA, 1812 bp, Homo sapiens
  misc_feature (131)..(131): n is a, c, g, or t
catggccgggctagcgcttagccagctgcgtggctggacccccgggactcttgcgggccaagacgcgggaagaggcggggcagggggcggggtctgcgcggggacccggatgcggcccgaccgcgacctcnggaaccggaagtagagcctggtgcctgggagcggctggcgcggcggaatccagggccgacccgggccggaccgaccccaggcggcgacggaatcagtccccaatgcctggaaattcctcattggattactgtgttttaaacagaatttcgtgaacagccttttatctccaagcggaaagaaagatgtggaaagcttcagcaggccacgctgtgtccatcgcccaggatgacgcgggggccgatgactgggagaccgaccctgattttgtgaatgatgtgagtgagaaggagcaaagatggggtgccaagacggtgcagggctccgggcaccaggagcatatcaacatacacaagctgagggagaatgtctttcaagagcatcagacccttaaggagaaggaacttgaaacaggaccaaaagcttcccatggctatggagggaaatttggtgtggaacaagaccgaatggataagtcagctgtcggccacgaatatcagtcgaaactttccaagcactgctcgcaggtggactcggtccgtggcttcggaggcaagtttggtgtccagatggacagagttgatcagtctgctgtaggctttgaataccaggggaagactgagaagcatgcctcccagaaagactactccagtggttttggcggcaagtatggcgtgcaggccgaccgagtagacaagagcgcggtgggcttcgactaccagggcaagacggagaagcacgagtcacagagagattactccaaaggtttcggcggcaaatacggtatcgacaaggacaaagtggataagagcgccgttggctttgagtatcaaggcaaaacggagaagcacgagtcccagaaagactatgtgaaagggtttggaggaaaatttggtgtgcagacagacagacaagacaaatgtgcccttggctgggatcaccaggagaaattgcagctgcatgaatcccaaaaagattataagactggttttggaggcaaattcggtgttcagtcggagaggcaggactccgctgctgtggggtttgattacaaggagaagctggccaagcacgagtcccagcaaggcacagttgccaccagcctcctaccctccccccgaccctcctgtgcggccacttctagcacagacttcagggctcaccgtcagcacctgcaacacagtcctcctgtgtcaccacttgtcagctgtcaggctgttcggcactttaaacccatttctagtagagcgacactgattttgagtggttcactttcttccctgtgaacttgtgatctgtgtatggcaggatgcgccagttagtgtgtgggtgccatctttctaacccggtgacccatccagtctctggactggggcatctccggtctccagcagcattctgcccgaggctgttctgctgttattggtgactgccgtgagccactgagtcaggccttccagatgaggagagaggtgttggttcaaccaaaccactggccatttgaccaggggcttcgtagcagcaagggccaggagacaggcgtgttctgtgtggtttctgtgtttcatttgtggtggtgtttttggccggggttgggaggttttttgtttgttctgtttgatgacaccatatgtgtgtaacatctccacacagagccacacagtatgtacgtgaagccagctc

SEQ ID NO: 62155 - DNA, 1354 bp, Homo sapiens
  misc_feature (131)..(131): n is a, c, g, or t
catggccgggctagcgcttagccagctgcgtggctggacccccgggactcttgcgggccaagacgcgggaagaggcggggcagggggcggggtctgcgcggggacccggatgcggcccgaccgcgacctcnggaaccggaagtagagcctggtgcctgggagcggctggcgcggcggaatccagggccgacccgggccggaccgaccccaggcggcgacggaatcagtccccaatgcctggaaattcctcattggattactgtgttttaaacagaatttcgtgaacagccttttatctccaagcggaaagaaagatgtggaaagcttcagcaggccacgctgtgtccatcgcccaggatgacgcgggggccgatgactgggagaccgaccctgattttgtgaatgatgtgagtgagaaggagcaaagatggggtgccaagacggtgcagggctccgggcaccaggagcatatcaacatacacaagctgagggagaatgtctttcaagagcatcagacccttaaggagaaggaacttgaaacaggaccaaaagcttcccatggctatggagggaaatttggtgtggaacaagaccgaatggataagtcagctgtcggccacgaatatcagtcgaaactttccaagcactgctcgcaggtggactcggtccgtggcttcggaggcaagtttggtgtccagatggacagagttgatcagtctgctgtaggctttgaataccaggggaagactgagaagcatgcctcccagaaagactactccagtggttttggcggcaagtatggcgtgcaggccgaccgagtagacaagagcgcggtgggcttcgactaccagggcaagacggagaagcacgagtcacagagagattactccaaaggtttcggcggcaaatacggtatcgacaaggacaaagtggataagagcgccgttggctttgagtatcaaggcaaaacggagaagcacgagtcccagaaagactatgtgaaagggtttggaggaaaatttggtgtgcagacagacagacaagacaaatgtgcccttggctgggatcaccaggagaaattgcagctgcatgaatcccaaaaaggtacattcactctgcctgtatgcgagatggttttagaagtttgtttttgttccttgcggggtcagttggtatgtgttgtgtctgcgtgtgcctgctgcacattgttttgtcttcactgtttgaagttgtcctgtgtgcccccccaatcccccagttccctccagctagtgtagtcacaaaccctcctgctgacacggggtggtaccccagagagctgggtttacctggaagtgggttgcacggccaagcc

SEQ ID NO: 62156 - DNA, 3185 bp, Homo sapiens
  misc_feature (131)..(131): n is a, c, g, or t
  misc_feature (2504)..(2504): n is a, c, g, or t
catggccgggctagcgcttagccagctgcgtggctggacccccgggactcttgcgggccaagacgcgggaagaggcggggcagggggcggggtctgcgcggggacccggatgcggcccgaccgcgacctcnggaaccggaagtagagcctggtgcctgggagcggctggcgcggcggaatccagggccgacccgggccggaccgaccccaggcggcgacggaatcagtccccaatgcctggaaattcctcattggattactgtgttttaaacagaatttcgtgaacagccttttatctccaagcggaaagaaagatgtggaaagcttcagcaggccacgctgtgtccatcgcccaggatgacgcgggggccgatgactgggagaccgaccctgattttgtgaatgatgtgagtgagaaggagcaaagatggggtgccaagacggtgcagggctccgggcaccaggagcatatcaacatacacaagctgagggagaatgtctttcaagagcatcagacccttaaggagaaggaacttgaaacaggaccaaaagcttcccatggctatggagggaaatttggtgtggaacaagaccgaatggataagtcagctgtcggccacgaatatcagtcgaaactttccaagcactgctcgcaggtggactcggtccgtggcttcggaggcaagtttggtgtccagatggacagagttgatcagtctgctgtaggctttgaataccaggggaagactgagaagcatgcctcccagaaaggtaagacgcgaaaggtgcagaaagagcccgctccgggggccccgatggggagagtcacagccacctgaagccgtttccccgcgctccgggggccctgatggggagagtcacagccacctgaagccgtttcctgagcggtggctgttgccacaaggaggactctgccctcctcttcatgtttctggatcatctggataccacatgatggatgtattccccgttacacatccccctcggagccctggcatctgctgtcattgtggggcttctcccccttgtagcggaagccgccttcccttcatctgggcagcgctcctcctggaaaagagagctcacagattgatcggcagaaagctaacttccccccaaggctagaaaccagagttgttaaattcttgttttccttatacacatacggtcttaactgctggtgattaatcttgattacatcatgcagtctcttttttgaaagaccaaagcatatcgccaccttaaagttctcagtttattttttgcaagcttatttagttcttcctcctttgtgtcattgcatcatccgcggaacaagctctcagtccttacgcagtctcggtgcagtctaggtggaggtagctgtggtgtgggcaggcggaggatcagggtcttgtctcccatgttcagctgcatggctttcttcatatgaggctttctctttccatttttttcattttgttttgtttgtttgtttgttttgagacagagtctcgctctgttgcccaggctggagtgcagtggcacgatctcggctcactgcaacctgcgcctcctgggttcaaacgattctcctgcctcagcctcccaagtagctgggattacaggtgtgtgccactacccctggctagtttttctattttttagtaaagatggggttttgccacgttggccaggctggtctcaaactcctggcctcaagtgatccgcccacctcagcctccaaagtgctggttctttgtatgaagctttccagcttttacctgagcagttgattttcaaagtgggcatgcagcgtcatttctgactacacaaaggaactgccctgtaacagctgacagggcccagaacccccccatgcacctgttgtgaaacagggtccagcgtcacctgtatggagcagtgggtggcttgttgtacattttaaaatgtgcgcttgatgtgtttgtgagttgtaacccctacacacttttgcttagtttaacaaaaggaacagtgtagttcgtcctcaggcccccgtgctaattgctgccctgtctctccagactactccagtggttttggcggcaagtatggcgtgcaggccgaccgagtagacaagagcgcggtgggcttcgactaccagggcaagacggagaagcacgagtcacagagaggtggggcggaccccacggtctgtaatcacgcgtttgctccagaaacacccacgagggcattttctctctgcacacgtgattgttgtagattttttaactgaaaatgtttggtgttcttttcgtaccagtgtatgtgggcttttcctaattcgaatggctgcacagttccccatcgtatgaggattccatagtccatgtaaccattccttttttgaatgtggaatttaggttatttatttatttatttatttatttttggtagagatgaggtcttgccgtgttgcccggactggtcttgatctccgtggtctcaagcaatcctccccnaccttggtttccttaagtgctgggattacaggtgtgacctgtaaatttttttttttttttcttttagacggagtctcgctccgttgcccaggctggagtgtagtggcgtgatctctgctcactgcaacctccacctccctggttcaagcaattctcgtgcttcagcctcccggctagccgggattacaagcacacgccaccacgcccagctaatttttgtatttttagtagagacggagttctgccatgttgcccaggctggtcttgaattcctgacctcaggtgatcgccctgccttggcctcccaaagtgctgggattacaggtgtgagccactgcgcccagctgaaacttgactgcagggaacattcttgtacctgtgttttgttcacaagtgattattcaaaagaatcaactcctagacatggaattgctgggtcgaaggctattgaatgtaaaatttccatagatactgccaagttgtccttggaggctgtgctgagttcttccttccccactgcatagcctgtacaccatcactcagagcgtttcccagggctgcagaggctgtggcctgcctgtttccctgtgcctcttgtttggcctgcacatttaaatttttaaaaatatttgccaacatttgaaaagtgagagcttgactatttaaaaactcaaaaaaaaa

SEQ ID NO: 62157 - DNA, 1955 bp, Homo sapiens
  misc_feature (131)..(131): n is a, c, g, or t
catggccgggctagcgcttagccagctgcgtggctggacccccgggactcttgcgggccaagacgcgggaagaggcggggcagggggcggggtctgcgcggggacccggatgcggcccgaccgcgacctcnggaaccggaagtagagcctggtgcctgggagcggctggcgcggcggaatccagggccgacccgggccggaccgaccccaggcggcgacggaatcagtccccaatgcctggaaattcctcattggattactgtgttttaaacagaatttcgtgaacagccttttatctccaagcggaaagaaagatgtggaaagcttcagcaggccacgctgtgtccatcgcccaggatgacgcgggggccgatgactgggagaccgaccctgattttgtgaatgatgtgagtgagaaggagcaaagatggggtgccaagacggtgcagggctccgggcaccaggagcatatcaacatacacaagctgagggagaatgtctttcaagagcatcagacccttaaggagaaggaacttgaaacaggaccaaaagcttcccatggctatggagggaaatttggtgtggaacaagaccgaatggataagtcagctgtcggccacgaatatcagtcgaaactttccaagcactgctcgcaggtggactcggtccgtggcttcggaggcaagtttggtgtccagatggacagagttgatcagtctgctgtaggctttgaataccaggggaagactgagaagcatgcctcccagaaagactactccagtggttttggcggcaagtatggcgtgcaggccgaccgagtagacaagagcgcggtgggcttcgactaccagggcaagacggagaagcacgagtcacagagagattactccaaaggtttcggcggcaaatacggtatcgacaaggacaaagtggataagagcgccgttggctttgagtatcaaggcaaaacggagaagcacgagtcccagaaaggtgtcttccgttttatcttaccctccagccagcagctagtaatgtgacaggtggtagccacaccggaaaaggaaaaacaaagcgttattgatagcccttaacgtagatgtctctttttcatgaaatgcccaacttgaaaacggcacatccagaaacacagctgctaaataggaactcgcagcttgagtgttatggcgctccagccccagcggcgttgcttatcgtggtggccacaccccgcacgtctgtgttgcccgtgtgagcctgtgctgtctcatggtgcgggtggaagccgcatgcgtgggagcttccatggggtcctgtctggcttagtcacgatgctgaggtcatagactaggttatttcctgccactctccaaggagggcctcttcatggatgttatctaaagtattaccaaagatccggaagggaagagtagattgagtgaatcatatgcgtttaactgtattgaaaacatactttccacctgtgacctgcactacccgatatatgtggttctggcctttcattgtgcatgtagactatgtgaaagggtttggaggaaaatttggtgtgcagacagacagacaagacaaatgtgcccttggctgggatcaccaggagaaattgcagctgcatgaatcccaaaaagactactccaaaggattcggcgggaagtatggggtgcagaaggatcggatggataagaatgcgtcaacctttgaggatgtcacccaggtgtcctctgcctaccagaagacagtacctgtcgaagctgtgaccagcaaaacaagtaacatcagagctaactttgaaaacctcgctaaggagaaagagcaggaggacaggcggaaggcggaggcggagagagcccagcggatggccaaggagcggcaggagcaggaagaggccaggaggaagctggaggagcagccagaccacaatatcggggatcctctga

SEQ ID NO: 62158 - DNA, 737 bp, Homo sapiens
  misc_feature (38)..(38): n is a, c, g, or t
aaatgatgtcatgagctgcgccctcgggtttgatttcnggaaccggaagtagagcctggtgcctgggagcggctggcgcggcggaatccagggccgacccgggccggaccgaccccaggcggcgacggaatcagtccccaatgcctggaaattcctcattggattactgtgttttaaacagaatttcgtgaacagccttttatctccaagcggaaagaaagatgtggaaagcttcagcaggccacgctgtgtccatcgcccaggatgacgcgggggccgatgactgggagaccgaccctgattttgtgaatgatgtgagtgagaaggagcaaagatggggtgccaagacggtgcagggctccgggcaccaggagcatatcaagtaagaggcgtcgccaccaccctcccgagggcccctctgcggatggagccccaggtgcaacagggcccatggtcatctgtggagggacagcccgtgtggaaactgcatttatcttcttgacctgatacccatgcagtaaatgaatataagacacacacatatatgtgtatttgtgtaatgtgtgtgtttatatgtgtatatttagatacttctgtgctcagtaatttttaaattcccattgcaaacaatttccgtatttataattttagagtgtccgcttctcagtattgtggcttttatcagggaacatttgtccctaagctctaccttacaagcgagaggtttctaaagtatg

SEQ ID NO: 62159 - DNA, 316 bp, Homo sapiens
gtgttttgccacgtttcagactactccaaaggattcggcgggaagtatggggtgcagaaggatcggatggataagaatgcgtcaacctttgaggatgtcacccaggtgtcctctgcctaccagaagacagtacctgtcgaagctgtgaccagcaaaacaagtaacatcagagctaactttgaaaacctcgctaaggagaaagagcaggaggacaggcggaaggcggaggcggagagagcccagcggatggccaaggagcggcaggagcaggaagaggccaggaggaagctggaggtgagtggcaaggagtgggccg

SEQ ID NO: 62160 - DNA, 4295 bp, Homo sapiens
  misc_feature (38)..(38): n is a, c, g, or t
  misc_feature (3867)..(3867): n is a, c, g, or t
aaatgatgtcatgagctgcgccctcgggtttgatttcnggaaccggaagtagagcctggtgcctgggagcggctggcgcggcggaatccagggccgacccgggccggaccgaccccaggcggcgacggaatcagtccccaatgcctggaaattcctcattggattactgtgttttaaacagaatttcgtgaacagccttttatctccaagcggaaagaaagatgtggaaagcttcagcaggccacgctgtgtccatcgcccaggatgacgcgggggccgatgactgggagaccgaccctgattttgtgaatgatgtgagtgagaaggagcaaagatggggtgccaagacggtgcagggctccgggcaccaggagcatatcaacatacacaagctgagggagaatgtctttcaagagcatcagacccttaaggagaaggaacttgaaacaggaccaaaagcttcccatggctatggagggaaatttggtgtggaacaagaccgaatggataagtcagctgtcggccacgaatatcagtcgaaactttccaagcactgctcgcaggtggactcggtccgtggcttcggaggcaagtttggtgtccagatggacagagttgatcagtctgctgtaggctttgaataccaggggaagactgagaagcatgcctcccagaaagactactccagtggttttggcggcaagtatggcgtgcaggccgaccgagtagacaagagcgcggtgggcttcgactaccagggcaagacggagaagcacgagtcacagagagattactccaaaggtttcggcggcaaatacggtatcgacaaggacaaagtggataagagcgccgttggctttgagtatcaaggcaaaacggagaagcacgagtcccagaaagactatgtgaaagggtttggaggaaaatttggtgtgcagacagacagacaagacaaatgtgcccttggctgggatcaccaggagaaattgcagctgcatgaatcccaaaaagattataagactggttttggaggcaaattcggtgttcagtcggagaggcaggactccgctgctgtggggtttgattacaaggagaagctggccaagcacgagtcccagcaagactactccaaaggattcggcgggaagtatggggtgcagaaggatcggatggataagaatgcgtcaacctttgaggatgtcacccaggtgtcctctgcctaccagaagacagtacctgtcgaagctgtgaccagcaaaacaagtaacatcagagctaactttgaaaacctcgctaaggagaaagagcaggaggacaggcggaaggcggaggcggagagagcccagcggatggccaaggagcggcaggagcaggaagaggccaggaggaagctggaggagcaagccagagccaaaacgcaaacgccccctgtgtcgcccgcacctcagccaaccgaggagaggctgccctcgagccccgtctatgaggatgcggcttccttcaaggcagagctgagctacagaggccctgtgagtgggacggagccggagcccgtgtacagcatggaggccgctgactaccgagaggccagcagccagcagggcctggcctatgccacagaggctgtctatgaaagcgcagaggccccgggccactatcccgcagaggacagcacctacgatgagtacgagaacgatctggggatcacagccgtcgccctgtacgactaccaggctgcgggcgatgatgagatctcatttgaccctgatgacatcatcaccaacatcgagatgattgacgacggctggtggcgcggggtgtgcaagggccggtacgggctcttcccagccaactatgtggagctgcggcagtagggcccccagcccccccccggagctgcgccctggatcctcacactacagatcaggccttctttggttcttgggtggttttgggttttttctgttttttttttttttttttttttttttttttgaaggtggggaggggaatatacacattgcttttatatttaatacttttgctgatgcttttgaaaatgtttatgccacagaatttgctaatatattgtaatcacattccttaggaggactttggtaattggttttatgcattgatggttttttttttcttttttgccaaattgactgtcacgcggcagcttcagggagctcgcattctcttgtgttcgtgttgccctcgtgcccatcaagtgcagtcgggacctcccaggacaagcacgaggcctcaggtcggccctgtggcgggtaggcaggaaggactgtcccagacgaggggcttcctctagagtctcactgctggggaggagaggactgggcctgatggaagttaacccggagctaagtcacccagagcacaggagctgccatgtcagatgggaaatctgcctatgtcataccgtgacagcccgcaggatcaggtgacttctagcagagaccctggtttttttcctgtgcccactccggcttgtcctcatctctacccatcccctgatgcccaggtcaccgggagggctgctgggagcctctcctgtccccgccgggcagtgtcactgagtccttgaaatcctcccctgccccgcgggtctctggattgggacgcacagtgcagttgaggtctgcgtcgggcttggcttttcacaaaggctgatgtcttaactgtcacccatatggtccctgggccaccgggcagcctggggcggtgtgtgtgccatgtcacagcatggcctctcggccttgggaaggaaggcagtgcctgctctgctgtgagccgccaggaaccctcctcctgtcaatgggggtgtagtatttttgccaaaatatcatgttcaatttcagtagtttgatcagttgaaggctagaagtgtgaagtgcagatgagtgtgtgttcttccccaaggtccccccacagctccaggacaccgctgtcctggcatttgtggccactcactttgtaggaaactcatctccttcctgaggagccgggaggctggaccagtcccgtcgtgcagtcaggtgggcggtgtgtctttccagaaggtcacgtggaaatgtctcgggacttgggtcccggagtgcccgtgaagcgtgtttttgctcctgaggtgcattttctcatcatccttgctttaccacaatgagcaatgaggtcgggttttatatgcaacttattgtatctgaattcctgtagcacacctcataggtatgatttttttaaattaaagaattcagaataaacattttttgatccaaaaaaaaaaaaaaaaaacaaacaaaaaaaaaaaaaaaaaaaaaaaaacaaaaaaagaaggggggggcgcgcgcctacaaaaataatcccccgcgggggggccccacgttttggcgcgcgctccccgcgcttttttgtgtaaacacagggggcgcgccccatatgtaggggggcgcgatataataaaggcgcgggcgcgcgcggcggcgcgcggcggtttataacaacaggagcgctgcccggaggtggagggaacacagtcggtcgcccgcgtggggaactcctctgcgtgcgaaaaagcggacacccccctatcctctgctgggggggcggcgcccgctatgttcgcgggcacaccacctctccaccgcagcaagagatatatgtaagagcgccgctcgagaggcgggaacaatctacaaacacttacgagggcgttctatcatgtggtgtgctaccaccagcagcgcgcatataattgccgcgcgcggtatgaaaaaaatttaggcacccccgcgggaagtatgtatgtacttttcgggagcaacaattcttatttacccgccggggagtctngttgttgttaagaataaaaacaggcgcgcacactccacgacctaacgacagtgacccctggtacagccaacgagcagcaagctgaaccaaccgactgctatgcacacaactagagagtcgggacgaccaggcaacgaggagaatcgtccgcggcaggcgagcgagacagtcgcgacgacgcagcagggcaggggctacagcagcaccaagcgaccgcaccgcggcagacggaggcacggagcgacagaaggaaagcgggcgagctagccaacgcacccgcaggagcagtacgcccaggcagccagcagccagacagcgaacagtcaagcccgcgagaggacacaagcggcgaatcagacagcaggaccagcgcgagccagccacccagacgagacaggagagcacaaaacacgcgcccgcacggccgc

SEQ ID NO: 62161 - DNA, 3397 bp, Homo sapiens
  misc_feature (131)..(131): n is a, c, g, or t
catggccgggctagcgcttagccagctgcgtggctggacccccgggactcttgcgggccaagacgcgggaagaggcggggcagggggcggggtctgcgcggggacccggatgcggcccgaccgcgacctcnggaaccggaagtagagcctggtgcctgggagcggctggcgcggcggaatccagggccgacccgggccggaccgaccccaggcggcgacggaatcagtccccaatgcctggaaattcctcattggattactgtgttttaaacagaatttcgtgaacagccttttatctccaagcggaaagaaagatgtggaaagcttcagcaggccacgctgtgtccatcgcccaggatgacgcgggggccgatgactgggagaccgaccctgattttgtgaatgatgtgagtgagaaggagcaaagatggggtgccaagacggtgcagggctccgggcaccaggagcatatcaacatacacaagctgagggagaatgtctttcaagagcatcagacccttaaggagaaggaacttgaaacaggaccaaaagcttcccatggctatggagggaaatttggtgtggaacaagaccgaatggataagtcagctgtcggccacgaatatcagtcgaaactttccaagcactgctcgcaggtggactcggtccgtggcttcggaggcaagtttggtgtccagatggacagagttgatcagtctgctgtaggctttgaataccaggggaagactgagaagcatgcctcccagaaagactactccagtggttttggcggcaagtatggcgtgcaggccgaccgagtagacaagagcgcggtgggcttcgactaccagggcaagacggagaagcacgagtcacagagagattactccaaaggtttcggcggcaaatacggtatcgacaaggacaaagtggataagagcgccgttggctttgagtatcaaggcaaaacggagaagcacgagtcccagaaagactatgtgaaagggtttggaggaaaatttggtgtgcagacagacagacaagacaaatgtgcccttggctgggatcaccaggagaaattgcagctgcatgaatcccaaaaagcaagagaacaaactgcgattgagcctctttttagcgctcagtagagcaggcgcacaggaagcagatgagaataagcccgtgctggtgcggaagactgtgctattgaagtggcgcgttgcaaagactactccaaaggattcggcgggaagtatggggtgcagaaggatcggatggataagaatgcgtcaacctttgaggatgtcacccaggtgtcctctgcctaccagaagacagtacctgtcgaagctgtgaccagcaaaacaagtaacatcagagctaactttgaaaacctcgctaaggagaaagagcaggaggacaggcggaaggcggaggcggagagagcccagcggatggccaaggagcggcaggagcaggaagaggccaggaggaagctggaggagcaagccagagccaaaacgcaaacgccccctgtgtcgcccgcacctcagccaaccgaggagaggctgccctcgagccccgtctatgaggatgcggcttccttcaaggcagagctgagctacagaggccctgtgagtgggacggagccggagcccgtgtacagcatggaggccgctgactaccgagaggccagcagccagcagggcctggcctatgccacagaggctgtctatgaaagcgcagaggccccgggccactatcccgcagaggacagcacctacgatgagtacgagaacgatctggggatcacagccgtcgccctgtacgactaccaggctgcgggcgatgatgagatctcatttgaccctgatgacatcatcaccaacatcgagatgattgacgacggctggtggcgcggggtgtgcaagggccggtacgggctcttcccagccaactatgtggagctgcggcagtagggcccccagcccccccccggagctgcgccctggatcctcacactacagatcaggccttctttggttcttgggtggttttgggttttttctgttttttttttttttttttttttttttttttgaaggtggggaggggaatatacacattgcttttatatttaatacttttgctgatgcttttgaaaatgtttatgccacagaatttgctaatatattgtaatcacattccttaggaggactttggtaattggttttatgcattgatggttttttttttcttttttgccaaattgactgtcacgcggcagcttcagggagctcgcattctcttgtgttcgtgttgccctcgtgcccatcaagtgcagtcgggacctcccaggacaagcacgaggcctcaggtcggccctgtggcgggtaggcaggaaggactgtcccagacgaggggcttcctctagagtctcactgctggggaggagaggactgggcctgatggaagttaacccggagctaagtcacccagagcacaggagctgccatgtcagatgggaaatctgcctatgtcataccgtgacagcccgcaggatcaggtgacttctagcagagaccctggtttttttcctgtgcccactccggcttgtcctcatctctacccatcccctgatgcccaggtcaccgggagggctgctgggagcctctcctgtccccgccgggcagtgtcactgagtccttgaaatcctcccctgccccgcgggtctctggattgggacgcacagtgcagttgaggtctgcgtcgggcttggcttttcacaaaggctgatgtcttaactgtcacccatatggtccctgggccaccgggcagcctggggcggtgtgtgtgccatgtcacagcatggcctctcggccttgggaaggaaggcagtgcctgctctgctgtgagccgccaggaaccctcctcctgtcaatgggggtgtagtatttttgccaaaatatcatgttcaatttcagtagtttgatcagttgaaggctagaagtgtgaagtgcagatgagtgtgtgttcttccccaaggtccccccacagctccaggacaccgctgtcctggcatttgtggccactcactttgtaggaaactcatctccttcctgaggagccgggaggctggaccagtcccgtcgtgcagtcaggtgggcggtgtgtctttccagaaggtcacgtggaaatgtctcgggacttgggtcccggagtgcccgtgaagcgtgtttttgctcctgaggtgcattttctcatcatccttgctttaccacaatgagcaatgaggtcgggttttatatgcaacttattgtatctgaattcctgtagcacacctcataggtatgatttttttaaattaaagaattcagaataaacattttttgatcca

SEQ ID NO: 62162 - DNA, 2969 bp, Homo sapiens
  misc_feature (201)..(201): n is a, c, g, or t
  misc_feature (230)..(230): n is a, c, g, or t
cagtggaaaataacttttattgagaccccaccaactgcaaaatctgttcctggcattaagctccttcttcctttgcaattcggtctttcttcagtggtcccatggaggagaagaaagcattcatgggaccactgaagaaagaccgaattcaaaggaagaaggagcttaatgctttcgttctcctcgcatggtctggaagcnggcccctgcgtgctcgaattcggaaggcngtgctcgcaggtggactcggtccgtggcttcggaggcaagtttggtgtccagatggacagagttgatcagtctgctgtaggctttgaataccaggggaagactgagaagcatgcctcccagaaagactactccagtggttttggcggcaagtatggcgtgcaggccgaccgagtagacaagagcgcggtgggcttcgactaccagggcaagacggagaagcacgagtcacagagagattactccaaaggtttcggcggcaaatacggtatcgacaaggacaaagtggataagagcgccgttggctttgagtatcaaggcaaaacggagaagcacgagtcccagaaagactatgtgaaagggtttggaggaaaatttggtgtgcagacagacagacaagacaaatgtgcccttggctgggatcaccaggagaaattgcagctgcatgaatcccaaaaagattataagactggttttggaggcaaattcggtgttcagtcggagaggcaggactccgctgctgtggggtttgattacaaggagaagctggccaagcacgagtcccagcaagactactccaaaggattcggcgggaagtatggggtgcagaaggatcggatggataagaatgcgtcaacctttgaggatgtcacccaggtgtcctctgcctaccagaagacagtacctgtcgaagctgtgaccagcaaaacaagtaacatcagagctaactttgaaaacctcgctaaggagaaagagcaggaggacaggcggaaggcggaggcggagagagcccagcggatggccaaggagcggcaggagcaggaagaggccaggaggaagctggaggagcaagccagagccaaaacgcaaacgccccctgtgtcgcccgcacctcagccaaccgaggagaggctgccctcgagccccgtctatgaggatgcggcttccttcaaggcagagctgagctacagaggccctgtgagtgggacggagccggagcccgtgtacagcatggaggccgctgactaccgagaggccagcagccagcagggcctggcctatgccacagaggctgtctatgaaagcgcagaggccccgggccactatcccgcagaggacagcacctacgatgagtacgagaacgatctggggatcacagccgtcgccctgtacgactaccaggctgcgggcgatgatgagatctcatttgaccctgatgacatcatcaccaacatcgagatgattgacgacggctggtggcgcggggtgtgcaagggccggtacgggctcttcccagccaactatgtggagctgcggcagtagggcccccagcccccccccggagctgcgccctggatcctcacactacagatcaggccttctttggttcttgggtggttttgggttttttctgttttttttttttttttttttttttttttttgaaggtggggaggggaatatacacattgcttttatatttaatacttttgctgatgcttttgaaaatgtttatgccacagaatttgctaatatattgtaatcacattccttaggaggactttggtaattggttttatgcattgatggttttttttttcttttttgccaaattgactgtcacgcggcagcttcagggagctcgcattctcttgtgttcgtgttgccctcgtgcccatcaagtgcagtcgggacctcccaggacaagcacgaggcctcaggtcggccctgtggcgggtaggcaggaaggactgtcccagacgaggggcttcctctagagtctcactgctggggaggagaggactgggcctgatggaagttaacccggagctaagtcacccagagcacaggagctgccatgtcagatgggaaatctgcctatgtcataccgtgacagcccgcaggatcaggtgacttctagcagagaccctggtttttttcctgtgcccactccggcttgtcctcatctctacccatcccctgatgcccaggtcaccgggagggctgctgggagcctctcctgtccccgccgggcagtgtcactgagtccttgaaatcctcccctgccccgcgggtctctggattgggacgcacagtgcagttgaggtctgcgtcgggcttggcttttcacaaaggctgatgtcttaactgtcacccatatggtccctgggccaccgggcagcctggggcggtgtgtgtgccatgtcacagcatggcctctcggccttgggaaggaaggcagtgcctgctctgctgtgagccgccaggaaccctcctcctgtcaatgggggtgtagtatttttgccaaaatatcatgttcaatttcagtagtttgatcagttgaaggctagaagtgtgaagtgcagatgagtgtgtgttcttccccaaggtccccccacagctccaggacaccgctgtcctggcatttgtggccactcactttgtaggaaactcatctccttcctgaggagccgggaggctggaccagtcccgtcgtgcagtcaggtgggcggtgtgtctttccagaaggtcacgtggaaatgtctcgggacttgggtcccggagtgcccgtgaagcgtgtttttgctcctgaggtgcattttctcatcatccttgctttaccacaatgagcaatgaggtcgggttttatatgcaacttattgtatctgaattcctgtagcacacctcataggtatgatttttttaaattaaagaattcagaataaacattttttgatcca

SEQ ID NO: 62163 - DNA, 3034 bp, Homo sapiens
  misc_feature (131)..(131): n is a, c, g, or t
catggccgggctagcgcttagccagctgcgtggctggacccccgggactcttgcgggccaagacgcgggaagaggcggggcagggggcggggtctgcgcggggacccggatgcggcccgaccgcgacctcnggaaccggaagtagagcctggtgcctgggagcggctggcgcggcggaatccagggccgacccgggccggaccgaccccaggcggcgacggaatcagtccccaatgcctggaaattcctcattggattactgtgttttaaacagaatttcgtgaacagccttttatctccaagcggaaagaaagatgtggaaagcttcagcaggccacgctgtgtccatcgcccaggatgacgcgggggccgatgactgggagaccgaccctgattttgtgaatgatgtgagtgagaaggagcaaagatggggtgccaagacggtgcagggctccgggcaccaggagcatatcaacatacacaagctgagggagaatgtctttcaagagcatcagacccttaaggagaaggaacttgaaacaggaccaaaagcttcccatggctatggagggaaatttggtgtggaacaagaccgaatggataagtcagctgtcggccacgaatatcagtcgaaactttccaagcactgctcgcaggtggactcggtccgtggcttcggaggcaagtttggtgtccagatggacagagttgatcagtctgctgtaggctttgaataccaggggaagactgagaagcatgcctcccagaaagactactccagtggttttggcggcaagtatggcgtgcaggccgaccgagtagacaagagcgcggtgggcttcgactaccagggcaagacggagaagcacgagtcacagagagattactccaaaggtttcggcggcaaatacggtatcgacaaggacaaagtggataagagcgccgttggctttgagtatcaaggcaaaacggagaagcacgagtcccagaaagactatgtgaaagggtttggaggaaaatttggtgtgcagacagacagacaagacaaatgtgcccttggctgggatcaccaggagaaattgcagctgcatgaatcccaaaaagattataagactggttttggaggcaaattcggtgttcagtcggagaggcaggactccgctgctgtggggtttgattacaaggagaagctggccaagcacgagtcccagcaagactactccaaaggattcggcgggaagtatggggtgcagaaggatcggatggataagaatgcgtcaacctttgaggatgtcacccaggtgtcctctgcctaccagaagacagtacctgtcgaagctgtgaccagcaaaacaagtaacatcagagctaactttgaaaacctcgctaaggagaaagagcaggaggacaggcggaaggcggaggcggagagagcccagcggatggccaaggagcggcaggagcaggaagaggccaggaggaagctggaggagcaagccagagccaaaacgcaaacgccccctgtgtcgcccgcacctcagccaaccgaggagaggctgccctcgagccccgtctatgaggatgcggcttccttcaaggcagagctgagctacagaggccctgtgagtgggacggagccggagcccgtgtacagcatggaggccgctgactaccgagaggccagcagccagcagggcctggcctatgccacagaggctgtctatgaaagcgcagaggccccgggccactatcccgcagaggacagcacctacgatgagtacgagaacgatctggggatcacagccgtcgccctgtacgactaccaggctgcgggcgatgatgagatctcatttgaccctgatgacatcatcaccaacatcgagatgattgacgacggctggtggcgcggggtgtgcaagggccgcttcagggagctcgcattctcttgtgttcgtgttgccctcgtgcccatcaagtgcagtcgggacctcccaggacaagcacgaggcctcaggtcggccctgtggcgggtaggcaggaaggactgtcccagacgaggggcttcctctagagtctcactgctggggaggagaggactgggcctgatggaagttaacccggagctaagtcacccagagcacaggagctgccatgtcagatgggaaatctgcctatgtcataccgtgacagcccgcaggatcaggtgacttctagcagagaccctggtttttttcctgtgcccactccggcttgtcctcatctctacccatcccctgatgcccaggtcaccgggagggctgctgggagcctctcctgtccccgccgggcagtgtcactgagtccttgaaatcctcccctgccccgcgggtctctggattgggacgcacagtgcagttgaggtctgcgtcgggcttggcttttcacaaaggctgatgtcttaactgtcacccatatggtccctgggccaccgggcagcctggggcggtgtgtgtgccatgtcacagcatggcctctcggccttgggaaggaaggcagtgcctgctctgctgtgagccgccaggaaccctcctcctgtcaatgggggtgtagtatttttgccaaaatatcatgttcaatttcagtagtttgatcagttgaaggctagaagtgtgaagtgcagatgagtgtgtgttcttccccaaggtccccccacagctccaggacaccgctgtcctggcatttgtggccactcactttgtaggaaactcatctccttcctgaggagccgggaggctggaccagtcccgtcgtgcagtcaggtgggcggtgtgtctttccagaaggtcacgtggaaatgtctcgggacttgggtcccggagtgcccgtgaagcgtgtttttgctcctgaggtgcattttctcatcatccttgctttaccacaatgagcaatgaggtcgggttttatatgcaacttattgtatctgaattcctgtagcacacctcataggtatgatttttttaaattaaagaattcagaataaacattttttgatcca

SEQ ID NO: 62164 - DNA, 2549 bp, Homo sapiens
ttggggctccattcagtgacagcggagaagcacgagtcacagagagattactccaaaggtttcggcggcaaatacggtatcgacaaggacaaagtggataagagcgccgttggctttgagtatcaaggcaaaacggagaagcacgagtcccagaaagactatgtgaaagggtttggaggaaaatttggtgtgcagacagacagacaagacaaatgtgcccttggctgggatcaccaggagaaattgcagctgcatgaatcccaaaaagattataagactggttttggaggcaaattcggtgttcagtcggagaggcaggactccgctgctgtggggtttgattacaaggagaagctggccaagcacgagtcccagcaagactactccaaaggattcggcgggaagtatggggtgcagaaggatcggatggataagaatgcgtcaacctttgaggatgtcacccaggtgtcctctgcctaccagaagacagtacctgtcgaagctgtgaccagcaaaacaagtaacatcagagctaactttgaaaacctcgctaaggagaaagagcaggaggacaggcggaaggcggaggcggagagagcccagcggatggccaaggagcggcaggagcaggaagaggccaggaggaagctggaggagcaagccagagccaaaacgcaaacgccccctgtgtcgcccgcacctcagccaaccgaggagaggctgccctcgagccccgtctatgaggatgcggcttccttcaaggcagagctgagctacagaggccctgtgagtgggacggagccggagcccgtgtacagcatggaggccgctgactaccgagaggccagcagccagcagggcctggcctatgccacagaggctgtctatgaaagcgcagaggccccgggccactatcccgcagaggacagcacctacgatgagtacgagaacgatctggggatcacagccgtcgccctgtacgactaccaggctgcgggcgatgatgagatctcatttgaccctgatgacatcatcaccaacatcgagatgattgacgacggctggtggcgcggggtgtgcaagggccggtacgggctcttcccagccaactatgtggagctgcggcagtagggcccccagcccccccccggagctgcgccctggatcctcacactacagatcaggccttctttggttcttgggtggttttgggttttttctgttttttttttttttttttttttttttttttgaaggtggggaggggaatatacacattgcttttatatttaatacttttgctgatgcttttgaaaatgtttatgccacagaatttgctaatatattgtaatcacattccttaggaggactttggtaattggttttatgcattgatggttttttttttcttttttgccaaattgactgtcacgcggcagcttcagggagctcgcattctcttgtgttcgtgttgccctcgtgcccatcaagtgcagtcgggacctcccaggacaagcacgaggcctcaggtcggccctgtggcgggtaggcaggaaggactgtcccagacgaggggcttcctctagagtctcactgctggggaggagaggactgggcctgatggaagttaacccggagctaagtcacccagagcacaggagctgccatgtcagatgggaaatctgcctatgtcataccgtgacagcccgcaggatcaggtgacttctagcagagaccctggtttttttcctgtgcccactccggcttgtcctcatctctacccatcccctgatgcccaggtcaccgggagggctgctgggagcctctcctgtccccgccgggcagtgtcactgagtccttgaaatcctcccctgccccgcgggtctctggattgggacgcacagtgcagttgaggtctgcgtcgggcttggcttttcacaaaggctgatgtcttaactgtcacccatatggtccctgggccaccgggcagcctggggcggtgtgtgtgccatgtcacagcatggcctctcggccttgggaaggaaggcagtgcctgctctgctgtgagccgccaggaaccctcctcctgtcaatgggggtgtagtatttttgccaaaatatcatgttcaatttcagtagtttgatcagttgaaggctagaagtgtgaagtgcagatgagtgtgtgttcttccccaaggtccccccacagctccaggacaccgctgtcctggcatttgtggccactcactttgtaggaaactcatctccttcctgaggagccgggaggctggaccagtcccgtcgtgcagtcaggtgggcggtgtgtctttccagaaggtcacgtggaaatgtctcgggacttgggtcccggagtgcccgtgaagcgtgtttttgctcctgaggtgcattttctcatcatccttgctttaccacaatgagcaatgaggtcgggttttatatgcaacttattgtatctgaattcctgtagcacacctcataggtatgatttttttaaattaaagaattcagaataaacattttttgatcca

SEQ ID NO: 62165 - DNA, 2893 bp, Homo sapiens
tattaagagccaccgcggggaacataaacaaacttctaaaaccatctcgcatacaggcagagtgaatgtctctttttcatgaaatgcccaacttgaaaacggcacatccagaaacacagctgctaaataggaactcgcagcttgagtgttatggcgctccagccccagcggcgttgcttatcgtggtggccacaccccgcacgtctgtgttgcccgtgtgagcctgtgctgtctcatggtgcgggtggaagccgcatgcgtgggagcttccatggggtcctgtctggcttagtcacgatgctgaggtcatagactaggttatttcctgccactctccaaggagggcctcttcatggatgttatctaaagtattaccaaagatccggaagggaagagtagattgagtgaatcatatgcgtttaactgtattgaaaacatactttccacctgtgacctgcactacccgatatatgtggttctggcctttcattgtgcatgtagactatgtgaaagggtttggaggaaaatttggtgtgcagacagacagacaagacaaatgtgcccttggctgggatcaccaggagaaattgcagctgcatgaatcccaaaaagattataagactggttttggaggcaaattcggtgttcagtcggagaggcaggactccgctgctgtggggtttgattacaaggagaagctggccaagcacgagtcccagcaagactactccaaaggattcggcgggaagtatggggtgcagaaggatcggatggataagaatgcgtcaacctttgaggatgtcacccaggtgtcctctgcctaccagaagacagtacctgtcgaagctgtgaccagcaaaacaagtaacatcagagctaactttgaaaacctcgctaaggagaaagagcaggaggacaggcggaaggcggaggcggagagagcccagcggatggccaaggagcggcaggagcaggaagaggccaggaggaagctggaggagcaagccagagccaaaacgcaaacgccccctgtgtcgcccgcacctcagccaaccgaggagaggctgccctcgagccccgtctatgaggatgcggcttccttcaaggcagagctgagctacagaggccctgtgagtgggacggagccggagcccgtgtacagcatggaggccgctgactaccgagaggccagcagccagcagggcctggcctatgccacagaggctgtctatgaaagcgcagaggccccgggccactatcccgcagaggacagcacctacgatgagtacgagaacgatctggggatcacagccgtcgccctgtacgactaccaggctgcgggcgatgatgagatctcatttgaccctgatgacatcatcaccaacatcgagatgattgacgacggctggtggcgcggggtgtgcaagggccggtacgggctcttcccagccaactatgtggagctgcggcagtagggcccccagcccccccccggagctgcgccctggatcctcacactacagatcaggccttctttggttcttgggtggttttgggttttttctgttttttttttttttttttttttttttttttgaaggtggggaggggaatatacacattgcttttatatttaatacttttgctgatgcttttgaaaatgtttatgccacagaatttgctaatatattgtaatcacattccttaggaggactttggtaattggttttatgcattgatggttttttttttcttttttgccaaattgactgtcacgcggcagcttcagggagctcgcattctcttgtgttcgtgttgccctcgtgcccatcaagtgcagtcgggacctcccaggacaagcacgaggcctcaggtcggccctgtggcgggtaggcaggaaggactgtcccagacgaggggcttcctctagagtctcactgctggggaggagaggactgggcctgatggaagttaacccggagctaagtcacccagagcacaggagctgccatgtcagatgggaaatctgcctatgtcataccgtgacagcccgcaggatcaggtgacttctagcagagaccctggtttttttcctgtgcccactccggcttgtcctcatctctacccatcccctgatgcccaggtcaccgggagggctgctgggagcctctcctgtccccgccgggcagtgtcactgagtccttgaaatcctcccctgccccgcgggtctctggattgggacgcacagtgcagttgaggtctgcgtcgggcttggcttttcacaaaggctgatgtcttaactgtcacccatatggtccctgggccaccgggcagcctggggcggtgtgtgtgccatgtcacagcatggcctctcggccttgggaaggaaggcagtgcctgctctgctgtgagccgccaggaaccctcctcctgtcaatgggggtgtagtatttttgccaaaatatcatgttcaatttcagtagtttgatcagttgaaggctagaagtgtgaagtgcagatgagtgtgtgttcttccccaaggtccccccacagctccaggacaccgctgtcctggcatttgtggccactcactttgtaggaaactcatctccttcctgaggagccgggaggctggaccagtcccgtcgtgcagtcaggtgggcggtgtgtctttccagaaggtcacgtggaaatgtctcgggacttgggtcccggagtgcccgtgaagcgtgtttttgctcctgaggtgcattttctcatcatccttgctttaccacaatgagcaatgaggtcgggttttatatgcaacttattgtatctgaattcctgtagcacacctcataggtatgatttttttaaattaaagaattcagaataaacattttttgatcca

SEQ ID NO: 62166 - DNA, 2217 bp, Homo sapiens
agtgtgatcagctagagagaggttgcaggtgcatcactcgcagcaagactactccaaaggattcggcgggaagtatggggtgcagaaggatcggatggataagaatgcgtcaacctttgaggatgtcacccaggtgtcctctgcctaccagaagacagtacctgtcgaagctgtgaccagcaaaacaagtaacatcagagctaactttgaaaacctcgctaaggagaaagagcaggaggacaggcggaaggcggaggcggagagagcccagcggatggccaaggagcggcaggagcaggaagaggccaggaggaagctggaggagcaagccagagccaaaacgcaaacgccccctgtgtcgcccgcacctcagccaaccgaggagaggctgccctcgagccccgtctatgaggatgcggcttccttcaaggcagagctgagctacagaggccctgtgagtgggacggagccggagcccgtgtacagcatggaggccgctgactaccgagaggccagcagccagcagggcctggcctatgccacagaggctgtctatgaaagcgcagaggccccgggccactatcccgcagaggacagcacctacgatgagtacgagaacgatctggggatcacagccgtcgccctgtacgactaccaggctgcgggcgatgatgagatctcatttgaccctgatgacatcatcaccaacatcgagatgattgacgacggctggtggcgcggggtgtgcaagggccggtacgggctcttcccagccaactatgtggagctgcggcagtagggcccccagcccccccccggagctgcgccctggatcctcacactacagatcaggccttctttggttcttgggtggttttgggttttttctgttttttttttttttttttttttttttttttgaaggtggggaggggaatatacacattgcttttatatttaatacttttgctgatgcttttgaaaatgtttatgccacagaatttgctaatatattgtaatcacattccttaggaggactttggtaattggttttatgcattgatggttttttttttcttttttgccaaattgactgtcacgcggcagcttcagggagctcgcattctcttgtgttcgtgttgccctcgtgcccatcaagtgcagtcgggacctcccaggacaagcacgaggcctcaggtcggccctgtggcgggtaggcaggaaggactgtcccagacgaggggcttcctctagagtctcactgctggggaggagaggactgggcctgatggaagttaacccggagctaagtcacccagagcacaggagctgccatgtcagatgggaaatctgcctatgtcataccgtgacagcccgcaggatcaggtgacttctagcagagaccctggtttttttcctgtgcccactccggcttgtcctcatctctacccatcccctgatgcccaggtcaccgggagggctgctgggagcctctcctgtccccgccgggcagtgtcactgagtccttgaaatcctcccctgccccgcgggtctctggattgggacgcacagtgcagttgaggtctgcgtcgggcttggcttttcacaaaggctgatgtcttaactgtcacccatatggtccctgggccaccgggcagcctggggcggtgtgtgtgccatgtcacagcatggcctctcggccttgggaaggaaggcagtgcctgctctgctgtgagccgccaggaaccctcctcctgtcaatgggggtgtagtatttttgccaaaatatcatgttcaatttcagtagtttgatcagttgaaggctagaagtgtgaagtgcagatgagtgtgtgttcttccccaaggtccccccacagctccaggacaccgctgtcctggcatttgtggccactcactttgtaggaaactcatctccttcctgaggagccgggaggctggaccagtcccgtcgtgcagtcaggtgggcggtgtgtctttccagaaggtcacgtggaaatgtctcgggacttgggtcccggagtgcccgtgaagcgtgtttttgctcctgaggtgcattttctcatcatccttgctttaccacaatgagcaatgaggtcgggttttatatgcaacttattgtatctgaattcctgtagcacacctcataggtatgatttttttaaattaaagaattcagaataaacattttttgatcca

SEQ ID NO: 62167 - DNA, 2177 bp, Homo sapiens
ctaccacagggcatggagaaaagagaaaagtgctctcctgacgcccatgtcctgtctctgcagaatgcgtcaacctttgaggatgtcacccaggtgtcctctgcctaccagaagacagtacctgtcgaagctgtgaccagcaaaacaagtaacatcagagctaactttgaaaacctcgctaaggagaaagagcaggaggacaggcggaaggcggaggcggagagagcccagcggatggccaaggagcggcaggagcaggaagaggccaggaggaagctggaggagcaagccagagccaaaacgcaaacgccccctgtgtcgcccgcacctcagccaaccgaggagaggctgccctcgagccccgtctatgaggatgcggcttccttcaaggcagagctgagctacagaggccctgtgagtgggacggagccggagcccgtgtacagcatggaggccgctgactaccgagaggccagcagccagcagggcctggcctatgccacagaggctgtctatgaaagcgcagaggccccgggccactatcccgcagaggacagcacctacgatgagtacgagaacgatctggggatcacagccgtcgccctgtacgactaccaggctgcgggcgatgatgagatctcatttgaccctgatgacatcatcaccaacatcgagatgattgacgacggctggtggcgcggggtgtgcaagggccggtacgggctcttcccagccaactatgtggagctgcggcagtagggcccccagcccccccccggagctgcgccctggatcctcacactacagatcaggccttctttggttcttgggtggttttgggttttttctgttttttttttttttttttttttttttttttgaaggtggggaggggaatatacacattgcttttatatttaatacttttgctgatgcttttgaaaatgtttatgccacagaatttgctaatatattgtaatcacattccttaggaggactttggtaattggttttatgcattgatggttttttttttcttttttgccaaattgactgtcacgcggcagcttcagggagctcgcattctcttgtgttcgtgttgccctcgtgcccatcaagtgcagtcgggacctcccaggacaagcacgaggcctcaggtcggccctgtggcgggtaggcaggaaggactgtcccagacgaggggcttcctctagagtctcactgctggggaggagaggactgggcctgatggaagttaacccggagctaagtcacccagagcacaggagctgccatgtcagatgggaaatctgcctatgtcataccgtgacagcccgcaggatcaggtgacttctagcagagaccctggtttttttcctgtgcccactccggcttgtcctcatctctacccatcccctgatgcccaggtcaccgggagggctgctgggagcctctcctgtccccgccgggcagtgtcactgagtccttgaaatcctcccctgccccgcgggtctctggattgggacgcacagtgcagttgaggtctgcgtcgggcttggcttttcacaaaggctgatgtcttaactgtcacccatatggtccctgggccaccgggcagcctggggcggtgtgtgtgccatgtcacagcatggcctctcggccttgggaaggaaggcagtgcctgctctgctgtgagccgccaggaaccctcctcctgtcaatgggggtgtagtatttttgccaaaatatcatgttcaatttcagtagtttgatcagttgaaggctagaagtgtgaagtgcagatgagtgtgtgttcttccccaaggtccccccacagctccaggacaccgctgtcctggcatttgtggccactcactttgtaggaaactcatctccttcctgaggagccgggaggctggaccagtcccgtcgtgcagtcaggtgggcggtgtgtctttccagaaggtcacgtggaaatgtctcgggacttgggtcccggagtgcccgtgaagcgtgtttttgctcctgaggtgcattttctcatcatccttgctttaccacaatgagcaatgaggtcgggttttatatgcaacttattgtatctgaattcctgtagcacacctcataggtatgatttttttaaattaaagaattcagaataaacattttttgatcca

SEQ ID NO: 62168 - DNA, 3331 bp, Homo sapiens
  misc_feature (131)..(131): n is a, c, g, or t
catggccgggctagcgcttagccagctgcgtggctggacccccgggactcttgcgggccaagacgcgggaagaggcggggcagggggcggggtctgcgcggggacccggatgcggcccgaccgcgacctcnggaaccggaagtagagcctggtgcctgggagcggctggcgcggcggaatccagggccgacccgggccggaccgaccccaggcggcgacggaatcagtccccaatgcctggaaattcctcattggattactgtgttttaaacagaatttcgtgaacagccttttatctccaagcggaaagaaagatgtggaaagcttcagcaggccacgctgtgtccatcgcccaggatgacgcgggggccgatgactgggagaccgaccctgattttgtgaatgatgtgagtgagaaggagcaaagatggggtgccaagacggtgcagggctccgggcaccaggagcatatcaacatacacaagctgagggagaatgtctttcaagagcatcagacccttaaggagaaggaacttgaaacaggaccaaaagcttcccatggctatggagggaaatttggtgtggaacaagaccgaatggataagtcagctgtcggccacgaatatcagtcgaaactttccaagcactgctcgcaggtggactcggtccgtggcttcggaggcaagtttggtgtccagatggacagagttgatcagtctgctgtaggctttgaataccaggggaagactgagaagcatgcctcccagaaagactactccagtggttttggcggcaagtatggcgtgcaggccgaccgagtagacaagagcgcggtgggcttcgactaccagggcaagacggagaagcacgagtcacagagagattactccaaaggtttcggcggcaaatacggtatcgacaaggacaaagtggataagagcgccgttggctttgagtatcaaggcaaaacggagaagcacgagtcccagaaagactatgtgaaagggtttggaggaaaatttggtgtgcagacagacagacaagacaaatgtgcccttggctgggatcaccaggagaaattgcagctgcatgaatcccaaaaagattataagactggttttggaggcaaattcggtgttcagtcggagaggcaggactccgctgctgtggggtttgattacaaggagaagctggccaagcacgagtcccagcaagactactccaaaggattcggcgggaagtatggggtgcagaaggatcggatggataagaatgcgtcaacctttgaggatgtcacccaggtgtcctctgcctaccagaagacagtacctgtcgaagctgtgaccagcaaaacaagtaacatcagagctaactttgaaaacctcgctaaggagaaagagcaggaggacaggcggaaggcggaggcggagagagcccagcggatggccaaggagcggcaggagcaggaagaggccaggaggaagctggaggagcaagccagagccaaaacgcaaacgccccctgtgtcgcccgcacctcagccaaccgaggagaggctgccctcgagccccgtctatgaggatgcggcttccttcaaggcagagctgagctacagaggccctgtgagtgggacggagccggagcccgtgtacagcatggaggccgctgactaccgagaggccagcagccagcagggcctggcctatgccacagaggctgtctatgaaagcgcagaggccccgggccactatcccgcagaggacagcacctacgatgagtacgagaacgatctggggatcacagccgtcgccctgtacgactaccaggctgcgggcgatgatgagatctcatttgaccctgatgacatcatcaccaacatcgagatgattgacgacggctggtggcgcggggtgtgcaagggccggtacgggctcttcccagccaactatgtggagctgcggcagtagggcccccagcccccccccggagctgcgccctggatcctcacactacagatcaggccttctttggttcttgggtggttttgggttttttctgttttttttttttttttttttttttttttttgaaggtggggaggggaatatacacattgcttttatatttaatacttttgctgatgcttttgaaaatgtttatgccacagaatttgctaatatattgtaatcacattccttaggaggactttggtaattggttttatgcattgatggttttttttttcttttttgccaaattgactgtcacgcggcagcttcagggagctcgcattctcttgtgttcgtgttgccctcgtgcccatcaagtgcagtcgggacctcccaggacaagcacgaggcctcaggtcggccctgtggcgggtaggcaggaaggactgtcccagacgaggggcttcctctagagtctcactgctggggaggagaggactgggcctgatggaagttaacccggagctaagtcacccagagcacaggagctgccatgtcagatgggaaatctgcctatgtcataccgtgacagcccgcaggatcaggtgacttctagcagagaccctggtttttttcctgtgcccactccggcttgtcctcatctctacccatcccctgatgcccaggtcaccgggagggctgctgggagcctctcctgtccccgccgggcagtgtcactgagtccttgaaatcctcccctgccccgcgggtctctggattgggacgcacagtgcagttgaggtctgcgtcgggcttggcttttcacaaaggctgatgtcttaactgtcacccatatggtccctgggccaccgggcagcctggggcggtgtgtgtgccatgtcacagcatggcctctcggccttgggaaggaaggcagtgcctgctctgctgtgagccgccaggaaccctcctcctgtcaatgggggtgtagtatttttgccatgcagatgagtgtgtgttcttccccaaggtccccccacagctccaggacaccgctgtcctggcatttgtggccactcactttgtaggaaactcatctccttcctgaggagccgggaggctggaccagtcccgtcgtgcagtcaggtgggcggtgtgtctttccagaaggtcacgtggaaatgtctcgggacttgggtcccggagtgcccgtgaagcgtgtttttgctcctgaggtgcattttctcatcatccttgctttaccacaatgagcaatgaggtcgggttttatatgcaacttattgtatctgaattcctgtagcacacctcataggtatgatttttttaaattaaagaattcagaataaacattttttgatcca

SEQ ID NO: 62169 - DNA, 2497 bp, Homo sapiens
  misc_feature (131)..(131): n is a, c, g, or t
catggccgggctagcgcttagccagctgcgtggctggacccccgggactcttgcgggccaagacgcgggaagaggcggggcagggggcggggtctgcgcggggacccggatgcggcccgaccgcgacctcnggaaccggaagtagagcctggtgcctgggagcggctggcgcggcggaatccagggccgacccgggccggaccgaccccaggcggcgacggaatcagtccccaatgcctggaaattcctcattggattactgtgttttaaacagaatttcgtgaacagccttttatctccaagcggaaagaaagatgtggaaagcttcagcaggccacgctgtgtccatcgcccaggatgacgcgggggccgatgactgggagaccgaccctgattttgtgaatgatgtgagtgagaaggagcaaagatggggtgccaagacggtgcagggctccgggcaccaggagcatatcaacatacacaagctgagggagaatgtctttcaagagcatcagacccttaaggagaaggaacttgaaacaggaccaaaagcttcccatggctatggagggaaatttggtgtggaacaagaccgaatggataagtcagctgtcggccacgaatatcagtcgaaactttccaagcactgctcgcaggtggactcggtccgtggcttcggaggcaagtttggtgtccagatggacagagttgatcagtctgctgtaggctttgaataccaggggaagactgagaagcatgcctcccagaaagactactccagtggttttggcggcaagtatggcgtgcaggccgaccgagtagacaagagcgcggtgggcttcgactaccagggcaagacggagaagcacgagtcacagagagattactccaaaggtttcggcggcaaatacggtatcgacaaggacaaagtggataagagcgccgttggctttgagtatcaaggcaaaacggagaagcacgagtcccagaaagactatgtgaaagggtttggaggaaaatttggtgtgcagacagacagacaagacaaatgtgcccttggctgggatcaccaggagaaattgcagctgcatgaatcccaaaaagattataagactggttttggaggcaaattcggtgttcagtcggagaggcaggactccgctgctgtggggtttgattacaaggagaagctggccaagcacgagtcccagcaagactactccaaaggattcggcgggaagtatggggtgcagaaggatcggatggataagaatgcgtcaacctttgaggatgtcacccaggtgtcctctgcctaccagaagacagtacctgtcgaagctgtgaccagcaaaacaagtaacatcagagctaactttgaaaacctcgctaaggagaaagagcaggaggacaggcggaaggcggaggcggagagagcccagcggatggccaaggagcggcaggagcaggaagaggccaggaggaagctggaggagcaagccagagccaaaacgcaaacgccccctgtgtcgcccgcacctcagccaaccgaggagaggctgccctcgagccccgtctatgaggatgcggcttccttcaaggcagagctgagctacagaggccctgtgagtgggacggagccggagcccgtgtacagcatggaggccgctgactaccgagaggccagcagccagcagggcctggcctatgccacagaggctgtctatgaaagcgcagaggccccgggccactatcccgcagaggacagcacctacgatgagtacgagaacgatctggggatcacagccgtcgccctgtacgactaccaggctgcgggcgatgatgagatctcatttgaccctgatgacatcatcaccaacatcgagatgattgacgacggctggtggcgcggggtgtgcaagggccgcttcagggagctcgcattctcttgtgttcgtgttgccctcgtgcccatcaagtgcagtcgggacctcccaggacaagcacgaggcctcaggtcggccctgtggcgggtaggcaggaaggactgtcccagacgaggggcttcctctagagtctcactgctggggaggagaggactgggcctgatggaagttaacccggagctaagtcacccagagcacaggagctgccatgtcagatgggaaatctgcctatgtcataccgtgacagcccgcaggatcaggaaactcatctccttcctgaggagccgggaggctggaccagtcccgtcgtgcagtcaggtgggcggtgtgtctttccagaaggtcacgtggaaatgtctcgggacttgggtcccggagtgcccgtgaagcgtgtttttgctcctgaggtgcattttctcatcatccttgctttaccacaatgagcaatgaggtcgggttttatatgcaacttattgtatctgaattcctgtagcacacctcataggtatgatttttttaaattaaagaattcagaataaacattttttgatcca

SEQ ID NO: 62170 - DNA, 1553 bp, Homo sapiens
  misc_feature (131)..(131): n is a, c, g, or t
catggccgggctagcgcttagccagctgcgtggctggacccccgggactcttgcgggccaagacgcgggaagaggcggggcagggggcggggtctgcgcggggacccggatgcggcccgaccgcgacctcnggaaccggaagtagagcctggtgcctgggagcggctggcgcggcggaatccagggccgacccgggccggaccgaccccaggcggcgacggaatcagtccccaatgcctggaaattcctcattggattactgtgttttaaacagaatttcgtgaacagccttttatctccaagcggaaagaaagatgtggaaagcttcagcaggccacgctgtgtccatcgcccaggatgacgcgggggccgatgactgggagaccgaccctgattttgtgaatgatgtgagtgagaaggagcaaagatggggtgccaagacggtgcagggctccgggcaccaggagcatatcaacatacacaagctgagggagaatgtctttcaagagcatcagacccttaaggagaaggaacttgaaacaggaccaaaagcttcccatggctatggagggaaatttggtgtggaacaagaccgaatggataagtcagctgtcggccacgaatatcagtcgaaactttccaagcactgctcgcaggtggactcggtccgtggcttcggaggcaagtttggtgtccagatggacagagttgatcagtctgctgtaggctttgaataccaggggaagactgagaagcatgcctcccagaaagactactccagtggttttggcggcaagtatggcgtgcaggccgaccgagtagacaagagcgcggtgggcttcgactaccagggcaagacggagaagcacgagtcacagagagattactccaaaggtttcggcggcaaatacggtatcgacaaggacaaagtggataagagcgccgttggctttgagtatcaaggcaaaacggagaagcacgagtcccagaaagactatgtgaaagggtttggaggaaaatttggtgtgcagacagacagacaagacaaatgtgcccttggctgggatcaccaggagaaattgcagctgcatgaatcccaaaaagattataagactggttttggaggcaaattcggtgttcagtcggagaggcaggactccgctgctgtggggtttgattacaaggagaagctggccaagcacgagtcccagcaagactactccaaaggattcggcgggaagtatggggtgcagaaggatcggatggataagaatgcgtcaacctttgaggatgtcacccaggtgtcctctgcctaccagaagacagtacctgtcgaagctgtgaccagcaaaacaagtaacatcagagctaactttgaaaacctcgctaaggagaaagagcaggaggacaggcggaaggcggaggcggagagagcccagcggatggccaaggagcggcaggagcaggaagaggccaggaggaagctggaggagcaagcccgagcccaaaccacgcccctagaatggcccaaggggagcctctagatcaccaca

SEQ ID NO: 62171 - DNA, 1609 bp, Homo sapiens
  misc_feature (131)..(131): n is a, c, g, or t
catggccgggctagcgcttagccagctgcgtggctggacccccgggactcttgcgggccaagacgcgggaagaggcggggcagggggcggggtctgcgcggggacccggatgcggcccgaccgcgacctcnggaaccggaagtagagcctggtgcctgggagcggctggcgcggcggaatccagggccgacccgggccggaccgaccccaggcggcgacggaatcagtccccaatgcctggaaattcctcattggattactgtgttttaaacagaatttcgtgaacagccttttatctccaagcggaaagaaagatgtggaaagcttcagcaggccacgctgtgtccatcgcccaggatgacgcgggggccgatgactgggagaccgaccctgattttgtgaatgatgtgagtgagaaggagcaaagatggggtgccaagacggtgcagggctccgggcaccaggagcatatcaacatacacaagctgagggagaatgtctttcaagagcatcagacccttaaggagaaggaacttgaaacaggaccaaaagcttcccatggctatggagggaaatttggtgtggaacaagaccgaatggataagtcagctgtcggccacgaatatcagtcgaaactttccaagcactgctcgcaggtggactcggtccgtggcttcggaggcaagtttggtgtccagatggacagagttgatcagtctgctgtaggctttgaataccaggggaagactgagaagcatgcctcccagaaagactactccagtggttttggcggcaagtatggcgtgcaggccgaccgagtagacaagagcgcggtgggcttcgactaccagggcaagacggagaagcacgagtcacagagagattactccaaaggtttcggcggcaaatacggtatcgacaaggacaaagtggataagagcgccgttggctttgagtatcaaggcaaaacggagaagcacgagtcccagaaagactatgtgaaagggtttggaggaaaatttggtgtgcagacagacagacaagacaaatgtgcccttggctgggatcaccaggagaaattgcagctgcatgaatcccaaaaagactactccaaaggattcggcgggaagtatggggtgcagaaggatcggatggataagaatgcgtcaacctttgaggatgtcacccaggtgtcctctgcctaccagaagacagtacctgtcgaagctgtgaccagcaaaacaagtaacatcagagctaactttgaaaacctcgctaaggagaaagagcaggaggacaggcggaaggcggaggcggagagagcccagcggatggccaaggagcggcaggagcaggaagaggccaggaggaagctggaggagacgaggagcatctcgtggagcggaggagcatctggcggagacgaggagcatctcgtggagaggaggagcatctcgtggagaggaggagcatctcgtggagcggaggagcatctggcacgagacgaggagtagtgtctggcggaggcgaggagtagtgtctggcagagacgaggagtagtgtctcgctgagacgcaggagtactgtctgccctattaccacgtcgctt

SEQ ID NO: 62172 - DNA, 2354 bp, Homo sapiens
  misc_feature (131)..(131): n is a, c, g, or t
catggccgggctagcgcttagccagctgcgtggctggacccccgggactcttgcgggccaagacgcgggaagaggcggggcagggggcggggtctgcgcggggacccggatgcggcccgaccgcgacctcnggaaccggaagtagagcctggtgcctgggagcggctggcgcggcggaatccagggccgacccgggccggaccgaccccaggcggcgacggaatcagtccccaatgcctggaaattcctcattggattactgtgttttaaacagaatttcgtgaacagccttttatctccaagcggaaagaaagatgtggaaagcttcagcaggccacgctgtgtccatcgcccaggatgacgcgggggccgatgactgggagaccgaccctgattttgtgaatgatgtgagtgagaaggagcaaagatggggtgccaagacggtgcagggctccgggcaccaggagcatatcaacatacacaagctgagggagaatgtctttcaagagcatcagacccttaaggagaaggaacttgaaacaggaccaaaagcttcccatggctatggagggaaatttggtgtggaacaagaccgaatggataagtcagctgtcggccacgaatatcagtcgaaactttccaagcactgctcgcaggtggactcggtccgtggcttcggaggcaagtttggtgtccagatggacagagttgatcagtctgctgtaggctttgaataccaggggaagactgagaagcatgcctcccagaaagactactccagtggttttggcggcaagtatggcgtgcaggccgaccgagtagacaagagcgcggtgggcttcgactaccagggcaagacggagaagcacgagtcacagagagattactccaaaggtttcggcggcaaatacggtatcgacaaggacaaagtggataagagcgccgttggctttgagtatcaaggcaaaacggagaagcacgagtcccagaaaggtgtcttccgttttatcttaccctccagccagcagctagtaatgtgacaggtggtagccacaccggaaaaggaaaaacaaagcgttattgatagcccttaacgtagatgtctctttttcatgaaatgcccaacttgaaaacggcacatccagaaacacagctgctaaataggaactcgcagcttgagtgttatggcgctccagccccagcggcgttgcttatcgtggtggccacaccccgcacgtctgtgttgcccgtgtgagcctgtgctgtctcatggtgcgggtggaagccgcatgcgtgggagcttccatggggtcctgtctggcttagtcacgatgctgaggtcatagactaggttatttcctgccactctccaaggagggcctcttcatggatgttatctaaagtattaccaaagatccggaagggaagagtagattgagtgaatcatatgcgtttaactgtattgaaaacatactttccacctgtgacctgcactacccgatatatgtggttctggcctttcattgtgcatgtagactatgtgaaagggtttggaggaaaatttggtgtgcagacagacagacaagacaaatgtgcccttggctgggatcaccaggagaaattgcagctgcatgaatcccaaaaagattataagactggttttggaggcaaattcggtgttcagtcggagaggcaggactccgctgctgtggggtttgattacaaggagaagctggccaagcacgagtcccagcaaggcacagttgccaccagcctcctaccctccccccgaccctcctgtgcggccacttctagcacagacttcagggctcaccgtcagcacctgcaacacagtcctcctgtgtcaccacttgtcagctgtcaggctgttcggcactttaaacccatttctagtagagcgacactgattttgagtggttcactttcttccctgtgaacttgtgatctgtgtatggcaggatgcgccagttagtgtgtgggtgccatctttctaacccggtgacccatccagtctctggactggggcatctccggtctccagcagcattctgcccgaggctgttctgctgttattggtgactgccgtgagccactgagtcaggccttccagatgaggagagaggtgttggttcaaccaaaccactggccatttgaccaggggcttcgtagcagcaagggccaggagacaggcgtgttctgtgtggtttctgtgtttcatttgtggtggtgtttttggccggggttgggaggttttttgtttgttctgtttgatgacaccatatgtgtgtaacatctccacacagagccacacagtatgtacgtgaagccagctc

SEQ ID NO: 62173 - DNA, 1064 bp, Homo sapiens
  misc_feature (131)..(131): n is a, c, g, or t
catggccgggctagcgcttagccagctgcgtggctggacccccgggactcttgcgggccaagacgcgggaagaggcggggcagggggcggggtctgcgcggggacccggatgcggcccgaccgcgacctcnggaaccggaagtagagcctggtgcctgggagcggctggcgcggcggaatccagggccgacccgggccggaccgaccccaggcggcgacggaatcagtccccaatgcctggaaattcctcattggattactgtgttttaaacagaatttcgtgaacagccttttatctccaagcggaaagaaagatgtggaaagcttcagcaggccacgctgtgtccatcgcccaggatgacgcgggggccgatgactgggagaccgaccctgattttgtgaatgatgtgagtgagaaggagcaaagatggggtgccaagacggtgcagggctccgggcaccaggagcatatcaacatacacaagctgagggagaatgtctttcaagagcatcagacccttaaggagaaggaacttgaaacaggaccaaaagcttcccatggctatggagggaaatttggtgtggaacaagaccgaatggataagtcagctgtcggccacgaatatcagtcgaaactttccaagcactgctcgcaggtggactcggtccgtggcttcggaggcaagtttggtgtccagatggacagagttgatcagtctgctgtaggctttgaataccaggggaagactgagaagcatgcctcccagaaagactactccagtggttttggcggcaagtatggcgtgcaggccgaccgagtagacaagagcgcggtgggcttcgactaccagggcaagacggagaagcacgagtcacagagagattactccaaaggtttcggcggcaaatacggtatcgacaaggacaaagtggataagagcgccgttggctttgagtatcaaggcaaaacggagaagcacgagtcccagaaagactatgtgatcgtggggttgtaacgtattgaattcaacacaccacaatactatgcacgcgtgtgtcgtgga

SEQ ID NO: 62174 - DNA, 385 bp, Homo sapiens
tgtaaaaccttacataccttcttaaatcatttaaaagctaatcctattacttggtttaatgaagttctatgaaatgtgtttgccagcagtgagaagtctttttctttcactagatgagtatttttttaaatgaaaagaggaaatgaaaaatgaggctattgactccccaggaacaggttgcgaactagcggtacctggggattttctaccttcttatctacctaatggaggcaattggcacattttaatgaacaactgcagagcagatgagaagacaggaaggatgttttccctagaaacatgaattgaacatgctggttgtttgaagtaatcaatgactagattttaaatcatataaaataaaatgctttacgttctattttct

SEQ ID NO: 62175 - DNA, 460 bp, Homo sapiens
tacacacacccctaaagttccatgtgctataacttgaacaactcctgtgcatgtcttttaattagcaagtgctagttaagggaaaataaagtgaaactgttaagacttaattaaaatgtgaattgatatggacattgaaatctggaactccacagccagttgttctgcctgtctttgcagtcctgaccaatgaaattaagaagaaaaagtacatcaggaagaaataatgggatgtatgtaatagagtttaaataaaacttaccaggttagaaaagcaaacaaaggtacagtatatctacaacaccttaaaattgctactgaagtttagatttacaagtcacagagtttcacttaatttctgcctgaatatgtgtgaacactcttgggccatgaatgccgaacaaggctttttccttcttcaattggttactacaatcaaagctgaccctcctccaacccc

SEQ ID NO: 62176 - DNA, 206 bp, Homo sapiens
gagaataatagttcccatctactgctctgttctgaaatccaaacctccactcacagctgacctatcgtaacctttgccagcccctcccatcagatgctaggaggcagtttgttctgcaagcttcccagcaaacaccaaaggcccaagcaccacttcaaagtgtcatttctctgtacagaacctctccaagcccagtcacaagccca

SEQ ID NO: 62177 - DNA, 466 bp, Homo sapiens
tggcttctaagggaccatacggtgaataaatgcattaaaatcaaatgggtaattatttctaatctgcatgatcatggatgtttttatggaggaggtaacattgggtttattttaagctgtggtagagttttcaattagccgtggcaagaaggatggcattccagctagagtcagcttggacccagtcggagaacagcaaggccccaaccgtatttgaggagaggtgagagatcaagttaattctaatgaagggattaggtaggaccatgtagttgaaaactcagacgaagaaataagtaaagacgaggttttggaagctcctttctctcgccaagtgtgtaataccaagtctccaaaacagaagatgacacagatcaaagctctattaacttaaggggcagagaatgcccaaggttagtggaatgctcacagagttcccacagtgagaaggttttgctcataatat

SEQ ID NO: 62178 - DNA, 441 bp, Homo sapiens
tgaaccacctcagcagaaagaaatgtaaattatttgcaagttctgcttgtgtctagctcagctcctgaaaacaaggatatatagctcagggagctgacttatgcccttcctcctactttagcacttagtacagagaaggactgttttatgatctgtttttccagatggataatgcagggccaagctgcaccatgttcctaagagaaagccaagaacataagtcacacaagccctcaggaagagaaggaaagaatgagtgacagtagaccgcagatgtgagcaaattcatggaggatggaaactgaatgagggaatggtggctggcttaacttaacagaggaaagtgcattctaaatacctatcataaaagcaacaaagagaataagcctatccactccacacgttggaactgcctgtttaaaagttgatccccggacccca

SEQ ID NO: 62179 - DNA, 550 bp, Homo sapiens
tcaacattatgtttgggtttcagcttccttgagcagggagcttgctcttgagagaagtgacttcagctgaggcatttcccgcagtgtggactgaaagctgagggttatttgctggcagtactcccagaacttgactggactcaaacatctggcctcaagtgatcctcctgctttggcctcctaaagtgttgagattacagacatgaatcaccgcactcagcctgagacatacttctttaattcctgtaacattattttatgctttgatacctgatggataatgcagggccaagctgcaccatgttcctaagagaaagccaagaacataagtcacacaagccctcaggaagagaaggaaagaatgagtgacagtagaccgcagatgtgagcaaattcatggaggatggaaactgaatgagggaatggtggctggcttaacttaacagaggaaagtgcattctaaatacctatcataaaagcaacaaagagaataagcctatccactccacacgttggaactgcctgtttaaaagttgatccccggacccca

SEQ ID NO: 62180 - DNA, 802 bp, Homo sapiens
gaattccccccccccccccccccccgggatgactccatgtgactggctcagggcttggcccacaggaactcctaacaaatctgaaccgaatcaagaaggtgtttcacccaggtgaaacctgcaacagcaggtggctgtccttgcaccctgtcccatccctcatcacggtgagggctcaacttcatgctcactaaagtttctcccagacagagagtgctgctcaaagccaacagggaggtgccgcgtgagggccatcactctgcattttgtccataaagacagccccgacttaccaggatccaacttaagatttctcaacccaaagggatatgaattcagtagaaaccaaccacacttcagtacagtgttgaataaataacaggagatcttcaacactttatcatgaataggctttgtgttagatgattttgcccaactagaggctaacataagtgttctgagcacgtttcagggaggctgagctgagatatgatgtttggtagttaggtgtattaaatgcttttttgacttacaatattttcaatttacagtgggtttctcaggacaaaccccactgcaagtcaggaagcatctgcattttcagcaggactgaaagatcaaatgcagggccattgtaagggcttgcttgcttctgtctgggtataaaaaggcatcaggctgggcgcagtggctcacacctgtaatcccagcactttaggccaaggcgggcagaccagctgaggtcaggagctcaagaccagcctggccaacatggtgaaactccgtctctactagaaataca

SEQ ID NO: 62181 - DNA, 1068 bp, Homo sapiens
ctggcccaccccggcaccatcccggcaagggtctgagtggcagggcctgaacccactgcacagccagacttcggaaggctcggcccagaccccagaccttccccgcccctgagggatctggtggccccacaccttggcgagacaacgttcatggaacccagaggtgtttctactgcggggcagcttggggccagggccctgctctgctgtatgccagcctggtggccagggcaagccccgtgggctctgggagcctcaggggaggggcactcagcagggccatcaggaagagggatgactccatgtgactggctcagggcttggcccacaggaactcctaacaaatctgaaccgaatcaagaaggtgtttcacccaggtgaaacctgcaacagcaggtggctgtccttgcaccctgtcccatccctcatcacggtgagggctcaacttcatgctcactaaagtttctcccagacagagagtgctgctcaaagccaacagggaggtgccgcgtgagggccatcactctgcattttgtccataaagacagccccgacttaccaggatccaacttaagatttctcaacccaaagggatatgaattcagtagaaaccaaccacacttcagtacagtgttgaataaataacaggagatcttcaacactttatcatgaataggctttgtgttagatgattttgcccaactagaggctaacataagtgttctgagcacgtttcagggaggctgagctgagatatgatgtttggtagttaggtgtattaaatgcttttttgacttacaatattttcaatttacagtgggtttctcaggacaaaccccactgcaagtcaggaagcatctgcattttcagcaggactgaaagatcaaatgcagggccattgtaagggcttgcttgcttctgtctgggtataaaaaggcatcaggctgggcgcagtggctcacacctgtaatcccagcactttaggccaaggcgggcagaccagctgaggtcaggagctcaagaccagcctggccaacatggtgaaactccgtctctactagaaataca

SEQ ID NO: 62182 - DNA, 454 bp, Homo sapiens
caacaacaaaaacagatgagctcaaacctgagaaaacctggaatctgcccaaatcaagccgtttatagcttcgaggtattaaacagccactaggacagttgatgaatttgatggagtcagtggcatttcacaagccttcacaggcacggggtcatgaaaggtgcatgggaggatccggaccctttgcgcccagcatgctttgcttgcgatcacctccacatcgcccttcggaggaaagcggcagctggtcaggctcctctgagacctttcaggagagccctgagaggtgaggtgaggacgaatgataaggaactgaggccaccgtgagcaagaagatatagatggcaggaacagtaagggctgttcattttacttgttggggtttgtcccctacttgttctggtatttacatagtttcacgtctctataaatctgataagaaagtgcaaaaaaa

SEQ ID NO: 62183 - DNA, 221 bp, Homo sapiens
tactgtacattccaacttttttgaaataattaagtagaagtcggccagtgcggtggctcacgcctataatcccagctacttgggaggctgaggcacaattgcttgaacccgggaggcggaggttgcagtgagtcgagatcacaccactgcactccagccttggcgatagagggagactccatctcaaaaaaataaaataaaataaaaataaataagattta

SEQ ID NO: 62184 - DNA, 229 bp, Homo sapiens
cttaacaatgttaatgcttccaatccatgagcatggagtgtctttccatatatttgtgtcttctgcaatttcttttagtaatgtttttggctttcactgtacaagtcttttgcctccttggttaaccttattcttaagcatattattatttttggtgctattagaaatggaacagttttaatttccttttcaaatcattcgttgttagttatataaaattcagaaattc

SEQ ID NO: 62185 - DNA, 399 bp, Homo sapiens
ggcatgtaaatattgcaaataaataaattgatttatctcaaaaatctgggaaatggttgtctacattaacaatgataggaaagaactgaaaaggcctagctgggaccctttaacactactactgctgctttctttgaatatcctcagagacaaattcattatgggaagctgtcaaaatcatttagaaccaagtctgatatattgggatcagaatgaatgcttgactttattgaaaaagagaagcataaaaaatcattttaagtaaataatctatgtctgattgaaaacaacgtggatttctctagctgacagattccatcttctatatacatacttgttaactttcgtgttcacatctttattatcttttaatttttgcttttctatcatagaaagatc

SEQ ID NO: 62186 - DNA, 199 bp, Homo sapiens
acctctgcattaacactccagcacctttggttagccaatttggccttatttgtgtctccaccattggattatctgtccatcaaggtcaggaatgttttcgggttaccccactgtccccaactttgaatatgttcactgcctggaaaatgtttatctgaatataaggcatcaagccagaacttgcccaaaacttaaccta

SEQ ID NO: 62187 - DNA, 383 bp, Homo sapiens
atgtttggatatatttgactattccgatcatgaaaacagaaattaccctgcctactacaaggacagactgatgggaaattatgcacctggtcaacttagcttttaagcagacgatgctgtaaaaactaacggcttctctgatatttattgtaagttttagtactgatctccttttccagtgctgcacactcctgtgtttggaactttaatagctttgcaacgaaatcctatatccggtttcctataatttaactgaagaaaaacacatccaaataaaggtctatattaacagaccagatagcatcagaaatcatgtgactattatgattatcagaatatgtcttaactttttagggcaaaattaacactgaaagttctagctt

SEQ ID NO: 62188 - DNA, 1925 bp, Homo sapiens
tgcagagaagaggaggttggtgtggagcacaggcagcaccgagcctgccccgtgagctgagggcctgcagtctgcggctggaatcaggatagacaccaaggcaggacccccagagatgctgaagcctctttggaaagcagcagtggcccccacatggccatgctccatgccgccccgccgcccgtgggacagagaggctggcacgttgcaggtcctgggagcgctggctgtgctgtggctgggctccgtggctcttatctgcctcctgtggcaagtgccccgtcctcccacctggggccaggtgcagcccaaggacgtgcccaggtcctgggagcatggctccagcccagcttgggagcccctggaagcagaggccaggcagcagagggactcctgccagcttgtccttgtggaaagcatcccccaggacctgccatctgcagccggcagcccctctgcccagcctctgggccaggcctggctgcagctgctggacactgcccaggagagcgtccacgtggcttcatactactggtccctcacagggcctgacatcggggtcaacgactcgtcttcccagctgggagaggctcttctgcagaagctgcagcagctgctgggcaggaacatttccctggctgtggccaccagcagcccgacactggccaggacatccaccgacctgcaggttctggctgcccgaggtgcccatgtacgacaggtgcccatggggcggctcaccaggggtgttttgcactccaaattctgggttgtggatggacggcacatatacatgggcagtgccaacatggactggcggtctctgacgcaggtgaaggagcttggcgctgtcatctataactgcagccacctggcccaagacctggagaagaccttccagacctactgggtactgggggtgcccaaggctgtcctccccaaaacctggcctcagaacttctcatctcacttcaaccgtttccagcccttccacggcctctttgatggggtgcccaccactgcctacttctcagcgtcgccaccagcactctgtccccagggccgcacccgggacctggaggcgctgctggcggtgatggggagcgcccaggagttcatctatgcctccgtgatggagtatttccccaccacgcgcttcagccaccccccgaggtactggccggtgctggacaacgcgctgcgggcggcagccttcggcaagggcgtgcgcgtgcgcctgctggtcggctgcggactcaacacggaccccaccatgttcccctacctgcggtccctgcaggcgctcagcaaccccgcggccaacgtctctgtggacgtgaaagtcttcatcgtgccggtggggaaccattccaacatcccattcagcagggtgaaccacagcaagttcatggtcacggagaaggcagcctacataggcacctccaactggtcggaggattacttcagcagcacggcgggggtgggcttggtggtcacccagagccctggcgcgcagcccgcgggggccacggtgcaggagcagctgcggcagctctttgagcgggactggagttcgcgctacgccgtcggcctggacggacaggctccgggccaggactgcgtttggcagggctgaggggggcctctttttctctcggcgaccccgccccgcacgcgccctcccctctgaccccggcctgggcttcagccgcttcctcccgcaagcagcccgggtccgcactgcgccaggagccgcctgcgaccgcccgggcgtcgcaaaccgcccgcctgctctctgatttccgagtccagccccccctgagccccacctcctccagggagccctccaggaagccccttccctgactcctggcccacaggccaggcctaaaaaaaactcgtggcttcaaaaaaaaacctctgtg

SEQ ID NO: 62189 - DNA, 2006 bp, Homo sapiens
tgcagagaagaggaggttggtgtggagcacaggcagcaccgagcctgccccgtgagctgagggcctgcagtctgcggctggaatcaggatagacaccaaggcaggacccccagagatgctgaagcctctttggaaagcagcagtggcccccacatggccatgctccatgccgccccgccgcccgtgggacagagaggctggcacgttgcaggtcctgggagcgctggctgtgctgtggctgggctccgtggctcttatctgcctcctgtggcaagtgccccgtcctcccacctggggccaggtgcagcccaaggacgtgcccaggtcctgggagcatggctccagcccagcttgggagcccctggaagcagaggccaggcagcagagggactcctgccagcttgtccttgtggaaagcatcccccaggacctgccatctgcagccggcagcccctctgcccagcctctgggccaggcctggctgcagctgctggacactgcccaggagagcgtccacgtggcttcatactactggtccctcacagggcctgacatcggggtcaacgactcgtcttcccagctgggagaggctcttctgcagaagctgcagcagctgctgggcaggaacatttccctggctgtggccaccagcagcccgacactggccaggacatccaccgacctgcaggttctggctgcccgaggtgcccatgtacgacaggtgcccatggggcggctcaccaggggtgttttgcactccaaattctgggttgtggatggacggcacatatacatgggcagtgccaacatggactggcggtctctgacgcaggtgaaggagcttggcgctgtcatctataactgcagccacctggcccaagacctggagaagaccttccagacctactgggtactgggggtgcccaaggctgtcctccccaaaacctggcctcagaacttctcatctcacttcaaccgtttccagcccttccacggcctctttgatggggtgcccaccactgcctacttctcagcgtcgccaccagcactctgtccccagggccgcacccgggacctggaggcgctgctggcggtgatggggagcgcccaggagttcatctatgcctccgtgatggagtatttccccaccacgcgcttcagccaccccccgaggtactggccggtgctggacaacgcgctgcgggcggcagccttcggcaagggcgtgcgcgtgcgcctgctggtcggctgcggactcaacacggaccccaccatgttcccctacctgcggtccctgcaggcgctcagcaaccccgcggccaacgtctctgtggacgtggtgagggcgtgctcccggccgggcgtgggaaaggcggccctcctgccgcccttcctgacgcgctgcctctgctcccctaagaaagtcttcatcgtgccggtggggaaccattccaacatcccattcagcagggtgaaccacagcaagttcatggtcacggagaaggcagcctacataggcacctccaactggtcggaggattacttcagcagcacggcgggggtgggcttggtggtcacccagagccctggcgcgcagcccgcgggggccacggtgcaggagcagctgcggcagctctttgagcgggactggagttcgcgctacgccgtcggcctggacggacaggctccgggccaggactgcgtttggcagggctgaggggggcctctttttctctcggcgaccccgccccgcacgcgccctcccctctgaccccggcctgggcttcagccgcttcctcccgcaagcagcccgggtccgcactgcgccaggagccgcctgcgaccgcccgggcgtcgcaaaccgcccgcctgctctctgatttccgagtccagccccccctgagccccacctcctccagggagccctccaggaagccccttccctgactcctggcccacaggccaggcctaaaaaaaactcgtggcttcaaaaaaaaacctctgtg

SEQ ID NO: 62190 - DNA, 377 bp, Homo sapiens
ggagtggggtgtagatttttcctggaggtgaaggttctcagccctaccctctagcccgcccacccagctccagccgtctgtttctgtctcggatgagagggggcctctcaggacaaagaggaagtagctggaaggggaaggagccagctgcagagaggaggaggtgagctgcagagaagaggaggttggtgtggagcacaggcagcaccgagcctgccccgtgagctgagggcctgcagtctgcggctggaatcaggatagacaccaaggcaggacccccagaggtatgtgccaatgaggccagggcagctgagaaaagccaggcatggggaaagggctgctgtctgcctccctatggcctcagcctcccagcaacc

SEQ ID NO: 62191 - DNA, 697 bp, Homo sapiens
tgcagagaagaggaggttggtgtggagcacaggcagcaccgagcctgccccgtgagctgagggcctgcagtctgcggctggaatcaggatagacaccaaggcaggacccccagagatgctgaagcctctttggaaagcagcagtggcccccacatggccatgctccatgccgccccgccgcccgtgggacagagaggctggcacgttgcaggtcctgggagcgctggctgtgctgtggctgggctccgtggctcttatctgcctcctgtggcaagtgccccgtcctcccacctggggccaggtgcagcccaaggacgtgcccaggtcctgggagcatggctccagcccagcttgggagcccctggaagcagaggccaggcagcagagggactcctgccagcttgtccttgtggaaagcatcccccaggacctgccatctgcagccggcagcccctctgcccagcctctgggccaggcctggctgcagctgctggacactgcccaggagagcgtccacgtggcttcatactactggtccctcacagggcctgacatcggggtcaacgactcgtcttcccagctggtgcgccccgccctggccccaccgcatcctggtgctggaaacacagcaagtcaggctgcctatctatgcaggcgtctcgggcaccaggcccgggggctcagcttggtggtaggg

SEQ ID NO: 62192 - DNA, 403 bp, Homo sapiens
  misc_feature (299)..(299): n is a, c, g, or t
  misc_feature (310)..(310): n is a, c, g, or t
  misc_feature (332)..(332): n is a, c, g, or t
  misc_feature (371)..(371): n is a, c, g, or t
tcccggaggcccaagaaggtctgcatcgtgaaggtggtggggacacggaacctgtggaagaacattgtggtcctgtgtgtgaactcgctgacggggtacgggatccaccactgctttgccaggagcatgatgggccgttagaaacatttctttgttctggaaacaaagtactgttgaaaccagcttggaattttttttttttttttttttttcaaaaaggcaactttttttttttcttggcatcaatgaatatgcacttcagaaatctacagagaacttttttcacttttgtatttgtnccacagcattntagccaggagtacaaaataggngctcttcaagcagcacatgaagatggcccaggagccttnaagccatccagagcagcagagcagcacctaaa

SEQ ID NO: 62193 - DNA, 578 bp, Homo sapiens
gagggggagcggctgtgtggatgtcggagaagccgcgggcgagatcacctcttaggcagagcagtgggcgcagatgccatggcgggaagcaggcctttctgaattcttagcagcgatctccaggggcactctaaccttgcaagaaagaggctgccagtcttgcatcagatgcagaaaccagggcgcagagtagcctgcccctcctgtgacttccccgtctcgggaaatggcaccatcatcatctacctggtggctccggccagaaaacagggaggcatctttggatcatctcaccctcaccacccacacccgggccaccaccaagactcttcaattctacctccaaaataaatccctaccccacttccctctgttctcgttgccacccctgtgtcaagccatcaccagcttggccctggaggccagcacagcctccttcccgcctccctgcctcctctctacccccaacagccagaataacttgcagaaaatgtaaatcaggccccatctcattctccttcttaaaccgcccctttccccaagggcttcctattgcatttgcaccaaaatcgacaccc

SEQ ID NO: 62194 - DNA, 457 bp, Homo sapiens
agtgctgacagattgggtgtctccggtgcgccggcggctgccgcttaagtagcttcctgtcagggagtcaggggtcacctcatccccgctctgttcaaaacagtactgacctcttcggggtgcctcccacgcctgtctactgcacgagcatgtgtttagtgtcaactctgcgatccagaggaggccagccctgcccaccccacagcccccagaggctgccaggcgccaatatggggtaactcagcgccccctcccttgccattggttgacgatgcctggaatcccaccatcagagctttgttaaggttgctgtgggatgggtggcagggaggcagcaaaagacaagaaggtggtggggacctctggcttgtggatttcataatcagacctttatggtgggcttgggtaggagatcaggcaatactaaataataataaaaacaaatttcacacttgct

SEQ ID NO: 62195 - DNA, 567 bp, Homo sapiens
gagggggagcggctgtgtggatgtcggagaagccgcgggcgagatcacctcttaggcagagcagtgggcgcagatgccatggcgggaagcaggcctttctgaattcttagcagcgatctccaggggcactctaaccttgcaagaaagaggctgccagtcttgcatcagatgcagaaaccagggcgcagagtaggagctagagcatcttggatggagaaacctcggcaaagacaaaggcccattgtcccccttccccggccttctgccagctccctccccagtcaccagaggaggccagccctgcccaccccacagcccccagaggctgccaggcgccaatatggggtaactcagcgccccctcccttgccattggttgacgatgcctggaatcccaccatcagagctttgttaaggttgctgtgggatgggtggcagggaggcagcaaaagacaagaaggtggtggggacctctggcttgtggatttcataatcagacctttatggtgggcttgggtaggagatcaggcaatactaaataataataaaaacaaatttcacacttgct

SEQ ID NO: 62196 - DNA, 286 bp, Homo sapiens
ccttggtgtcctcttgtcttctttccttgtgtgacttggttttccagtctgtgaaatgcggtgggtgcatccaactccaagcctgtctctgccctgggtcctggagcctggaggacgaatgaggtcatgtttttctaggagctagagcatcttggatggagaaacctcggcaaagacaaaggcccattgtcccccttccccggccttctgccagctccctccccagtcaccagaggaggccagccctgcccaccccacagcccccagaggctgccaggcgccaata

SEQ ID NO: 62197 - DNA, 389 bp, Homo sapiens
cgtatgtatcttttatttacactgcacaccttgcagcatccttaccttgcagagtactgagtcctggcttcatgaatttcatgtcaagtaaatgggttttagtcatccctagttcatgtgcatgtgccgagaaaaaggggagcttctaaaacatgtgcgcaaaccacaggaaacagtgcaatcctgtgtgtctcctattccacttactcctcaaggccccaaggtaggacgcatgtttggtggctttctggcttacaagttccagtgcctactcccattccctcagaggtttgctgtgatcactgagggaagcagaatggagcatcgtgtggtccttactggagactccttgcagcacctgaaacaacccaatgttgttagaggcaaat

SEQ ID NO: 62198 - DNA, 219 bp, Homo sapiens
taatgttgttaatactgtccttggtgctagacttccctgaatgtgaataagacaaggtttttttttaaaaaaatgatttatattatatcatttattctctttgtctaattggcatttgtaaggttgtagttatattgtcttcaagtattcatgtagattttggaggaggaagtataaaggaagtgaaaaagagtttggttgtcaggacaaacaaggagc

SEQ ID NO: 62199 - DNA, 1586 bp, Homo sapiens
aaggtgggcctggaagataacagctagtaggctaaggtcagacactgacacttgcagttgtctttggtagttttttgcactaacttcaggaaccagctcatgatctcaggatgtatggaaaaataatctttgtattactattgtcagcaattgtgagcatatcagcatcaagtaccactggtgtggcaatgcacacttcaacctcttcttcagtcacaaagagttacatctcatcacagacaaatgatacgcacaaacgggacacatatgcagccactcctagagctcatgaagtttcagaaatttctgttagaactgtttaccctccagaagaggaaaccggagaaagggtacaacttgcccatcatttctctgaaccagagataacactcattatttttggggtgatggctggtgttattggaacgatcctcttaatttcttacggtattcgccgactgataaagaaaagcccatctgatgtaaaacctctcccctcacctgacacagacgtgcctttaagttctgttgaaatagaaaatccagagacaagtgatcaatgagaatctgttcaccaaaccaaatgtggaaagaacacaaagaagacataagacttcagtcaagtgaaaaattaacatgtggactggacactccaataaattatatacctgcctaagttgtacaatttcagaatgcaattttcattataatgagttccagtgactcaatgatggggaaaaaaatctctgctcattaatatttcaagataaagaacaaatgtttccttgaatgcttgcttttgtgtgttagcataatttttagaattgtttgagaattctgatccaaaactttagttgaattcatctacgtttgtttaatattaacttaacctattctattgtattataatgatgattctgtcaaatgaaaggcttgaaatacctagatgaagtttagattttcttcctattgtaaacttttgagtctggtttcattgttttaaataaattaaggggacactaaagtcctatcattcatttccttcattgctgaacaggcaagatataatattacatgaatgattactatattttgttcacactaataaagcttatgctcagaaatgccatacacacacacaaacacacacatttatcatttaatgcataaatcaacacaaaaggttttcccattaatatgaaatattacatatatataagtgccatatttaaaataatttgtctaacagtagaactatgtcggagcactcactgaagcttgcattccactgaaagagttatttgtgtaagtagagtatccggagaaggaaaagaacttacgacctttctttataacagaaactcaactctaaattcaacaagatgtgcaaaccggacatgcaggtgaatattttaataggttactataaggttctcaattaaattctttaatctgtccagtcccagtttctcttattaataaaactttggaaattgctttaaaccatttaaaggaaatttctagatatagaaactaaggactgtgactatacagctgtcactcatttgtagtaaaacttaaaaagc

SEQ ID NO: 62200 - DNA, 1627 bp, Homo sapiens
gaataatctaagcctgaaatagttgagcaattgtgagcatatcagcatcaagtaccactggtgtggcaatgcacacttcaacctcttcttcagtcacaaagagttacatctcatcacagacaaatgggataacactcattaattggtgggcgatggctcgtgttatttttgaggtgatgcttgttgttgttggaatgatcatcttaatttcttactgtattcgatgactgataaaggttttcatgcctctgggattgagattagaggaagaaagcaaagaaaggacatttttttacttcactgttcatggtgtaattgtgtgcctgacggctgtagctactaacttggcttacgttgactggctactaagggactctaggagtcagaaactaaatgctgagtctctcaaaggcgtagagagaatttcagagggccttaccatgacatgaggattaaactccagttctgcccgattctcatcacgaaatccttatcccatgcctcattgtgtttggtgtccccttgcctaggggacagtcctcctgggtaagatcagcaagataactcttcagtcacattccatttgatactttgaatactctggggtccttacccaccaaatggatggaattcagctgctcaatcactgcctttctcagaactcggttgtccaaccacaattccctttcccttaggatagggctatattggcaaaatgccgcccgaacagactgctgacagtaaaccaaatattagtttctctcaccttcttgaaggcatttacagtctttgtaagcttttctcctagattttccctttcctgttcctgcttagattctaagaatgaagtgcatccttctccttttcttcattaggtgaagtgggatttacccattaccatatattcaccaccaggtcactgacgagagactccagtgaatcgctttccctctgcattcctctccttgtacagactagagggtcacattgtgtaaagcctaacatagccctgcaaagagatctggccccagcagtgaacacaaactcagtaattctctttagagtgaggtggtaatcagtgcctcttggtttcagccgtggtcctagtggctacttatggaagaataggaatagtttcacaacatcctgtaacattggcttacctgtatattatatgccacccgtaaccataaaaacaccaggatttaggttccttgaaggtaatgactatgggtccctctctgtggaagaatactgaatagaagagagaaatcactcaatatgtggaatgactgatatggtttggctgtgttcccactcaaatctcatcttgaattgtagttccaataatccccacatgtcatgggaggaacccagtgggaggtacttgaatcattgcggtggtttcccctgtgctattctcatgatagtgagtaaattctcacataatctgatagttttataaaggagcttcccccttcactcagctctcattcttctccttcctgccactatgtaagaaagatgtgtttgtttcccctttggtcatgattgtaagtatcctgagaccttcccagccatgcaaaactgtagatcaataaaacctctttcctttataaattacaca

SEQ ID NO: 62201 - DNA, 523 bp, Homo sapiens
ggatattgaggaaatattaagattcttcttatagtatttaacctattagtgtaaaaaatatttaaaataatatatttacatatgtttaaaacttggcctccaaagtgctgggattacaggtgtgagccactgcgcccggccctaattagggtttttataaaaccaaaagaacttggcaacacccctaggtaccctttagaagcctccaattggctacagcctgtgaaggattggcctgtgaccaatcagaggctgaagtggagtcttagctcatgggtcaagcagaggctgaagtggaaacttcttgtctttttatcacaggcatgaggatgtggcctgcatgctgcctgatcttgcctagaaccggctgcacctgctgttctcttgtttatgcaaactggctgcacctgctattcctttgcttatgcccctacccctggctatcctaattccctgttctcctgcctcactattactgtattctctacttctaaataaaaataaaacaaaatacaaaccgttt

SEQ ID NO: 62202 - DNA, 426 bp, Homo sapiens
ctatttggagaattcatatggcaatcgtttataaacacatgatggaatcaggtggcaggccaagttaaagagcaaggccagaaaagaacttaaaagagaagagaaaacatagacagtttaggaacaatagatcatgtcttctccatgatttggaggtaaactgattacctatcagctgataaatagagaaaggttttagaactcttcccttgagtagactaatgagaggtgtcagagaagatgttttctgttatttgtgtgctctccaggaaactttgagcattcagctgaggggccaagttggctgcctctgagaagaagcccttccacctccactccactgcacttgggtgccattcccctcatttgaatgtctccaagagatgagcaaaggtacatctacagagttcagggtattgagctcat

SEQ ID NO: 62203 - DNA, 900 bp, Homo sapiens
  misc_feature (1)..(1): n is a, c, g, or t
  misc_feature (13)..(13): n is a, c, g, or t
  misc_feature (29)..(29): n is a, c, g, or t
nttccccgggcantgcagcaacggcagantatgctggtctgaaagtagcacgacggcaaatgcgggatgctgctggccgtcgacattttcatgcgtctcagtgccctaggcccacaagtcccgtgtctacagacagcaacatgagtgccgccgtaatgcagaaaaccagaccagccaagaaactgaaacaccagccaggacatctgcgcagagaaacctacacagatgatcttccaccacctcctgtgccgccacctgctataaagtcacctactgcccaatccaagacacagctggaagtacgacctgtagtggtgccaaaactcccttctatggatgcaagaacagacaaatggagaaacgggacaacttgtccatcgtttcactgtaccaggtatgttaatatttgacaaagaataaaagtcattccattttaaactatccattgcttgtttcaaatgcctaagaaaatgtgtctatcttaaaacagaagagcatatgttgttaactttattcacacgaaattgtaaagacaaagaaaatattctctttttaaaattaaaataggcatttcttatttttaaaaacattttgggggccaggggccgtggctcatgcctataatccctataattttgggaggccaagcctggctaatcacttgagcccaggaatttgagaacagcctgggcaatatggcaaaatctatctctacaaaaaatacaaaaattagctgggatggggcatgcacctgtagtctcaactgcttgggaggctggctgaggtgggaggatcggatccattgcctgagcctgggagtttgaggctgcagtgagctatgactgtgccactgtactctagccttggtaagaccctgtctcaaaaacaaatacataagta

SEQ ID NO: 62204 - DNA, 2614 bp, Homo sapiens
  misc_feature (1667)..(1668): n is a, c, g, or t
ccccccgggggggggggtatccctttttttggggggcatagttttttgcactaacttcaggaaccagctcatgatctcaggatgtatggaaaaataatctttgtattactattgtcagcaattgtgagcatatcagcatcaagtaccactggtgtggcaatgcacacttcaacctcttcttcagtcacaaagagttacatctcatcacagacaaatgatacgcacaaacgggacacatatgcagccactcctagagctcatgaagtttcagaaatttctgttagaactgtttaccctccagaagaggaaaccggagaaagggtacaacttgcccatcatttctctgaaccagagataacactcattatttttggggtgatggctggtgttattggaacgatcctcttaatttcttacggtattcgccgactgataaagaaaagcccatctgatgtaaaacctctcccctcacctgacacagacgtgcctttaagttctgttgaaatagaaaatccagagacaagtgatcaatgagaatctgttcaccaaaccaaatgtggaaagaacacaaagaagacataagacttcagtcaagtgaaaaattaacatgtggactggacactccaataaattatatacctgcctaagttgtacaatttcagaatgcaattttcattataatgagttccagtgactcaatgatggggaaaaaaatctctgctcattaatatttcaagataaagaacaaatgtttccttgaatgcttgcttttgtgtgttagcataatttttagaattgtttgagaattctgatccaaaactttagttgaattcatctacgtttgtttaatattaacttaacctattctattgtattataatgatgattctgtcaaatgaaaggcttgaaatacctagatgaagtttagattttcttcctattgtaaacttttgagtctggtttcattgttttaaataaattaaggggacactaaagtcctatcattcatttccttcattgctgaacaggcaagatataatattacatgaatgattactatattttgttcacactaataaagcttatgctcagaaatgccatacacacacacaaacacacacatttatcatttaatgcataaatcaacacaaaaggttttcccattaatatgaaatattacatatatataagtgccatatttaaaataatttgtctaacagtagaactatgtcggagcactcactgaagcttgcattccactgaaagagttatttgtgtaagtagagtatccggagaaggaaaagaacttacgacctttctttataacagaaactcaactctaaattcaacaagatgtgcaaaccggacatgcaggtgaatattttaataggttactataaggttctcaattaaattctttaatctgtccagtcccagtttctcttattaataaaactttggaaattgctttaaaccatttaaaggaaatttctagatatagaaactaaggactgtgactatacagctgtcactcatttgtagtaaaacttaaaaagcaaaaacaaaaaacaaaaaagaccttcctgtgatactttatttccgaactaataaaaatctatatgactttttattattgtgtgataaccaagtaaatgttttctattttnnatattttcaggcatggtaacagaaatttaccttttaataaattaaaaaatctaaattttaacctacttgtatgttcggagagtgtttttgtactatattgactacttaaaatagagaatgagactaagaagggaacatttctgttgatacatgttttttaaaagtaatttttaagagcattattaggttaatttaatccaattaatgacccaaatgccaaggtaattttaaatttacatttttaataaaagcaacatgttgaaacaagagagggtgagattaacctttttgctaaagtaatttacaagtcaaagacaggaagagatcagagtgaatgtgccttcttaaccagagctacagaatttagtgaataattaaagtacaaactgctttgacctccttgaacttttccaagcaatttctctgtacttctatatatgaatgtcttagccaattttctgctactataacagaatacgacagactgggtaatttaaaaagaaaagaaatttattttcttcctagttctggaggctgggaaggcgaagggcatggcactgacatctgccttgtaactgatgagaaccttcttactgcatgataacaaagcagcaaggcaagcaaaagcgtaagatgaagagagaggaaatgaagccaaacacatcctttcatcagaagcccattccctctataaggcgttactacatttatgagaatggagtcctcatgacctaatcgtgaccttaaaggcccctcccaacactgttacaatggcaattaaatttcaacaaaggttccagaggtgacattcgaatcagcaatgaaattttcatagttaaatttggtattcgtgggggaagaaatgaccatttcccttgtatttttataattaaatcagcaaaatattgtaataaagaaatctttcctgtgaagataccatgacccc

SEQ ID NO: 62205 - DNA, 582 bp, Homo sapiens
aaggtgggcctggaagataacagctagtaggctaaggtcagacactgacacttgcagttgtctttggtagttttttgcactaacttcaggaaccagctcatgatctcaggatgtatggaaaaataatctttgtattactattgtcagaaattgtgagcatatcagcattaagtaccactgaggtggcaatgcacacttcaacctcttcttcagtcacaaagagttacatctcatcacagacaaatggagaaacgggacaacttgtccatcgtttcactgtaccagctcctgtagtgataatactcattattttgtgtgtgatggctggtattattggaacgatcctcttaatttcttacagtattcgccgactgataaaggcatgaggatgtggcctgcatgctgcctgatcttgcctagaaccggctgcacctgctgttctcttgtttatgcaaactggctgcacctgctattcctttgcttatgcccctacccctggctatcctaattccctgttctcctgcctcactattactgtattctctacttctaaataaaaataaaacaaaatacaaaccgttt

SEQ ID NO: 62206 - DNA, 1747 bp, Homo sapiens
aaggtgggcctggaagataacagctagtaggctaaggtcagacactgacacttgcagttgtctttggtagttttttgcactaacttcaggaaccagctcatgatctcaggatgtatggaaaaataatctttgtattactattgtcagcaattgtgagcatatcagcatcaagtaccactggtgtggcaatgcacacttcaacctcttcttcagtcacaaagagttacatctcatcacagacaaatgggataacactcattaattggtgggcgatggctcgtgttatttttgaggtgatgcttgttgttgttggaatgatcatcttaatttcttactgtattcgatgactgataaaggttttcatgcctctgggattgagattagaggaagaaagcaaagaaaggacatttttttacttcactgttcatggtgtaattgtgtgcctgacggctgtagctactaacttggcttacgttgactggctactaagggactctaggagtcagaaactaaatgctgagtctctcaaaggcgtagagagaatttcagagggccttaccatgacatgaggattaaactccagttctgcccgattctcatcacgaaatccttatcccatgcctcattgtgtttggtgtccccttgcctaggggacagtcctcctgggtaagatcagcaagataactcttcagtcacattccatttgatactttgaatactctggggtccttacccaccaaatggatggaattcagctgctcaatcactgcctttctcagaactcggttgtccaaccacaattccctttcccttaggatagggctatattggcaaaatgccgcccgaacagactgctgacagtaaaccaaatattagtttctctcaccttcttgaaggcatttacagtctttgtaagcttttctcctagattttccctttcctgttcctgcttagattctaagaatgaagtgcatccttctccttttcttcattaggtgaagtgggatttacccattaccatatattcaccaccaggtcactgacgagagactccagtgaatcgctttccctctgcattcctctccttgtacagactagagggtcacattgtgtaaagcctaacatagccctgcaaagagatctggccccagcagtgaacacaaactcagtaattctctttagagtgaggtggtaatcagtgcctcttggtttcagccgtggtcctagtggctacttatggaagaataggaatagtttcacaacatcctgtaacattggcttacctgtatattatatgccacccgtaaccataaaaacaccaggatttaggttccttgaaggtaatgactatgggtccctctctgtggaagaatactgaatagaagagagaaatcactcaatatgtggaatgactgatatggtttggctgtgttcccactcaaatctcatcttgaattgtagttccaataatccccacatgtcatgggaggaacccagtgggaggtacttgaatcattgcggtggtttcccctgtgctattctcatgatagtgagtaaattctcacataatctgatagttttataaaggagcttcccccttcactcagctctcattcttctccttcctgccactatgtaagaaagatgtgtttgtttcccctttggtcatgattgtaagtatcctgagaccttcccagccatgcaaaactgtagatcaataaaacctctttcctttataaattacaca

SEQ ID NO: 62207 - DNA, 1766 bp, Homo sapiens
aaggtgggcctggaagataacagctagtaggctaaggtcagacactgacacttgcagttgtctttggtagttttttgcactaacttcaggaaccagctcatgatctcaggatgtatggaaaaataatctttgtattactattgtcaggtaagtgattttatttcatcaattgtgagcatatcagcatcaagtaccactggtgtggcaatgcacacttcaacctcttcttcagtcacaaagagttacatctcatcacagacaaatgggataacactcattaattggtgggcgatggctcgtgttatttttgaggtgatgcttgttgttgttggaatgatcatcttaatttcttactgtattcgatgactgataaaggttttcatgcctctgggattgagattagaggaagaaagcaaagaaaggacatttttttacttcactgttcatggtgtaattgtgtgcctgacggctgtagctactaacttggcttacgttgactggctactaagggactctaggagtcagaaactaaatgctgagtctctcaaaggcgtagagagaatttcagagggccttaccatgacatgaggattaaactccagttctgcccgattctcatcacgaaatccttatcccatgcctcattgtgtttggtgtccccttgcctaggggacagtcctcctgggtaagatcagcaagataactcttcagtcacattccatttgatactttgaatactctggggtccttacccaccaaatggatggaattcagctgctcaatcactgcctttctcagaactcggttgtccaaccacaattccctttcccttaggatagggctatattggcaaaatgccgcccgaacagactgctgacagtaaaccaaatattagtttctctcaccttcttgaaggcatttacagtctttgtaagcttttctcctagattttccctttcctgttcctgcttagattctaagaatgaagtgcatccttctccttttcttcattaggtgaagtgggatttacccattaccatatattcaccaccaggtcactgacgagagactccagtgaatcgctttccctctgcattcctctccttgtacagactagagggtcacattgtgtaaagcctaacatagccctgcaaagagatctggccccagcagtgaacacaaactcagtaattctctttagagtgaggtggtaatcagtgcctcttggtttcagccgtggtcctagtggctacttatggaagaataggaatagtttcacaacatcctgtaacattggcttacctgtatattatatgccacccgtaaccataaaaacaccaggatttaggttccttgaaggtaatgactatgggtccctctctgtggaagaatactgaatagaagagagaaatcactcaatatgtggaatgactgatatggtttggctgtgttcccactcaaatctcatcttgaattgtagttccaataatccccacatgtcatgggaggaacccagtgggaggtacttgaatcattgcggtggtttcccctgtgctattctcatgatagtgagtaaattctcacataatctgatagttttataaaggagcttcccccttcactcagctctcattcttctccttcctgccactatgtaagaaagatgtgtttgtttcccctttggtcatgattgtaagtatcctgagaccttcccagccatgcaaaactgtagatcaataaaacctctttcctttataaattacaca

SEQ ID NO: 62208 - DNA, 665 bp, Homo sapiens
aaggtgggcctggaagataacagctagtaggctaaggtcagacactgacacttgcagttgtctttggtagttttttgcactaacttcaggaaccagctcatgatctcaggatgtatggaaaaataatctttgtattactattgtcaggagatggagccaaccctgaaaattctgggagaagaggacagaaggcagagggaagagcaagagcaaaaattctgaaacaggagaaattgtgagcatatcagcattaagtaccactgaggtggcaatgcacacttcaacctcttcttcagtcacaaagagttacatctcatcacagacaaatggagaaacgggacaacttgtccatcgtttcactgtaccagctcctgtagtgataatactcattattttgtgtgtgatggctggtattattggaacgatcctcttaatttcttacagtattcgccgactgataaaggcatgaggatgtggcctgcatgctgcctgatcttgcctagaaccggctgcacctgctgttctcttgtttatgcaaactggctgcacctgctattcctttgcttatgcccctacccctggctatcctaattccctgttctcctgcctcactattactgtattctctacttctaaataaaaataaaacaaaatacaaaccgttt

SEQ ID NO: 62209 - DNA, 2555 bp, Homo sapiens
  misc_feature (1608)..(1609): n is a, c, g, or t
aaggtgggcctggaagataacagctagtaggctaaggtcagacactgacacttgcagttgtctttggtagttttttgcactaacttcaggaaccagctcatgatctcaggatgtatggaaaaataatctttgtattactattgtcagaaattgtgagcatatcagcattaagtaccactgaggtggcaatgcacacttcaacctcttcttcagtcacaaagagttacatctcatcacagacaaatgagaaagggtacaacttgcccatcatttctctgaaccagctcctgtagtgataatactcattattttgtgtgtgatggctggtattattggaacgatcctcttaatttcttacagtattcgccgactgataaagaaaagcccatctgatgtaaaacctctcccctcacctgacacagacgtgcctttaagttctgttgaaatagaaaatccagagacaagtgatcaatgagaatctgttcaccaaaccaaatgtggaaagaacacaaagaagacataagacttcagtcaagtgaaaaattaacatgtggactggacactccaataaattatatacctgcctaagttgtacaatttcagaatgcaattttcattataatgagttccagtgactcaatgatggggaaaaaaatctctgctcattaatatttcaagataaagaacaaatgtttccttgaatgcttgcttttgtgtgttagcataatttttagaattgtttgagaattctgatccaaaactttagttgaattcatctacgtttgtttaatattaacttaacctattctattgtattataatgatgattctgtcaaatgaaaggcttgaaatacctagatgaagtttagattttcttcctattgtaaacttttgagtctggtttcattgttttaaataaattaaggggacactaaagtcctatcattcatttccttcattgctgaacaggcaagatataatattacatgaatgattactatattttgttcacactaataaagcttatgctcagaaatgccatacacacacacaaacacacacatttatcatttaatgcataaatcaacacaaaaggttttcccattaatatgaaatattacatatatataagtgccatatttaaaataatttgtctaacagtagaactatgtcggagcactcactgaagcttgcattccactgaaagagttatttgtgtaagtagagtatccggagaaggaaaagaacttacgacctttctttataacagaaactcaactctaaattcaacaagatgtgcaaaccggacatgcaggtgaatattttaataggttactataaggttctcaattaaattctttaatctgtccagtcccagtttctcttattaataaaactttggaaattgctttaaaccatttaaaggaaatttctagatatagaaactaaggactgtgactatacagctgtcactcatttgtagtaaaacttaaaaagcaaaaacaaaaaacaaaaaagaccttcctgtgatactttatttccgaactaataaaaatctatatgactttttattattgtgtgataaccaagtaaatgttttctattttnnatattttcaggcatggtaacagaaatttaccttttaataaattaaaaaatctaaattttaacctacttgtatgttcggagagtgtttttgtactatattgactacttaaaatagagaatgagactaagaagggaacatttctgttgatacatgttttttaaaagtaatttttaagagcattattaggttaatttaatccaattaatgacccaaatgccaaggtaattttaaatttacatttttaataaaagcaacatgttgaaacaagagagggtgagattaacctttttgctaaagtaatttacaagtcaaagacaggaagagatcagagtgaatgtgccttcttaaccagagctacagaatttagtgaataattaaagtacaaactgctttgacctccttgaacttttccaagcaatttctctgtacttctatatatgaatgtcttagccaattttctgctactataacagaatacgacagactgggtaatttaaaaagaaaagaaatttattttcttcctagttctggaggctgggaaggcgaagggcatggcactgacatctgccttgtaactgatgagaaccttcttactgcatgataacaaagcagcaaggcaagcaaaagcgtaagatgaagagagaggaaatgaagccaaacacatcctttcatcagaagcccattccctctataaggcgttactacatttatgagaatggagtcctcatgacctaatcgtgaccttaaaggcccctcccaacactgttacaatggcaattaaatttcaacaaaggttccagaggtgacattcgaatcagcaatgaaattttcatagttaaatttggtattcgtgggggaagaaatgaccatttcccttgtatttttataattaaatcagcaaaatattgtaataaagaaatctttcctgtgaagataccatgacccc

SEQ ID NO: 62210 - DNA, 2612 bp, Homo sapiens
  misc_feature (1665)..(1666): n is a, c, g, or t
aaggtgggcctggaagataacagctagtaggctaaggtcagacactgacacttgcagttgtctttggtagttttttgcactaacttcaggaaccagctcatgatctcaggatgtatggaaaaataatctttgtattactattgtcagaaattgtgagcatatcagcattaagtaccactgaggtggcaatgcacacttcaacctcttcttcagtcacaaagagttacatctcatcacagacaaatgatacgcacaaacgggacacatatgcagccactcctagagctcatgaagtttcagaaatttctgttagaactgtttaccctccagaagaggaaaccctcctgtagtgataatactcattattttgtgtgtgatggctggtattattggaacgatcctcttaatttcttacagtattcgccgactgataaagaaaagcccatctgatgtaaaacctctcccctcacctgacacagacgtgcctttaagttctgttgaaatagaaaatccagagacaagtgatcaatgagaatctgttcaccaaaccaaatgtggaaagaacacaaagaagacataagacttcagtcaagtgaaaaattaacatgtggactggacactccaataaattatatacctgcctaagttgtacaatttcagaatgcaattttcattataatgagttccagtgactcaatgatggggaaaaaaatctctgctcattaatatttcaagataaagaacaaatgtttccttgaatgcttgcttttgtgtgttagcataatttttagaattgtttgagaattctgatccaaaactttagttgaattcatctacgtttgtttaatattaacttaacctattctattgtattataatgatgattctgtcaaatgaaaggcttgaaatacctagatgaagtttagattttcttcctattgtaaacttttgagtctggtttcattgttttaaataaattaaggggacactaaagtcctatcattcatttccttcattgctgaacaggcaagatataatattacatgaatgattactatattttgttcacactaataaagcttatgctcagaaatgccatacacacacacaaacacacacatttatcatttaatgcataaatcaacacaaaaggttttcccattaatatgaaatattacatatatataagtgccatatttaaaataatttgtctaacagtagaactatgtcggagcactcactgaagcttgcattccactgaaagagttatttgtgtaagtagagtatccggagaaggaaaagaacttacgacctttctttataacagaaactcaactctaaattcaacaagatgtgcaaaccggacatgcaggtgaatattttaataggttactataaggttctcaattaaattctttaatctgtccagtcccagtttctcttattaataaaactttggaaattgctttaaaccatttaaaggaaatttctagatatagaaactaaggactgtgactatacagctgtcactcatttgtagtaaaacttaaaaagcaaaaacaaaaaacaaaaaagaccttcctgtgatactttatttccgaactaataaaaatctatatgactttttattattgtgtgataaccaagtaaatgttttctattttnnatattttcaggcatggtaacagaaatttaccttttaataaattaaaaaatctaaattttaacctacttgtatgttcggagagtgtttttgtactatattgactacttaaaatagagaatgagactaagaagggaacatttctgttgatacatgttttttaaaagtaatttttaagagcattattaggttaatttaatccaattaatgacccaaatgccaaggtaattttaaatttacatttttaataaaagcaacatgttgaaacaagagagggtgagattaacctttttgctaaagtaatttacaagtcaaagacaggaagagatcagagtgaatgtgccttcttaaccagagctacagaatttagtgaataattaaagtacaaactgctttgacctccttgaacttttccaagcaatttctctgtacttctatatatgaatgtcttagccaattttctgctactataacagaatacgacagactgggtaatttaaaaagaaaagaaatttattttcttcctagttctggaggctgggaaggcgaagggcatggcactgacatctgccttgtaactgatgagaaccttcttactgcatgataacaaagcagcaaggcaagcaaaagcgtaagatgaagagagaggaaatgaagccaaacacatcctttcatcagaagcccattccctctataaggcgttactacatttatgagaatggagtcctcatgacctaatcgtgaccttaaaggcccctcccaacactgttacaatggcaattaaatttcaacaaaggttccagaggtgacattcgaatcagcaatgaaattttcatagttaaatttggtattcgtgggggaagaaatgaccatttcccttgtatttttataattaaatcagcaaaatattgtaataaagaaatctttcctgtgaagataccatgacccc

SEQ ID NO: 62211 - DNA, 1111 bp, Homo sapiens
aaggtgggcctggaagataacagctagtaggctaaggtcagacactgacacttgcagttgtctttggtagttttttgcactaacttcaggaaccagctcatgatctcaggatgtatggaaaaataatctttgtattactattgtcagcaattgtgagcatatcagcatcaagtaccactggtgtggcaatgcacacttcaacctcttcttcagtcacaaagagttacatctcatcacagacaaatgatacgcacaaacgggacacatatgcagccactcctagagctcatgaagtttcagaaatttctgttagaactgtttaccctccagaagaggaaaccggagaaagggtacaacttgcccatcatttctctgaaccagagataacactcattatttttggggtgatgcttgttgttgttggaatgatcatcttaatttcttactgtattcgatgactgataaaggtgagaattcagtttttaattttgctctaaataccagtgtgaacagctctcggagggtttattcctctgagttcagttaaactcaaaagagaaacagaactgcataaaattccatctttttcaactggacacatagaagtcactgtgtttctctagcataatttattttttgcatttgcccaattaaagggagcctctaaatataaatctgtcccccattttcccaatgaaagctctccctaagtttttgtctaacttgctttcacatattttgatggatattgaggaaatattaagatgctacttatagtatttaccctattagtgaataaaatgtttaaaataatatatttacatatgtttaaaactttgggggaggccaaggcaggaggattgtttgagctcaggagtttgagaccagcctgagcaaaaaggtgaaacctagtctatacaaaaaatatgaaaattagaaaggcgtggtggtgcacacgtgtagtatcagccactcagggggctgaagtgggaggattgcttcagcctgggaaataaaggctgcagtgaactgtgatcatgctactgcactccagcttgggcaacagagaccctgtctcaataaatatataaataaataaataaaaataaac

SEQ ID NO: 62212 - DNA, 706 bp, Homo sapiens
aaggtgggcctggaagataacagctagtaggctaaggtcagacactgacacttgcagttgtctttggtagttttttgcactaacttcaggaaccagctcatgatctcaggatgtatggaaaaataatctttgtattactattgtcaggaaactttgagcattcagctgaggggccaagttggctgcctctgagaagaagcccttccacctccactccactgcacttgggtgccattcccctcatttgaatgtctccaagagatgagcaaagaaattgtgagcatatcagcattaagtaccactgaggtggcaatgcacacttcaacctcttcttcagtcacaaagagttacatctcatcacagacaaatggagaaacgggacaacttgtccatcgtttcactgtaccagctcctgtagtgataatactcattattttgtgtgtgatggctggtattattggaacgatcctcttaatttcttacagtattcgccgactgataaaggcatgaggatgtggcctgcatgctgcctgatcttgcctagaaccggctgcacctgctgttctcttgtttatgcaaactggctgcacctgctattcctttgcttatgcccctacccctggctatcctaattccctgttctcctgcctcactattactgtattctctacttctaaataaaaataaaacaaaatacaaaccgttt

SEQ ID NO: 62213 - DNA, 487 bp, Homo sapiens
aaggtgggcctggaagataacagctagtaggctaaggtcagacactgacacttgcagttgtctttggtagttttttgcactaacttcaggaaccagctcatgatctcaggatgtatggaaaaataatctttgtattactattgtcagaaattgtgagcatatcagcattaagtaccactgaggtggcaatgcacacttcaacctcttcttcagtcacaaagagttacatctcatcacagacaaatggagaaacgggacaacttgtccatcgtttcactgtaccaggcatgaggatgtggcctgcatgctgcctgatcttgcctagaaccggctgcacctgctgttctcttgtttatgcaaactggctgcacctgctattcctttgcttatgcccctacccctggctatcctaattccctgttctcctgcctcactattactgtattctctacttctaaataaaaataaaacaaaatacaaaccgttt

SEQ ID NO: 62214 - DNA, 1019 bp, Homo sapiens
aaggtgggcctggaagataacagctagtaggctaaggtcagacactgacacttgcagttgtctttggtagttttttgcactaacttcaggaaccagctcatgatctcaggatgtatggaaaaataatctttgtattactattgtcaggtaagtgattttatttcatcaattgtgagcatatcagcatcaagtaccactggtgtggcaatgcacacttcaacctcttcttcagtcacaaagagttacatctcatcacagacaaatgggataacactcattaattggtgggcgatggctcgtgttatttttgaggtgatgcttgttgttgttggaatgatcatcttaatttcttactgtattcgatgactgataaaggtgagaattcagtttttaattttgctctaaataccagtgtgaacagctctcggagggtttattcctctgagttcagttaaactcaaaagagaaacagaactgcataaaattccatctttttcaactggacacatagaagtcactgtgtttctctagcataatttattttttgcatttgcccaattaaagggagcctctaaatataaatctgtcccccattttcccaatgaaagctctccctaagtttttgtctaacttgctttcacatattttgatggatattgaggaaatattaagatgctacttatagtatttaccctattagtgaataaaatgtttaaaataatatatttacatatgtttaaaactttgggggaggccaaggcaggaggattgtttgagctcaggagtttgagaccagcctgagcaaaaaggtgaaacctagtctatacaaaaaatatgaaaattagaaaggcgtggtggtgcacacgtgtagtatcagccactcagggggctgaagtgggaggattgcttcagcctgggaaataaaggctgcagtgaactgtgatcatgctactgcactccagcttgggcaacagagaccctgtctcaataaatatataaataaataaataaaaataaac

SEQ ID NO: 62215 - DNA, 791 bp, Homo sapiens
aaggtgggcctggaagataacagctagtaggctaaggtcagacactgacacttgcagttgtctttggtagttttttgcactaacttcaggaaccagctcatgatctcaggatgtatggaaaaataatctttgtattactattgtcagaaattgtgagcatatcagcattaagtaccactgaggtggcaatgcacacttcaacctcttcttcagtcacaaagagttacatctcatcacagacaaatggagaaacgggacaacttgtccatcgtttcactgtaccaggtatgttaatatttgacaaagaataaaagtcattccattttaaactatccattgcttgtttcaaatgcctaagaaaatgtgtctatcttaaaacagaagagcatatgttgttaactttattcacacgaaattgtaaagacaaagaaaatattctctttttaaaattaaaataggcatttcttatttttaaaaacattttgggggccaggggccgtggctcatgcctataatccctataattttgggaggccaagcctggctaatcacttgagcccaggaatttgagaacagcctgggcaatatggcaaaatctatctctacaaaaaatacaaaaattagctgggatggggcatgcacctgtagtctcaactgcttgggaggctggctgaggtgggaggatcggatccattgcctgagcctgggagtttgaggctgcagtgagctatgactgtgccactgtactctagccttggtaagaccctgtctcaaaaacaaatacataagta

SEQ ID NO: 62216 - DNA, 2726 bp, Homo sapiens
  misc_feature (1779)..(1780): n is a, c, g, or t
aaggtgggcctggaagataacagctagtaggctaaggtcagacactgacacttgcagttgtctttggtagttttttgcactaacttcaggaaccagctcatgatctcaggatgtatggaaaaataatctttgtattactattgtcaggagatggagccaaccctgaaaattctgggagaagaggacagaaggcagagggaagagcaagagcaaaaattctgaaacaggagaaattgtgagcatatcagcattaagtaccactgaggtggcaatgcacacttcaacctcttcttcagtcacaaagagttacatctcatcacagacaaatgatacgcacaaacgggacacatatgcagccactcctagagctcatgaagtttcagaaatttctgttagaactgtttaccctccagaagaggaaaccggagaaagggtacaacttgcccatcatttctctgaaccagagataacactcattatttttggggtgatggctggtgttattggaacgatcctcttaatttcttacggtattcgccgactgataaagaaaagcccatctgatgtaaaacctctcccctcacctgacacagacgtgcctttaagttctgttgaaatagaaaatccagagacaagtgatcaatgagaatctgttcaccaaaccaaatgtggaaagaacacaaagaagacataagacttcagtcaagtgaaaaattaacatgtggactggacactccaataaattatatacctgcctaagttgtacaatttcagaatgcaattttcattataatgagttccagtgactcaatgatggggaaaaaaatctctgctcattaatatttcaagataaagaacaaatgtttccttgaatgcttgcttttgtgtgttagcataatttttagaattgtttgagaattctgatccaaaactttagttgaattcatctacgtttgtttaatattaacttaacctattctattgtattataatgatgattctgtcaaatgaaaggcttgaaatacctagatgaagtttagattttcttcctattgtaaacttttgagtctggtttcattgttttaaataaattaaggggacactaaagtcctatcattcatttccttcattgctgaacaggcaagatataatattacatgaatgattactatattttgttcacactaataaagcttatgctcagaaatgccatacacacacacaaacacacacatttatcatttaatgcataaatcaacacaaaaggttttcccattaatatgaaatattacatatatataagtgccatatttaaaataatttgtctaacagtagaactatgtcggagcactcactgaagcttgcattccactgaaagagttatttgtgtaagtagagtatccggagaaggaaaagaacttacgacctttctttataacagaaactcaactctaaattcaacaagatgtgcaaaccggacatgcaggtgaatattttaataggttactataaggttctcaattaaattctttaatctgtccagtcccagtttctcttattaataaaactttggaaattgctttaaaccatttaaaggaaatttctagatatagaaactaaggactgtgactatacagctgtcactcatttgtagtaaaacttaaaaagcaaaaacaaaaaacaaaaaagaccttcctgtgatactttatttccgaactaataaaaatctatatgactttttattattgtgtgataaccaagtaaatgttttctattttnnatattttcaggcatggtaacagaaatttaccttttaataaattaaaaaatctaaattttaacctacttgtatgttcggagagtgtttttgtactatattgactacttaaaatagagaatgagactaagaagggaacatttctgttgatacatgttttttaaaagtaatttttaagagcattattaggttaatttaatccaattaatgacccaaatgccaaggtaattttaaatttacatttttaataaaagcaacatgttgaaacaagagagggtgagattaacctttttgctaaagtaatttacaagtcaaagacaggaagagatcagagtgaatgtgccttcttaaccagagctacagaatttagtgaataattaaagtacaaactgctttgacctccttgaacttttccaagcaatttctctgtacttctatatatgaatgtcttagccaattttctgctactataacagaatacgacagactgggtaatttaaaaagaaaagaaatttattttcttcctagttctggaggctgggaaggcgaagggcatggcactgacatctgccttgtaactgatgagaaccttcttactgcatgataacaaagcagcaaggcaagcaaaagcgtaagatgaagagagaggaaatgaagccaaacacatcctttcatcagaagcccattccctctataaggcgttactacatttatgagaatggagtcctcatgacctaatcgtgaccttaaaggcccctcccaacactgttacaatggcaattaaatttcaacaaaggttccagaggtgacattcgaatcagcaatgaaattttcatagttaaatttggtattcgtgggggaagaaatgaccatttcccttgtatttttataattaaatcagcaaaatattgtaataaagaaatctttcctgtgaagataccatgacccc

SEQ ID NO: 62217 - DNA, 2544 bp, Homo sapiens
  misc_feature (1597)..(1598): n is a, c, g, or t
aaggtgggcctggaagataacagctagtaggctaaggtcagacactgacacttgcagttgtctttggtagttttttgcactaacttcaggaaccagctcatgatctcaggatgtatggaaaaataatctttgtattactattgtcagatacgcacaaacgggacacatatgcagccactcctagagctcatgaagtttcagaaatttctgttagaactgtttaccctccagaagaggaaaccggagaaagggtacaacttgcccatcatttctctgaaccagagataacactcattatttttggggtgatggctggtgttattggaacgatcctcttaatttcttacggtattcgccgactgataaagaaaagcccatctgatgtaaaacctctcccctcacctgacacagacgtgcctttaagttctgttgaaatagaaaatccagagacaagtgatcaatgagaatctgttcaccaaaccaaatgtggaaagaacacaaagaagacataagacttcagtcaagtgaaaaattaacatgtggactggacactccaataaattatatacctgcctaagttgtacaatttcagaatgcaattttcattataatgagttccagtgactcaatgatggggaaaaaaatctctgctcattaatatttcaagataaagaacaaatgtttccttgaatgcttgcttttgtgtgttagcataatttttagaattgtttgagaattctgatccaaaactttagttgaattcatctacgtttgtttaatattaacttaacctattctattgtattataatgatgattctgtcaaatgaaaggcttgaaatacctagatgaagtttagattttcttcctattgtaaacttttgagtctggtttcattgttttaaataaattaaggggacactaaagtcctatcattcatttccttcattgctgaacaggcaagatataatattacatgaatgattactatattttgttcacactaataaagcttatgctcagaaatgccatacacacacacaaacacacacatttatcatttaatgcataaatcaacacaaaaggttttcccattaatatgaaatattacatatatataagtgccatatttaaaataatttgtctaacagtagaactatgtcggagcactcactgaagcttgcattccactgaaagagttatttgtgtaagtagagtatccggagaaggaaaagaacttacgacctttctttataacagaaactcaactctaaattcaacaagatgtgcaaaccggacatgcaggtgaatattttaataggttactataaggttctcaattaaattctttaatctgtccagtcccagtttctcttattaataaaactttggaaattgctttaaaccatttaaaggaaatttctagatatagaaactaaggactgtgactatacagctgtcactcatttgtagtaaaacttaaaaagcaaaaacaaaaaacaaaaaagaccttcctgtgatactttatttccgaactaataaaaatctatatgactttttattattgtgtgataaccaagtaaatgttttctattttnnatattttcaggcatggtaacagaaatttaccttttaataaattaaaaaatctaaattttaacctacttgtatgttcggagagtgtttttgtactatattgactacttaaaatagagaatgagactaagaagggaacatttctgttgatacatgttttttaaaagtaatttttaagagcattattaggttaatttaatccaattaatgacccaaatgccaaggtaattttaaatttacatttttaataaaagcaacatgttgaaacaagagagggtgagattaacctttttgctaaagtaatttacaagtcaaagacaggaagagatcagagtgaatgtgccttcttaaccagagctacagaatttagtgaataattaaagtacaaactgctttgacctccttgaacttttccaagcaatttctctgtacttctatatatgaatgtcttagccaattttctgctactataacagaatacgacagactgggtaatttaaaaagaaaagaaatttattttcttcctagttctggaggctgggaaggcgaagggcatggcactgacatctgccttgtaactgatgagaaccttcttactgcatgataacaaagcagcaaggcaagcaaaagcgtaagatgaagagagaggaaatgaagccaaacacatcctttcatcagaagcccattccctctataaggcgttactacatttatgagaatggagtcctcatgacctaatcgtgaccttaaaggcccctcccaacactgttacaatggcaattaaatttcaacaaaggttccagaggtgacattcgaatcagcaatgaaattttcatagttaaatttggtattcgtgggggaagaaatgaccatttcccttgtatttttataattaaatcagcaaaatattgtaataaagaaatctttcctgtgaagataccatgacccc

SEQ ID NO: 62218 - DNA, 483 bp, Homo sapiens
aaggtgggcctggaagataacagctagtaggctaaggtcagacactgacacttgcagttgtctttggtagttttttgcactaacttcaggaaccagctcatgatctcaggatgtatggaaaaataatctttgtattactattgtcaggagaaacgggacaacttgtccatcgtttcactgtaccagctcctgtagtgataatactcattattttgtgtgtgatggctggtattattggaacgatcctcttaatttcttacagtattcgccgactgataaaggcatgaggatgtggcctgcatgctgcctgatcttgcctagaaccggctgcacctgctgttctcttgtttatgcaaactggctgcacctgctattcctttgcttatgcccctacccctggctatcctaattccctgttctcctgcctcactattactgtattctctacttctaaataaaaataaaacaaaatacaaaccgttt

SEQ ID NO: 62219 - DNA, 468 bp, Homo sapiens
aaggtgggcctggaagataacagctagtaggctaaggtcagacactgacacttgcagttgtctttggtagttttttgcactaacttcaggaaccagctcatgatctcaggatgtatggaaaaataatctttgtattactattgtcagttgtcccagcaccatttgttgaagagactatcctttgcccattgaatggtcttgacacccttcttgaaagttaattggccatggatatatgagtttatttctggagtctcaattctatccgaagaatatgtctgttcttggggcaaaatcacacagattttattgctgttacttggttataagttttgcattcatgaagtatgattcaccaaactgtgttcttcttcaagattgttttggctatttagatccctaataatttcacagaaattttaggattaggttttccattcttgcaaaaaaattatgcgcattttaact

SEQ ID NO: 62220 - DNA, 2643 bp, Homo sapiens
  misc_feature (1696)..(1697): n is a, c, g, or t
aaggtgggcctggaagataacagctagtaggctaaggtcagacactgacacttgcagttgtctttggtagttttttgcactaacttcaggaaccagctcatgatctcaggatgtatggaaaaataatctttgtattactattgtcagcaattgtgagcatatcagcatcaagtaccactggtgtggcaatgcacacttcaacctcttcttcagtcacaaagagttacatctcatcacagacaaatgatacgcacaaacgggacacatatgcagccactcctagagctcatgaagtttcagaaatttctgttagaactgtttaccctccagaagaggaaaccggagaaagggtacaacttgcccatcatttctctgaaccagagataacactcattatttttggggtgatggctggtgttattggaacgatcctcttaatttcttacggtattcgccgactgataaagaaaagcccatctgatgtaaaacctctcccctcacctgacacagacgtgcctttaagttctgttgaaatagaaaatccagagacaagtgatcaatgagaatctgttcaccaaaccaaatgtggaaagaacacaaagaagacataagacttcagtcaagtgaaaaattaacatgtggactggacactccaataaattatatacctgcctaagttgtacaatttcagaatgcaattttcattataatgagttccagtgactcaatgatggggaaaaaaatctctgctcattaatatttcaagataaagaacaaatgtttccttgaatgcttgcttttgtgtgttagcataatttttagaattgtttgagaattctgatccaaaactttagttgaattcatctacgtttgtttaatattaacttaacctattctattgtattataatgatgattctgtcaaatgaaaggcttgaaatacctagatgaagtttagattttcttcctattgtaaacttttgagtctggtttcattgttttaaataaattaaggggacactaaagtcctatcattcatttccttcattgctgaacaggcaagatataatattacatgaatgattactatattttgttcacactaataaagcttatgctcagaaatgccatacacacacacaaacacacacatttatcatttaatgcataaatcaacacaaaaggttttcccattaatatgaaatattacatatatataagtgccatatttaaaataatttgtctaacagtagaactatgtcggagcactcactgaagcttgcattccactgaaagagttatttgtgtaagtagagtatccggagaaggaaaagaacttacgacctttctttataacagaaactcaactctaaattcaacaagatgtgcaaaccggacatgcaggtgaatattttaataggttactataaggttctcaattaaattctttaatctgtccagtcccagtttctcttattaataaaactttggaaattgctttaaaccatttaaaggaaatttctagatatagaaactaaggactgtgactatacagctgtcactcatttgtagtaaaacttaaaaagcaaaaacaaaaaacaaaaaagaccttcctgtgatactttatttccgaactaataaaaatctatatgactttttattattgtgtgataaccaagtaaatgttttctattttnnatattttcaggcatggtaacagaaatttaccttttaataaattaaaaaatctaaattttaacctacttgtatgttcggagagtgtttttgtactatattgactacttaaaatagagaatgagactaagaagggaacatttctgttgatacatgttttttaaaagtaatttttaagagcattattaggttaatttaatccaattaatgacccaaatgccaaggtaattttaaatttacatttttaataaaagcaacatgttgaaacaagagagggtgagattaacctttttgctaaagtaatttacaagtcaaagacaggaagagatcagagtgaatgtgccttcttaaccagagctacagaatttagtgaataattaaagtacaaactgctttgacctccttgaacttttccaagcaatttctctgtacttctatatatgaatgtcttagccaattttctgctactataacagaatacgacagactgggtaatttaaaaagaaaagaaatttattttcttcctagttctggaggctgggaaggcgaagggcatggcactgacatctgccttgtaactgatgagaaccttcttactgcatgataacaaagcagcaaggcaagcaaaagcgtaagatgaagagagaggaaatgaagccaaacacatcctttcatcagaagcccattccctctataaggcgttactacatttatgagaatggagtcctcatgacctaatcgtgaccttaaaggcccctcccaacactgttacaatggcaattaaatttcaacaaaggttccagaggtgacattcgaatcagcaatgaaattttcatagttaaatttggtattcgtgggggaagaaatgaccatttcccttgtatttttataattaaatcagcaaaatattgtaataaagaaatctttcctgtgaagataccatgacccc

SEQ ID NO: 62221 - DNA, 1759 bp, Homo sapiens
  misc_feature (1696)..(1697): n is a, c, g, or t
aaggtgggcctggaagataacagctagtaggctaaggtcagacactgacacttgcagttgtctttggtagttttttgcactaacttcaggaaccagctcatgatctcaggatgtatggaaaaataatctttgtattactattgtcagcaattgtgagcatatcagcatcaagtaccactggtgtggcaatgcacacttcaacctcttcttcagtcacaaagagttacatctcatcacagacaaatgatacgcacaaacgggacacatatgcagccactcctagagctcatgaagtttcagaaatttctgttagaactgtttaccctccagaagaggaaaccggagaaagggtacaacttgcccatcatttctctgaaccagagataacactcattatttttggggtgatggctggtgttattggaacgatcctcttaatttcttacggtattcgccgactgataaagaaaagcccatctgatgtaaaacctctcccctcacctgacacagacgtgcctttaagttctgttgaaatagaaaatccagagacaagtgatcaatgagaatctgttcaccaaaccaaatgtggaaagaacacaaagaagacataagacttcagtcaagtgaaaaattaacatgtggactggacactccaataaattatatacctgcctaagttgtacaatttcagaatgcaattttcattataatgagttccagtgactcaatgatggggaaaaaaatctctgctcattaatatttcaagataaagaacaaatgtttccttgaatgcttgcttttgtgtgttagcataatttttagaattgtttgagaattctgatccaaaactttagttgaattcatctacgtttgtttaatattaacttaacctattctattgtattataatgatgattctgtcaaatgaaaggcttgaaatacctagatgaagtttagattttcttcctattgtaaacttttgagtctggtttcattgttttaaataaattaaggggacactaaagtcctatcattcatttccttcattgctgaacaggcaagatataatattacatgaatgattactatattttgttcacactaataaagcttatgctcagaaatgccatacacacacacaaacacacacatttatcatttaatgcataaatcaacacaaaaggttttcccattaatatgaaatattacatatatataagtgccatatttaaaataatttgtctaacagtagaactatgtcggagcactcactgaagcttgcattccactgaaagagttatttgtgtaagtagagtatccggagaaggaaaagaacttacgacctttctttataacagaaactcaactctaaattcaacaagatgtgcaaaccggacatgcaggtgaatattttaataggttactataaggttctcaattaaattctttaatctgtccagtcccagtttctcttattaataaaactttggaaattgctttaaaccatttaaaggaaatttctagatatagaaactaaggactgtgactatacagctgtcactcatttgtagtaaaacttaaaaagcaaaaacaaaaaacaaaaaagaccttcctgtgatactttatttccgaactaataaaaatctatatgactttttattattgtgtgataaccaagtaaatgttttctattttnnatattttcaggcatggtaacagaaatttaccttttaataaattaaaaaatctaaattttaac

SEQ ID NO: 62222 - DNA, 1858 bp, Homo sapiens
aaggtgggcctggaagataacagctagtaggctaaggtcagacactgacacttgcagttgtctttggtagttttttgcactaacttcaggaaccagctcatgatctcaggatgtatggaaaaataatctttgtattactattgtcagcaattgtgagcatatcagcatcaagtaccactggtgtggcaatgcacacttcaacctcttcttcagtcacaaagagttacatctcatcacagacaaatgatacgcacaaacgggacacatatgcagccactcctagagctcatgaagtttcagaaatttctgttagaactgtttaccctccagaagaggaaaccggagaaagggtacaacttgcccatcatttctctgaaccagagataacactcattatttttggggtgatgcttgttgttgttggaatgatcatcttaatttcttactgtattcgatgactgataaaggttttcatgcctctgggattgagattagaggaagaaagcaaagaaaggacatttttttacttcactgttcatggtgtaattgtgtgcctgacggctgtagctactaacttggcttacgttgactggctactaagggactctaggagtcagaaactaaatgctgagtctctcaaaggcgtagagagaatttcagagggccttaccatgacatgaggattaaactccagttctgcccgattctcatcacgaaatccttatcccatgcctcattgtgtttggtgtccccttgcctaggggacagtcctcctgggtaagatcagcaagataactcttcagtcacattccatttgatactttgaatactctggggtccttacccaccaaatggatggaattcagctgctcaatcactgcctttctcagaactcggttgtccaaccacaattccctttcccttaggatagggctatattggcaaaatgccgcccgaacagactgctgacagtaaaccaaatattagtttctctcaccttcttgaaggcatttacagtctttgtaagcttttctcctagattttccctttcctgttcctgcttagattctaagaatgaagtgcatccttctccttttcttcattaggtgaagtgggatttacccattaccatatattcaccaccaggtcactgacgagagactccagtgaatcgctttccctctgcattcctctccttgtacagactagagggtcacattgtgtaaagcctaacatagccctgcaaagagatctggccccagcagtgaacacaaactcagtaattctctttagagtgaggtggtaatcagtgcctcttggtttcagccgtggtcctagtggctacttatggaagaataggaatagtttcacaacatcctgtaacattggcttacctgtatattatatgccacccgtaaccataaaaacaccaggatttaggttccttgaaggtaatgactatgggtccctctctgtggaagaatactgaatagaagagagaaatcactcaatatgtggaatgactgatatggtttggctgtgttcccactcaaatctcatcttgaattgtagttccaataatccccacatgtcatgggaggaacccagtgggaggtacttgaatcattgcggtggtttcccctgtgctattctcatgatagtgagtaaattctcacataatctgatagttttataaaggagcttcccccttcactcagctctcattcttctccttcctgccactatgtaagaaagatgtgtttgtttcccctttggtcatgattgtaagtatcctgagaccttcccagccatgcaaaactgtagatcaataaaacctctttcctttataaattacaca

SEQ ID NO: 62223 - DNA, 2517 bp, Homo sapiens
  misc_feature (1570)..(1571): n is a, c, g, or t
aaggtgggcctggaagataacagctagtaggctaaggtcagacactgacacttgcagttgtctttggtagttttttgcactaacttcaggaaccagctcatgatctcaggatgtatggaaaaataatctttgtattactattgtcagaaattgtgagcatatcagcattaagtaccactgaggtggcaatgcacacttcaacctcttcttcagtcacaaagagttacatctcatcacagacaaatgctcctgtagtgataatactcattattttgtgtgtgatggctggtattattggaacgatcctcttaatttcttacagtattcgccgactgataaagaaaagcccatctgatgtaaaacctctcccctcacctgacacagacgtgcctttaagttctgttgaaatagaaaatccagagacaagtgatcaatgagaatctgttcaccaaaccaaatgtggaaagaacacaaagaagacataagacttcagtcaagtgaaaaattaacatgtggactggacactccaataaattatatacctgcctaagttgtacaatttcagaatgcaattttcattataatgagttccagtgactcaatgatggggaaaaaaatctctgctcattaatatttcaagataaagaacaaatgtttccttgaatgcttgcttttgtgtgttagcataatttttagaattgtttgagaattctgatccaaaactttagttgaattcatctacgtttgtttaatattaacttaacctattctattgtattataatgatgattctgtcaaatgaaaggcttgaaatacctagatgaagtttagattttcttcctattgtaaacttttgagtctggtttcattgttttaaataaattaaggggacactaaagtcctatcattcatttccttcattgctgaacaggcaagatataatattacatgaatgattactatattttgttcacactaataaagcttatgctcagaaatgccatacacacacacaaacacacacatttatcatttaatgcataaatcaacacaaaaggttttcccattaatatgaaatattacatatatataagtgccatatttaaaataatttgtctaacagtagaactatgtcggagcactcactgaagcttgcattccactgaaagagttatttgtgtaagtagagtatccggagaaggaaaagaacttacgacctttctttataacagaaactcaactctaaattcaacaagatgtgcaaaccggacatgcaggtgaatattttaataggttactataaggttctcaattaaattctttaatctgtccagtcccagtttctcttattaataaaactttggaaattgctttaaaccatttaaaggaaatttctagatatagaaactaaggactgtgactatacagctgtcactcatttgtagtaaaacttaaaaagcaaaaacaaaaaacaaaaaagaccttcctgtgatactttatttccgaactaataaaaatctatatgactttttattattgtgtgataaccaagtaaatgttttctattttnnatattttcaggcatggtaacagaaatttaccttttaataaattaaaaaatctaaattttaacctacttgtatgttcggagagtgtttttgtactatattgactacttaaaatagagaatgagactaagaagggaacatttctgttgatacatgttttttaaaagtaatttttaagagcattattaggttaatttaatccaattaatgacccaaatgccaaggtaattttaaatttacatttttaataaaagcaacatgttgaaacaagagagggtgagattaacctttttgctaaagtaatttacaagtcaaagacaggaagagatcagagtgaatgtgccttcttaaccagagctacagaatttagtgaataattaaagtacaaactgctttgacctccttgaacttttccaagcaatttctctgtacttctatatatgaatgtcttagccaattttctgctactataacagaatacgacagactgggtaatttaaaaagaaaagaaatttattttcttcctagttctggaggctgggaaggcgaagggcatggcactgacatctgccttgtaactgatgagaaccttcttactgcatgataacaaagcagcaaggcaagcaaaagcgtaagatgaagagagaggaaatgaagccaaacacatcctttcatcagaagcccattccctctataaggcgttactacatttatgagaatggagtcctcatgacctaatcgtgaccttaaaggcccctcccaacactgttacaatggcaattaaatttcaacaaaggttccagaggtgacattcgaatcagcaatgaaattttcatagttaaatttggtattcgtgggggaagaaatgaccatttcccttgtatttttataattaaatcagcaaaatattgtaataaagaaatctttcctgtgaagataccatgacccc

SEQ ID NO: 62224 - DNA, 557 bp, Homo sapiens
aaggtgggcctggaagataacagctagtaggctaaggtcagacactgacacttgcagttgtctttggtagttttttgcactaacttcaggaaccagctcatgatctcaggatgtatggaaaaataatctttgtattactattgtcagcaattgtgagcatatcagcatcaagtaccactggtgtggcaatgcacacttcaacctcttcttcagtcacaaagagttacatctcatcacagacaaatgggataacactcattaattggtgggcgatggctcgtgttatttttgaggtgatgcttgttgttgttggaatgatcatcttaatttcttactgtattcgatgactgataaaggcatgaggatgtggcctgcatgctgcctgatcttgcctagaaccagctgcacctgctgttctcttgcttatgcaaactggctgcacctgctattcctttgcttatgccccaacccttggctatcctaactccctgttctcctgcctattactgtattctctacttctaaataaaaataaaacaaaatacaaattatttgca

SEQ ID NO: 62225 - DNA, 435 bp, Homo sapiens
ggagaatggtgtggaaactgccctgtttttacatcaagataaaagcttcaggaagttactggagagtggaatgcaggggtcattctggataacacaaaataactatttgattagaccaaccatttggtctctaaaattgggtgctaaagacaaagataggaaattcaaaaaatcaccacctgtagaagaaaaatcagttaataatttgacagatttaagggcctcacctttctctcacagaactttacctcataacaccctgtttgggaaaattggaaaatatcttctccttacctcctaggggataaacaagagtttaaatgttgccaccaactcaaacaaaacacacctcattctttatgttctggagggagagggagtccttattttgcttcaaagtttcctttctggagcttcttttttttaagtaaaaaa

SEQ ID NO: 62226 - DNA, 242 bp, Homo sapiens
  misc_feature (2)..(5): n is a, c, g, or t
  misc_feature (130)..(130): n is a, c, g, or t
cnnnnaaactagttagtattctgatattctccatcacactcaaaactcaaatgttatgcctctgatacaaaggcaacatttcaagctgttgaagcctaaagctatcttgcaataagtttctttagcattnccagtctccaaattcatccctttttacttttgaaaaacaattacaaatgaatttcagttgaaggaataaacaaattcaaagtatacaaattacatttgctaaaatgaatgaa

SEQ ID NO: 62227 - DNA, 711 bp, Homo sapiens
attgattggctgtgagtgtactgaatgcatctcaactcagctgaggttcacctgtgttcagaaatccaggaaggagggcaatgttgttctcatggtggagagttgaagctcaaggagggagggactgacctaattacatgcacttaaagcacattaactcacattgtattggccaaagcaagttgcatggccaagtccaaagtcataggaaacagttgcaagggctgagagggaatgaatgattcttgatagataactcaatctaggacaaaaaatgaaggttgctgtgagctgcagaatgtgcctttggtttgatttacatatccccaaatcctagggagagaatcatttttgccaaactttatctttactgaatcttttccaacctccaggatcacaagtatacttcatgcattaaaaaccttcccaaagttcattatcttttaccactatgtgctgtgaattctgaggtagcctatgataatttctgtaagaaattacttcaggatgtcaaaaatcagattaaatatagaattaagctgggattttgaaatttaatacccatttttttgagaaaatcaagtatttcaaaggtcctaatactgacatttttagtaagccgtatagacacttccggtcttctttgatagctacaaattttagctccatttcaagagaaagaactctggaacctaagcctaaatatatcct

SEQ ID NO: 62228 - DNA, 443 bp, Homo sapiens
tctttagggtgagaatgatttaatcttatctttgtcggcgagggaagggttagccctcagtgctcaagacacaaagaggactgaaggcgcattaattggtacttgctaatcaagccttagagaccagagcactccaggggaattttactttggagagaaatctcattggccctggagcagccctgtatccactttgtgaatgttttagagagggttaatggggtactagcacagtgtgattagttcagttcattggattatcattttgtaaaagaggcagcatctttactagtactctaataaattataaaattattatatccatttctgttccttgtaccttctttctttgaattaagaaaatggtgtggtaaggtacagtgaacttttgagccagaaattcctggcttggagacccctctctgccatctgttgactggctc

SEQ ID NO: 62229 - DNA, 689 bp, Homo sapiens
gggctggatcccccgcctaccgtttccccgcagccgccggcgcttctggcgcttgtgacccgagcaggaagcccagagagaaaccagaaagacaggaaggggattcctggacttcctttccacatccggcaggaacgcgaccctcctccagctaggagcgcttgtccgggcgcaccaagatgcctgcagcttcaagaagatgtatgggaacagacacagaaactttccctaccagataagcaggacaaagaaacacagactaagagttggcctgtgtggtcacggagtgggttaagagatgataaaaaaatctgctctgtacagatggcacacctggtcccaactaaaccctggggccctagaaagataagacatcccctcctcacaagcccctcctcaagagccccctcctcaagagcccatttataaaaactctgacattcttaactacaacttggcaatcttctcaggatccctctctaacagagacctgttctttccttttgcctattaaactcctgctccaaactcaaaaaaaacaaaaacaaaagaacaaaaaagaacacacaccagcaagagcgccagacggtacaaaaataaggacgagacggagaagaagagacgcagaagcgaccaggcgcaccaggagggcagggagaggagcgccggtccacagggagggctacggg

SEQ ID NO: 62230 - DNA, 175 bp, Homo sapiens
tgtgtaacaggcagtgacagggagcgaggaagtggactttttgtatggaaagctctatgttatttttaagcatgcaaataatacatgcatacattcttacaataacatttcagtaccaaacaaacctagaagtttccctgagtgctctctgcttcctccccagctcctcaatctc

SEQ ID NO: 62231 - DNA, 790 bp, Homo sapiens
tctaatatattcaactcgtatcaagtttgtcgggtcagcgcgaattgaacttttgagtgtctcatctgttcatgaaggagctgcagtttacagagtgtttaagcgctggcgagctgtgaatttgcactgggatgtgttaaattatgacaaagccacagacatcgaagaaagcagccggggagagtcttccacaagtaggactttgtggttgccattgacagctctgcggaacagaaacttggtccacccaactcagttaacctcaccaaggtttcagtgtggctatgtgttattgcacctgttcaatcggatgaggccccatgaagacttatcagaagataacagctcgggggaggttgtgatgagagtgacttcagtgtgacaaaagcataagatgatgcagtgtggaccaccctgcacattttgcaatgtaattgcagtgaatggcaaaaccatagcacttctaaaaacacatctatgaactttttaaaatttatgctttttatatgaacatttgaattgcaaatacatttttctgagaaaaagaatcctcttgttcttcgttgtctggtttgtcacatcttttataagttggtacttgaaatcattatacatataatttaactatacttggttaaaagaataatgaaagttatccttaaggccaaaactattttttcttgcttgttttaaatatatttttatgaaagctttcgctctgtgtgtaatttttcagacctgttacaaatggttaagagtttaggatgctgtgggcagattccaaagtgcc

SEQ ID NO: 62232 - DNA, 315 bp, Homo sapiens
gcacgagcttatttgatctaacagataacagtttgtttaaaataagaataataaaatattttattattcttatttgatctaacagataacagtttgtttaaaataagaataataaaatattttattattcttatttgatctaacagataacagtttgtttaaaataagaataataaaatattttattttaccttcatttctttcttgtctgactctcctgtttctttgtgttgatccaaattcctgacctctgtaattttcattttctctgaaataagttttaacatttcttgtgaggcaagtttactggcaaaa

SEQ ID NO: 62233 - DNA, 276 bp, Homo sapiens
gccactacactccagcctgggccacagagcaagactccctcccaaaaaaaaaaaaaaaaattattagaaagaggaagagagagatgacaaagccttttacagttgggtgttgggtgttagagacccagtaccccagcctgacatacctacagaagcagtgaatttacttatttactgttatgaaaaaaatagatgctgccagcccggtgcacagcagaaactactattgaatcatatggttttagcccttcacctttaaatatgtctaattatatg

SEQ ID NO: 62234 - DNA, 439 bp, Homo sapiens
actagcaagataaggatgggatgttttgccaggtgtggtggtaaatgcctgtgatccccaatactcaggaggctaaggtgggaggatcccttgagccgaggggttcaagacaagcccaggcaacatagtgagacccctcttcaaaaagataaaagggagccgggagcagtggctcatgcctgtaatcccagcactttgggaggctgaggtgggcagatcacctgaggtcaggagttcgagaccagcctggccaacgtggtgaaaccccgtctctactaaaaatacaaaaattagctgggtatggtagtgtgctcctgtaatcccagctacctgggaggctgaggcagaagaattgcatgaaccagggaggcagaggttgcagtgagccgagatcacaccactgcactccagcctggacaacagagtaagactctgtcta

SEQ ID NO: 62235 - DNA, 396 bp, Homo sapiens
ctgttttaaaataatattaaatatgctgcatttaatcagttgtgatcaagtcctgtatttatgttgaattggcaagtcaaacaatttgaacctacaaattgttccctctgctctttttccctgactctactgttcaatgtcaaactcatccattaatttcaagtacaccctcctctaagaatcctgttccatccctttcctcccctcaccctcccaaaataaggataattgttttgtctctgtgctcttcctagcacttcctttaatttacaaaatatttcttctaggctgggcatggttcatgcctataatctcagctctttgggaggtcaatgcaagagggtcaggaattcaagaccagcctgggcaacatagggagactacatctctttaaaa

SEQ ID NO: 62236 - DNA, 418 bp, Homo sapiens
actcaggaacgctggggcaagacatgagacaaagggctgccttcacccaccagtaggagcctgaccctgagcccaaagaaactgcccacctgtgtgctgaccccagggcctgaggacaggtccccaagtggacgtctcaaagagagtcccacattccagggcacatgggaactatggccttctggcagctggagggcagcaggaagggcacagctgtctgagacccgtgtggcttcccagaaagaggtgccacccctgaggaggcaccggtgctcacggactcctggttgccagtcttgccagggcaaaaaggcaagcgaaggaaaccctctcttcgtggggcactctgccttgcagtgtcaggtgagatcccggggggaaagctggcttgagctcctctggaatgtgcagggaggac

SEQ ID NO: 62237 - DNA, 261 bp, Homo sapiens
gtattttgatatatttatggtaatcaaaaggattattattttactgttaatactgagcaagagacaatctgtgagtcatccggacagactattttatattttccttcttttaagctataaaaccaaccaatatggggatttattgagcaattcgggttccatgcctgctgaatgaaatcttcagcacgcgctgttttgtttggcaggacattaccatcaaagtgacggtgagctgcccttgactgcatcctcttttctagg

SEQ ID NO: 62238 - DNA, 410 bp, Homo sapiens
caacaccttttttcataaataaatgtatcacttggtgacaatacaagatgttcttgcttgaattagatactaggtcctgaaagaaagtacggaaaaataggtgactcaggttatgtaagactattgaaaacaaaactttcttaaatctgttattgacaggaagatgaattctctaaatttcactgaaaagattcactatggttgagtgccagtaaagcttctgtttacggactcatgaaaacaaagaatggaggtcaggtaaagagctcagagaacctccttaaaaagttgtctgtaatgtaaaaacaaaaaaggatgaaacctcagtattttaacaatagcttcaatttgtattttataagagctaatatcaatgcaacttgcctatacagaaacttgtgattcctgga

SEQ ID NO: 62239 - DNA, 2692 bp, Homo sapiens
ccgcccctgcccgcccgcgtccggtcccacccaccgtccacgctcccgccccgcctgaagttgcctttctcgtttgagctgagggacgcgtcagccaggcaccccggggtgtggccagaggacttcggcgacgcttccccgagagtagcccccctcctcaacccagaaaagacaaccccgcggggctgcagcgagccaggcatgctcactggcgcaggcccggcccgcagcccgagcaggaagcgccggcgctaggcggccccctgcgctgccagctggagccgggcggagccagcgccccggcgcagggtggctctgccagtccccgcgcgcctgggcggccgcacacgtgtccaggcgtcacgtccgcgcgcgcccccggggcttgcgtcagcggctgttccagaagcgggtgggccagggctctgcgcaccgctggggttcggggcccgggacgccgccgggaggagggcaccgcgcggggtccgacgcggaggcgtgctcggaacgccgggggctgcggagtgcatcagcgcggtccagccctccgcctgccgggcgccgagcgtctccgccgcccggacctgggctgggcgccgtggcgttgcctcggagctcgctgcccgcggggcgcgcaccgccttgacccgggcggccccgcggcaggcaggcgcccgcagttccatggttggttcggagcgcgatgagccgcccgtcctccaccggccccagcgctaataaaccctgcagcaagcagccgccgccgcagccccagcacactccgtccccggctgcgcccccggccgccgccaccatctcggctgcgggccccggctcgtccgcggtgcccgccgcggcggcggtgatctcgggccccggcggcggcggcggggccggcccggtgtccccgcagcaccacgagctgacctcgctcttcgagtgtccggtctgctttgactatgtcctgcctcctattctgcagtgccaggccgggcacctggtgtgtaaccaatgccgccagaagttgagctgctgcccgacgtgcaggggcgccctgacgcccagcatcaggaacctggctatggagaaggtggcctcggcagtcctgtttccctgtaagtatgccaccacgggctgttccctgaccctgcaccatacggagaaaccagaacatgaagacatatgtgaataccgtccctactcctgcccatgtcctggtgcttcctgcaagtggcaggggtccctggaagctgtgatgtcccatctcatgcacgcccacaagagcattaccacccttcagggagaagacatcgtctttctagctacagacattaacttgccaggggctgtcgactgggtgatgatgcagtcatgttttggccatcacttcatgctggtgctggagaaacaagagaagtacgaaggccaccagcagttttttgccatcgtcctgctcattggcacccgcaagcaagccgagaactttgcctacagactggagttgaatgggaaccggcggagattgacctgggaggccacgccccgttcgattcatgacggtgtggctgcggccatcatgaacagcgactgccttgttttcgacacagccatagcacatctttttgcagataatgggaaccttggaatcaatgttactatttctacatgttgtccatgatgtgactttcgtaaaccttcaaaattatttgggcatagtgctctatgtttaataaaggtttttatagatgttttattccatatgtcttcacaagtcaggacccacaattacccgtgttttgtttgaacagcagtgtcccatctggcttcgacccaacaaagttcattaacctgggatgaatggggttggcctgttggtgatttggatgctgttctgtgatctaaaacaactcttattgaattgtatttactccctaaacaacacttgacaggctgttgcacagggcttctatagatcagtgtgttaggaatgggaggccccttcctgcctgccttcccatattggtcccttgacattgacaaaagcacagtgactgtcagcagattcctttacttttgtttgtgggaggtaggaattgttttaatgcattttaaacagtgtttctgaaattggatggctggctaatagacactgaatcacccggagtgcttatcttaaaattgcagatttagggagcctgccaatttaacagtctcatcaggtgattcttttcaacagtaatgtttgagaattactgggttaaattgtgggaaagggtccagattttaaaggtgctttaaggttgccctctgccgatactgtttgtctttctactgtttcatcccctaacttcccccaaccctcaaattaaaactagaactatagatccacatgaacgcacgcctgagatttggccactcacctatgttttgggtggattgcctaggaaagcaagtcatatggccattgatagttctcatgtaattagttttgctcaccactagtacagatgacccgtttacacgtggcttccctcggaagccctcctcaacagtagctggtgtgaaagactaaatcagtagagttggaaaagctttataaccggtgtgtcatatgcttgctatttaaagctgtgtgttggttttgtttttctgccacattcactagttttttaataaatattttccaaaaatg

SEQ ID NO: 62240 - DNA, 446 bp, Homo sapiens
agattcaacttgagataatgagtgcaacatagtgatgaatcagataaacgaaggagatcgacaaactccgagagtgaaataatagagataagaacggcgaacttcccccaaccctcaaattaaaactagaactatagatccacatgaacgcacgcctgagatttggccactcacctatgttttgggtggattgcctaggaaagcaagtcatatggccattgatagttctcatgtaattagttttgctcaccactagtacagatgacccgtttacacgtggcttccctcggaagccctcctcaacagtagctggtgtgaaagactaaatcagtagagttggaaaagctttataaccggtgtgtcatatgcttgctatttaaagctgtgtgttggttttgtttttctgccacattcactagttttttaataaatattttccaaaaatg

SEQ ID NO: 62241 - DNA, 2985 bp, Homo sapiens
ccgcccctgcccgcccgcgtccggtcccacccaccgtccacgctcccgccccgcctgaagttgcctttctcgtttgagctgagggacgcgtcagccaggcaccccggggtgtggccagaggacttcggcgacgcttccccgagagtagcccccctcctcaacccagaaaagacaaccccgcggggctgcagcgagccaggcatgctcactggcgcaggcccggcccgcagcccgagcaggaagcgccggcgctaggcggccccctgcgctgccagctggagccgggcggagccagcgccccggcgcagggtggctctgccagtccccgcgcgcctgggcggccgcacacgtgtccaggcgtcacgtccgcgcgcgcccccggggcttgcgtcagcggctgttccagaagcgggtgggccagggctctgcgcaccgctggggttcggggcccgggacgccgccgggaggagggcaccgcgcggggtccgacgcggaggcgtgctcggaacgccgggggctgcggagtgcatcagcgcggtccagccctccgcctgccgggcgccgagcgtctccgccgcccggacctgggctgggcgccgtggcgttgcctcggagctcgctgcccgcggggcgcgcaccgccttgacccgggcggccccgcggcaggcaggcgcccgcagttccatggttggttcggagcgcgatgagccgcccgtcctccaccggccccagcgctaataaaccctgcagcaagcagccgccgccgcagccccagcacactccgtccccggctgcgcccccggccgccgccaccatctcggctgcgggccccggctcgtccgcggtgcccgccgcggcggcggtgatctcgggccccggcggcggcggcggggccggcccggtgtccccgcagcaccacgagctgacctcgctcttcgagtgtccggtctgctttgactatgtcctgcctcctattctgcagtgccaggccgggcacctggtgtgtaaccaatgccgccagaagttgagctgctgcccgacgtgcaggggcgccctgacgcccagcatcaggaacctggctatggagaaggtggcctcggcagtcctgtttccctgtaagtatgccaccacgggctgttccctgaccctgcaccatacggagaaaccagaacatgaagacatatgtgaataccgtccctactcctgcccatgtcctggtgcttcctgcaagtggcaggggtccctggaagctgtgatgtcccatctcatgcacgcccacaagagcattaccacccttcagggagaagacatcgtctttctagctacagacattaacttgccaggggctgtcgactgggtgatgatgcagtcatgttttggccatcacttcatgctggtgctggagaaacaagagaagtacgaaggccaccagcagttttttgccatcgtcctgctcattggcacccgcaagcaagccgagaactttgcctacagactggagttgaatgggaaccggcggagattgacctgggaggccacgccccgttcgattcatgacggtgtggctgcggccatcatgaacagcgactgccttgttttcgacacagccatagcacatctttttgcagataatgggaaccttggaatcaatgttactatttctacatgttgtccatgatgtgactttcgtaaaccttcaaaattatttgggcatagtgctctatgtttaataaaggtttttatagatgttttattccatatgtcttcacaagtcaggacccacaattacccgtgttttgtttgaacagcagtgtcccatctggcttcgacccaacaaagttcattaacctgggatgaatggggttggcctgttggtgatttggatgctgttctgtgatctaaaacaactcttattgaattgtatttactccctaaacaacacttgacaggctgttgcacagggcttctatagatcagtgtgttaggaatgggaggccccttcctgcctgccttcccatattggtcccttgacattgacaaaagcacagtgactgtcagcagattcctttacttttgtttgtgggaggtaggaattgttttaatgcattttaaacagtgtttctgaaattggatggctggctaatagacactgaatcacccggagtgcttatcttaaaattgcagatttagggagcctgccaatttaacagtctcatcaggtgattcttttcaacagtaatgtttgagaattactgggttaaattgtgggaaagggtccagattttaaaggtgctttaaggttgccctctgccgatactgtttgtctttctactgtttcatcccctaacttcccccaaccctcaaattaaaactagaactatagatccacatgaacgcacgcctgagatttggccactcacctatgttttgggtggattgcctaggaaagcaagtcatatggccattgatagttctcatgtaattagttttgctcaccactagtacagatgacccgtttacacgtggcttccctcggaagccctcctcaacagtagctggtgtgaaagactaaatcagtagagttggaaaagctttataaccggtgtgtcatatgcttgctatttaaagctgtgtgttggttttgtttttctgccacattcactagttttttaataaatattttccaaaaatgaaaaaaaaaaaaaaaaaatagagaaaaaacaacaaacacagacaaaaaaaaacaacacaaaagggggcagaaaaacacagagagcaataaaacacaatttaaaagggccaagaagaaaataaaaagggcgcaaaaacggaagaaacaagggatatgaagaacctggggggaaaaaaaccaaacaaagagcgcgaaaaaaagtgtggaacacaatgggagtggttaacaacacgacaaagagagcatagaacaaagggggaaagtgagaatgacaaagatcaacgataaagacc

SEQ ID NO: 62242 - DNA, 2772 bp, Homo sapiens
ccgcccctgcccgcccgcgtccggtcccacccaccgtccacgctcccgccccgcctgaagttgcctttctcgtttgagctgagggacgcgtcagccaggcaccccggggtgtggccagaggacttcggcgacgcttccccgagagtagcccccctcctcaacccagaaaagacaaccccgcggggctgcagcgagccaggcatgctcactggcgcaggcccggcccgcagcccgagcaggaagcgccggcgctaggcggccccctgcgctgccagctggagccgggcggagccagcgccccggcgcagggtggctctgccagtccccgcgcgcctgggcggccgcacacgtgtccaggcgtcacgtccgcgcgcgcccccggggcttgcgtcagcggctgttccagaagcgggtgggccagggctctgcgcaccgctggggttcggggcccgggacgccgccgggaggagggcaccgcgcggggtccgacgcggaggcgtgctcggaacgccgggggctgcggagtgcatcagcgcggtccagccctccgcctgccgggcgccgagcgtctccgccgcccggacctgggctgggcgccgtggcgttgcctcggagctcgctgcccgcggggcgcgcaccgccttgacccgggcggccccgcggcaggcaggcgcccgcagttccatggttggttcggagcgcgatgagccgcccgtcctccaccggccccagcgctaataaaccctgcagcaagcagccgccgccgcagccccagcacactccgtccccggctgcgcccccggccgccgccaccatctcggctgcgggccccggctcgtccgcggtgcccgccgcggcggcggtgatctcgggccccggcggcggcggcggggccggcccggtgtccccgcagcaccacgagctgacctcgctcttcgagtgtccggtctgctttgactatgtcctgcctcctattctgcagtgccaggccgggcacctggtgtgtaaccaatgccgccagaagttgagctgctgcccgacgtgcaggggcgccctgacgcccagcatcaggaacctggctatggagaaggtggcctcggcagtcctgtttccctgtaagtatgccaccacgggctgttccctgaccctgcaccatacggagaaaccagaacatgaagacatatgtgaataccgtccctactcctgcccatgtcctggtgcttcctgcaagtggcaggggtccctggaagctgtgatgtcccatctcatgcacgcccacaagagcattaccacccttcagggagaagacatcgtctttctagctacagacattaacttgccaggggctgtcgactgggtgatgatgcagtcatgttttggccatcacttcatgctggtgctggagaaacaagagaagtacgaaggccaccagcagttttttgccatcgtcctgctcattggcacccgcaagcaagccgagaactttgcctacagactggagttgaatgggaaccggcggagattgacctgggaggccacgccccgttcgattcatgacggtgtggctgcggccatcatgaacagcgactgccttgttttcgacacagccatagcacatctttttgcagataatgggaaccttggaatcaatgttactatttctacatgttgtccatgatgtgactttcgtaaaccttcaaaattatttgggcatagtgctctatgtttaataaaggtttttatagatgttttattccatatgtcttcacaagtcaggacccacaattacccgtgttttgtttgaacagcagtgtcccatctggcttcgacccaacaaagttcattaacctgggatgaatggggttggcctgttggtgatttggatgctgttctgtgatctaaaacaactcttattgaattgtatttactccctaaacaacacttgacaggctgttgcacagggcttctatagatcagtgtgttaggaatgggaggccccttcctgcctgccttcccatattggtcccttgacattgacaaaagcacagtgactgtcagcagattcctttacttttgtttgtgggaggtaggaattgttttaatgcattttaaacagtgtttctgaaattggatggctggctaatagacactgaatcacccggagtgcttatcttaaaattgcagatttagggagcctgccaatttaacagtctcatcaggtgattcttttcaacagtaatgtttgagaattactgggttaaattgtgggaaagggtccagattttaaaggtgctttaaggttgccctctgccgatactgtttgtctttctactgtttcatcccctaacttcccccaaccctcaaattaaaactagaactatagatccacatgaacgcacgcctgagatttggccactcacctatgttttgggtggattgcctaggaaagcaagtcatatggccattgatagttctcatgtaattagttttgctcaccactagtacagatgacccgtttacacgtggcttccctcggaagccctcctcaacagtagctggtgtgaaagactaaatcagtagagttggaaaagctttataaccggtgtgtcatatgcttgctatttaaagctgtgtgttggttttgtttttctgccacattcactagttttttaataaatattttccaaaaatgatggcagaaaggacttggcagccttttagggaccctggggggggggccgggtccccaatcccccttatgtgagtgatatt

SEQ ID NO: 62243 - DNA, 919 bp, Homo sapiens
agttcattaacctgggatgaactttgttgggtcgaagccagatgggacactgctgttccaacaaagttcattaacctgggatgaatggggttggcctgttggtgatttggatgctgttctgtgatctaaaacaactcttattgaattgtatttactccctaaacaacacttgacaggctgttgcacagggcttctatagatcagtgtgttaggaatgggaggccccttcctgcctgccttcccatattggtcccttgacattgacaaaagcacagtgactgtcagcagattcctttacttttgtttgtgggaggtaggaattgttttaatgcattttaaacagtgtttctgaaattggatggctggctaatagacactgaatcacccggagtgcttatcttaaaattgcagatttagggagcctgccaatttaacagtctcatcaggtgattcttttcaacagtaatgtttgagaattactgggttaaattgtgggaaagggtccagattttaaaggtgctttaaggttgccctctgccgatactgtttgtctttctactgtttcatcccctaacttcccccaaccctcaaattaaaactagaactatagatccacatgaacgcacgcctgagatttggccactcacctatgttttgggtggattgcctaggaaagcaagtcatatggccattgatagttctcatgtaattagttttgctcaccactagtacagatgacccgtttacacgtggcttccctcggaagccctcctcaacagtagctggtgtgaaagactaaatcagtagagttggaaaagctttataaccggtgtgtcatatgcttgctatttaaagctgtgtgttggttttgtttttctgccacattcactagttttttaataaatattttccaaaaatg

SEQ ID NO: 62244 - DNA, 921 bp, Homo sapiens
catactagtttaactatgcagtacccatgtagtggcagtgtccatctggtcttcgactccatacacacttcattaatcctcgttttaattgctttcgcctgattaaatttttatccttaactgtgatctaaaacaactcttattgaattgtatttactccctaaacaacacttgacaggctgttgcacagggcttctatagatcagtgtgttaggaatgggaggccccttcctgcctgccttcccatattggtcccttgacattgacaaaagcacagtgactgtcagcagattcctttacttttgtttgtgggaggtaggaattgttttaatgcattttaaacagtgtttctgaaattggatggctggctaatagacactgaatcacccggagtgcttatcttaaaattgcagatttagggagcctgccaatttaacagtctcatcaggtgattcttttcaacagtaatgtttgagaattactgggttaaattgtgggaaagggtccagattttaaaggtgctttaaggttgccctctgccgatactgtttgtctttctactgtttcatcccctaacttcccccaaccctcaaattaaaactagaactatagatccacatgaacgcacgcctgagatttggccactcacctatgttttgggtggattgcctaggaaagcaagtcatatggccattgatagttctcatgtaattagttttgctcaccactagtacagatgacccgtttacacgtggcttccctcggaagccctcctcaacagtagctggtgtgaaagactaaatcagtagagttggaaaagctttataaccggtgtgtcatatgcttgctatttaaagctgtgtgttggttttgtttttctgccacattcactagttttttaataaatattttccaaaaatg

SEQ ID NO: 62245 - DNA, 1956 bp, Homo sapiens
  misc_feature (1629)..(1629): n is a, c, g, or t
  misc_feature (1674)..(1674): n is a, c, g, or t
  misc_feature (1680)..(1680): n is a, c, g, or t
  misc_feature (1694)..(1695): n is a, c, g, or t
  misc_feature (1708)..(1708): n is a, c, g, or t
ccgcccctgcccgcccgcgtccggtcccacccaccgtccacgctcccgccccgcctgaagttgcctttctcgtttgagctgagggacgcgtcagccaggcaccccggggtgtggccagaggacttcggcgacgcttccccgagagtagcccccctcctcaacccagaaaagacaaccccgcggggctgcagcgagccaggcatgctcactggcgcaggcccggcccgcagcccgagcaggaagcgccggcgctaggcggccccctgcgctgccagctggagccgggcggagccagcgccccggcgcagggtggctctgccagtccccgcgcgcctgggcggccgcacacgtgtccaggcgtcacgtccgcgcgcgcccccggggcttgcgtcagcggctgttccagaagcgggtgggccagggctctgcgcaccgctggggttcggggcccgggacgccgccgggaggagggcaccgcgcggggtccgacgcggaggcgtgctcggaacgccgggggctgcggagtgcatcagcgcggtccagccctccgcctgccgggcgccgagcgtctccgccgcccggacctgggctgggcgccgtggcgttgcctcggagctcgctgcccgcggggcgcgcaccgccttgacccgggcggccccgcggcaggcaggcgcccgcagttccatggttggttcggagcgcgatgagccgcccgtcctccaccggccccagcgctaataaaccctgcagcaagcagccgccgccgcagccccagcacactccgtccccggctgcgcccccggccgccgccaccatctcggctgcgggccccggctcgtccgcggtgcccgccgcggcggcggtgatctcgggccccggcggcggcggcggggccggcccggtgtccccgcagcaccacgagctgacctcgctcttcgagtgtccggtctgctttgactatgtcctgcctcctattctgcagtgccaggccgggcacctggtgtgtaaccaatgccgccagaagttgagctgctgcccgacgtgcaggggcgccctgacgcccagcatcaggaacctggctatggagaaggtggcctcggcagtcctgtttccctgtaagtatgccaccacgggctgttccctgaccctgcaccatacggagaaaccagaacatgaagacatatgtgaataccgtccctactcctgcccatgtcctggtgcttcctgcaagtggcaggggtccctggaagctgtgatgtcccatctcatgcacgcccacaagagcattaccacccttcagggagaagacatcgtctttctagctacagacattaacttgccaggggctgtcgactgggtgatgatgcagtcatgttttggccatcacttcatgctggtgctggagaaacaagagaagtacgaaggccaccagcagttttttgccatcgtcctgctcattggcacccgcaagcaagccgagaactttgcctacagactggagttgaatgggaaccggcggagattgacctgggaggccacgccccgttcgattcatgacggtgtggctgcggccatcatgaacagcgactgctgttcgaacagctagacatctttgcgatatggaacctngatcattactatctactgtgccatgaggactcgtacctcaatatnggctangctatgtataagtnnatgagtatcatgntacagagaccaataccgttgtgacagagcattgttacacaagatactgagagggtgcttgatgagcgtggcaaactttgtgtctctaaactaggtgcagttttaggtgagagctctccccttctcttataaagcaatcttttgggagagtaaacaggggggccacacaccgtaagaggacccaccttgtcacattgggagaaatgggctgtttccccaaaacacgcgctgggagagttctcccccccc

SEQ ID NO: 62246 - DNA, 3044 bp, Homo sapiens
ccgcccctgcccgcccgcgtccggtcccacccaccgtccacgctcccgccccgcctgaagttgcctttctcgtttgagctgagggacgcgtcagccaggcaccccggggtgtggccagaggacttcggcgacgcttccccgagagtagcccccctcctcaacccagaaaagacaaccccgcggggctgcagcgagccaggcatgctcactggcgcaggcccggcccgcagcccgagcaggaagcgccggcgctaggcggccccctgcgctgccagctggagccgggcggagccagcgccccggcgcagggtggctctgccagtccccgcgcgcctgggcggccgcacacgtgtccaggcgtcacgtccgcgcgcgcccccggggcttgcgtcagcggctgttccagaagcgggtgggccagggctctgcgcaccgctggggttcggggcccgggacgccgccgggaggagggcaccgcgcggggtccgacgcggaggcgtgctcggaacgccgggggctgcggagtgcatcagcgcggtccagccctccgcctgccgggcgccgagcgtctccgccgcccggacctgggctgggcgccgtggcgttgcctcggagctcgctgcccgcggggcgcgcaccgccttgacccgggcggccccgcggcaggcaggcgcccgcagttccatggttggttcggagcgcgatgagccgcccgtcctccaccggccccagcgctaataaaccctgcagcaagcagccgccgccgcagccccagcacactccgtccccggctgcgcccccggccgccgccaccatctcggctgcgggccccggctcgtccgcggtgcccgccgcggcggcggtgatctcgggccccggcggcggcggcggggccggcccggtgtccccgcagcaccacgagctgacctcgctcttcgagtgtccggtctgctttgactatgtcctgcctcctattctgcagtgccaggccgggcacctggtgtgtaaccaatgccgccagaagttgagctgctgcccgacgtgcaggggcgccctgacgcccagcatcaggaacctggctatggagaaggtggcctcggcagtcctgtttccctgtaagtatgccaccacgggctgttccctgaccctgcaccatacggagaaaccagaacatgaagacatatgtgaataccgtccctactcctgcccatgtcctggtgcttcctgcaagtggcaggggtccctggaagctgtgatgtcccatctcatgcacgcccacaagagcattaccacccttcagggagaagacatcgtctttctagctacagacattaacttgccaggggctgtcgactgggtgatgatgcagtcatgttttggccatcacttcatgctggtgctggagaaacaagagaagtacgaaggccaccagcagttttttgccatcgtcctgctcattggcacccgcaagcaagccgagaactttgcctacagactggagttgaatgggaaccggcggagattgacctgggaggccacgccccgttcgattcatgacggtgtggctgcggccatcatgaacagcgactgccttgttttcgacacagccatagcacatctttttgcagataatgggaaccttggaatcaatgttactatttctacatgttgtccatgatgtgactttcgtaaaccttcaaaattatttgggcatagtgctctatgtttaataaaggtttttatagatgttttattccatatgtcttcacaagtcaggacccacaattacccgtgttttgtttgaacagcagtgtcccatctggcttcgacccaacaaagttcattaacctgggatgaatggggttggcctgttggtgatttggatgctgttctgtgatctaaaacaactcttattgaattgtatttactccctaaacaacacttgacaggctgttgcacagggcttctatagatcagtgtgttaggaatgggaggccccttcctgcctgccttcccatattggtcccttgacattgacaaaagcacagtgactgtcagcagattcctttacttttgtttgtgggaggtaggaattgttttaatgcattttaaacagtgtttctgaaattggatggctggctaatagacactgaatcacccggagtgcttatcttaaaattgcagatttagggagcctgccaatttaacagtctcatcaggtgattcttttcaacagtaatgtttgagaattactgggttaaattgtgggaaagggtccagattttaaaggtgctttaaggttgccctctgccgatactgtttgtctttctactgtttcatcccctaacttcccccaaccctcaaattaaaactagaactatagatccacatgaacgcacgcctgagatttggccactcacctatgttttgggtggattgcctaggaaagcaagtcatatggccattgatagttctcatgtaattagttttgctcaccactagtacagatgacccgtttacacgtggcttccctcggaagccctcctcaacagtagctggtgtgaaagactaaatcagtagagttggaaaagctttataaccggtgtgtcatatgcttgctatttaaagctgtgtgttggttttgtttttctgccacattcactagttttttaataaatattttccaaaaatgaacacaaaaaaacacacaaacaaaaagggggggggcaaaaagaaccccggggggccacattacggccccctttgtgcaagggcccacaaggggcgaaaaagagggcgggcggaacacggggggaaacggcccgcgtgtccgggggggacccccccgggggtgcaagggaacccccagagaaggcccgggaaaaacatgctggggaaccttcccggcgtagtgtataacactacatcactacaacaacaccgcgacgacacaacagataagaaccacacacaaaaccccagcacaccgaccacacaccaaacacacacacaacagacaacaacagacacaacaacgacacaac

SEQ ID NO: 62247 - DNA, 2302 bp, Homo sapiens
ccgcccctgcccgcccgcgtccggtcccacccaccgtccacgctcccgccccgcctgaagttgcctttctcgtttgagctgagggacgcgtcagccaggcaccccggggtgtggccagaggacttcggcgacgcttccccgagagtagcccccctcctcaacccagaaaagacaaccccgcggggctgcagcgagccaggcatgctcactggcgcaggcccggcccgcagcccgagcaggaagcgccggcgctaggcggccccctgcgctgccagctggagccgggcggagccagcgccccggcgcagggtggctctgccagtccccgcgcgcctgggcggccgcacacgtgtccaggcgtcacgtccgcgcgcgcccccggggcttgcgtcagcggctgttccagaagcgggtgggccagggctctgcgcaccgctggggttcggggcccgggacgcccgccgcggcggcggtgatctcgggccccggcggcggcggcggggccggcccggtgtccccgcagcaccacgagctgacctcgctcttcgagtgtccggtctgctttgactatgtcctgcctcctattctgcagtgccaggccgggcacctggtgtgtaaccaatgccgccagaagttgagctgctgcccgacgtgcaggggcgccctgacgcccagcatcaggaacctggctatggagaaggtggcctcggcagtcctgtttccctgtaagtatgccaccacgggctgttccctgaccctgcaccatacggagaaaccagaacatgaagacatatgtgaataccgtccctactcctgcccatgtcctggtgcttcctgcaagtggcaggggtccctggaagctgtgatgtcccatctcatgcacgcccacaagagcattaccacccttcagggagaagacatcgtctttctagctacagacattaacttgccaggggctgtcgactgggtgatgatgcagtcatgttttggccatcacttcatgctggtgctggagaaacaagagaagtacgaaggccaccagcagttttttgccatcgtcctgctcattggcacccgcaagcaagccgagaactttgcctacagactggagttgaatgggaaccggcggagattgacctgggaggccacgccccgttcgattcatgacggtgtggctgcggccatcatgaacagcgactgccttgttttcgacacagccatagcacatctttttgcagataatgggaaccttggaatcaatgttactatttctacatgttgtccatgatgtgactttcgtaaaccttcaaaattatttgggcatagtgctctatgtttaataaaggtttttatagatgttttattccatatgtcttcacaagtcaggacccacaattacccgtgttttgtttgaacagcagtgtcccatctggcttcgacccaacaaagttcattaacctgggatgaatggggttggcctgttggtgatttggatgctgttctgtgatctaaaacaactcttattgaattgtatttactccctaaacaacacttgacaggctgttgcacagggcttctatagatcagtgtgttaggaatgggaggccccttcctgcctgccttcccatattggtcccttgacattgacaaaagcacagtgactgtcagcagattcctttacttttgtttgtgggaggtaggaattgttttaatgcattttaaacagtgtttctgaaattggatggctggctaatagacactgaatcacccggagtgcttatcttaaaattgcagatttagggagcctgccaatttaacagtctcatcaggtgattcttttcaacagtaatgtttgagaattactgggttaaattgtgggaaagggtccagattttaaaggtgctttaaggttgccctctgccgatactgtttgtctttctactgtttcatcccctaacttcccccaaccctcaaattaaaactagaactatagatccacatgaacgcacgcctgagatttggccactcacctatgttttgggtggattgcctaggaaagcaagtcatatggccattgatagttctcatgtaattagttttgctcaccactagtacagatgacccgtttacacgtggcttccctcggaagccctcctcaacagtagctggtgtgaaagactaaatcagtagagttggaaaagctttataaccggtgtgtcatatgcttgctatttaaagctgtgtgttggttttgtttttctgccacattcactagttttttaataaatattttccaaaaatg

SEQ ID NO: 62248 - DNA, 2076 bp, Homo sapiens
ccgcccctgcccgcccgcgtccggtcccacccaccgtccacgctcccgccccgcctgaagttgcctttctcgtttgagctgagggacgcgtcagccaggcaccccggggtgtggccagaggacttcggcgacgcttccccgagagtagcccccctcctcaacccagaaaagacaaccccgcggggctgcagcgagccaggcatgctcactggcgcaggcccggcccgcagcccgagcaggaagcgccggcgctaggcggccccctgcgctgccagctggagccgggcggagccagcgccccggcgcagggtggctctgccagtccccgcgcgcctgggcggccgcacacgtgtccaggcgtcacgtccgcgcgcgcccccggggcttgcgtcagcggctgttccagaagcgggtgggccagggctctgcgcaccgctggggttcggggcccgggacgccgccgggaggagggcaccgcgcggggtccgacgcggaggcgtgctcggaacgccgggggctgcggagtgcatcagcgcggtccagccctccgcctgccgggcgccgagcgtctccgccgcccggacctgggctgggcgccgtggcgttgcctcggagctcgctgcccgcggggcgcgcaccgccttgacccgggcggccccgcggcaggcaggcgcccgcagttccatggttggttcggagcgcgatgagccgcccgtcctccaccggccccagcgctaataaaccctgcagcaagcagccgccgccgcagccccagcacactccgtccccggctgcgcccccggccgccgccaccatctcggctgcgggccccggctcgtccgcggtgcccgccgcggcggcggtgatctcgggccccggcggcggcggcggggccggcccggtgtccccgcagcaccacgagctgacctcgctcttcgagtgtccggtctgctttgactatgtcctgcctcctattctgcagtgccaggccgggcacctggtgtgtaaccaatgccgccagaagttgagctgctgcccgacgtgcaggggcgccctgacgcccagcatcaggaacctggctatggagaaggtggcctcggcagtcctgtttccctgtaagtatgccaccacgggctgttccctgaccctgcaccatacggagaaaccagaacatgaagacatatgtgaataccgtccctactcctgcccatgtcctggtgcttcctgcaagtggcaggggtccctggaagctgtgatgtcccatctcatgcacgcccacaagagcattaccacccttcagggagaagacatcgtctttctagctacagacattaacttgccaggggctgtcgactgggtgatgatgcagtcatgttttggccatcacttcatgctggtgctggagaaacaagagaagtacgaaggccaccagcagttttttgccatcgtcctgctcattggcacccgcaagcaagccgagaactttgcctacagactggagttgaatgggaaccggcggagattgacctgggaggccacgccccgttcgattcatgacggtgtggctgcggccatcatgaacagcgactgccttgttttcgacacagccatagcacatctttttgcagataatgggaaccttggaatcaatgttactatttctacatgttgtccatgatgtgactttcgtaaaccttcaaaattatttgggcatagtgctctatgtttaataaaggtttttatagatgttttattccatatgtcttcacaagtcaggacccacaattacccgtgttttgtttgaacagcagtgtcccatctggcttcgacccaacaaagttcattaacctgggatgaatggggttggcctgttggtgatttggatgctgttctgtgatctaaaacaactcttattgaattgtatttactccctaaacaacacttgacaggctgttgcacagggcttctatagatcagtgtgttaggaatgggaggccccttcctgcctgccttccccctttgtgccctcgcccttccccccgctcagatgcttgtaacatgatccctttcctttcg

SEQ ID NO: 62249 - DNA, 325 bp, Homo sapiens
atggatccatgcgagccaggtgcacccggatcctggcatccatcctggcaaacacctggagggctgccttggacacaggccaggagcagacccttgggccgcccttccaaggcctgagcagccaggttaagggaggacggttcttcaggctgcgacactggctgtcccatgtcctgtaggtgctcagggccctcgccaggcctggaggtggctcaggggtggggaagagctgtccccagccaggtgagcagggccatgaccgcgctcctgctgctctgggaggctgggccctgtcaagcctgtgagtcttcttggtaggccaggt

SEQ ID NO: 62250 - DNA, 1837 bp, Homo sapiens
atccccggtgaaaactgcgggctccgagctgggtgcagcaaccggaggcggcggcgcgtctggaggaggctgcagcagcggaagaccccagtccagatccaggactgagatcccagaaccatgaacctggccatcagcatcgctctcctgctaacagtcttgcaggtctcccgagggcagaaggtgaccagcctaacggcctgcctagtggaccagagccttcgtctggactgccgccatgagaataccagcagttcacccatccagtacgagttcagcctgacccgtgagacaaagaagcacgtgctctttggcactgtgggggtgcctgagcacacataccgctcccgaaccaacttcaccagcaaatacaacatgaaggtcctctacttatccgccttcactagcaaggacgagggcacctacacgtgtgcactccaccactctggccattccccacccatctcctcccagaacgtcacagtgctcagagacaaactggtcaagtgtgagggcatcagcctgctggctcagaacacctcgtggctgctgctgctcctgctctccctctccctcctccaggccacggatttcatgtccctgtgactggtggggcccatggaggagacaggaagcctcaagttccagtgcagagatcctacttctctgagtcagctgaccccctccccgcaatccctcaaaccttgaggagaagtggggaccccacccctcatcaggagttccagtgctgcatgcgattatctacccacgtccacgcggccacctcaccctctccgcacacctctggctgtctttttgtactttttgttccagagctgcttctgtctggtttatttaggttttatccttccttttctttgagagttcgtgaagagggaagccaggattggggacctgatggagagtgagagcatgtgaggggtagtgggatggtggggtaccagccactggaggggtcatccttgcccatcgggaccagaaacctgggagagacttggatgaggagtggttgggctgtgcctgggcctagcacggacatggtctgtcctgacagcactcctcggcaggcatggctggtgcctgaagaccccagatgtgagggcaccaccaagaatttgtggcctaccttgtgagggagagaactgagcatctccagcattctcagccacaaccaaaaaaaaataaaaagggcagccctccttaccactgtggaagtccctcagaggccttggggcatgacccagtgaagatgcaggtttgaccaggaaagcagcgctagtggagggttggagaaggaggtaaaggatgagggttcatcatccctccctgcctaaggaagctaaaagcatggccctgctgcccctccctgcctccacccacagtggagagggctacaaaggaggacaagaccctctcaggctgtcccaagctcccaagagcttccagagctctgacccacagcctccaagtcaggtggggtggagtcccagagctgcacagggtttggcccaagtttctaagggaggcacttcctcccctcgcccatcagtgccagcccctgctggctggtgcctgagcccctcagacagccccctgccccgcaggcctgccttctcagggacttctgcggggcctgaggcaagccatggagtgagacccaggagccggacacttctcaggaaatggcttttcccaacccccagcccccacccggtggttcttcctgttctgtgactgtgtatagtgccaccacagcttatggcatctcattgaggacaaagaaaactgcacaataaaaccaagcctctggaatctg

SEQ ID NO: 62251 - DNA, 197 bp, Homo sapiens
tcaagcttctaacgatgtacggggccatggagtgagacccaggagccggacacttctcaggaaatggcttttcccaacccccagcccccacccggtggttcttcctgttctgtgactgtgtatagtgccaccacagcttatggcatctcattgaggacaaagaaaactgcacaataaaaccaagcctctggaatctg

SEQ ID NO: 62252 - DNA, 2427 bp, Homo sapiens
atccccggtgaaaactgcgggctccgagctgggtgcagcaaccggaggcggcggcgcgtctggaggaggctgcagcagcggaagaccccagtccagatccaggactgagatcccagaaccatgaacctggccatcagcatcgctctcctgctaacagtcttgcaggtctcccgagggcagaaggtgaccagcctaacggcctgcctagtggaccagagccttcgtctggactgccgccatgagaataccagcagttcacccatccagtacgagttcagcctgacccgtgagacaaagaagcacgtgctctttggcactgtgggggtgcctgagcacacataccgctcccgaaccaacttcaccagcaaatacaacatgaaggtcctctacttatccgccttcactagcaaggacgagggcacctacacgtgtgcactccaccactctggccattccccacccatctcctcccagaacgtcacagtgctcagagacaaactggtcaagtgtgagggcatcagcctgctggctcagaacacctcgtggctgctgctgctcctgctctccctctccctcctccaggccacggatttcatgtccctgtgactggtggggcccatggaggagacaggaagcctcaagttccagtgcagagatcctacttctctgagtcagctgaccccctccccgcaatccctcaaaccttgaggagaagtggggaccccacccctcatcaggagttccagtgctgcatgcgattatctacccacgtccacgcggccacctcaccctctccgcacacctctggctgtctttttgtactttttgttccagagctgcttctgtctggtttatttaggttttatccttccttttctttgagagttcgtgaagagggaagccaggattggggacctgatggagagtgagagcatgtgaggggtagtgggatggtggggtaccagccactggaggggtcatccttgcccatcgggaccagaaacctgggagagacttggatgaggagtggttgggctgtgcctgggcctagcacggacatggtctgtcctgacagcactcctcggcaggcatggctggtgcctgaagaccccagatgtgagggcaccaccaagaatttgtggcctaccttgtgagggagagaactgagcatctccagcattctcagccacaaccaaaaaaaaataaaaagggcagccctccttaccactgtggaagtccctcagaggccttggggcatgacccagtgaagatgcaggtttgaccaggaaagcagcgctagtggagggttggagaaggaggtaaaggatgagggttcatcatccctccctgcctaaggaagctaaaagcatggccctgctgcccctccctgcctccacccacagtggagagggctacaaaggaggacaagaccctctcaggctgtcccaagctcccaagagcttccagagctctgacccacagcctccaagtcaggtggggtggagtcccagagctgcacagggtttggcccaagtttctaagggaggcacttcctcccctcgcccatcagtgccagcccctgctggctggtgcctgagcccctcagacagccccctgccccgcaggcctgccttctcagggacttctgcggggcctgaggcaagccatggagtgagacccaggagccggacacttctcaggaaatggcttttcccaacccccagcccccacccggtggttcttcctgttctgtgactgtgtatagtgccaccacagcttatggcatctcattgaggacaaagaaaactgcacaataaaaccaagcctctggaatctgaaaaaaaaaaaaacaaaaaaaaaaaaaaaaaaaaaaaaaaaaaaaaaaaaaaaacaaaccaacagaaaaaaaaaaaaaaaaaaaaaaacacaaacaacaaacaacacaccaaaaaagcaggcgggggggaggcacatagcccacccacgccacacacagcccacaccgccactataaagcctggagacagcggggagaccatacggggaacgacagcacagcaaggaggagcgaggcgacaaaagatgaacaaaggaggcgggggtcaaaagagcgcgctacccgcgcgcgcctcctctggagccagaccgcagcacctgtccgagggaggagagagcaagcggccacagccacacccccagccccactcccctgatccaaggaaactctgacagcgtgctacgtactcagtcggcacctctactacaccgcacgcacatcgctagagcgacatcacctgatgcggccgccacagcgatacaccacacctacccagttcagagcgcgtcgacgagagaaagcgagcggaccgcaccacgcaagcagccagtagcgcagcgatacgaagcaaagcccaacttcccccagcg

SEQ ID NO: 62253 - DNA, 2190 bp, Homo sapiens
atccccggtgaaaactgcgggctccgagctgggtgcagcaaccggaggcggcggcgcgtctggaggaggctgcagcagcggaagaccccagtccagatccaggactgagatcccagaaccatgaacctggccatcagcatcgctctcctgctaacagtcttgcaggtctcccgagggcagaaggtgaccagcctaacggcctgcctagtggaccagagccttcgtctggactgccgccatgagaataccagcagttcacccatccagtacgagttcagcctgacccgtgagacaaagaagcacgtgctctttggcactgtgggggtgcctgagcacacataccgctcccgaaccaacttcaccagcaaatacaacatgaaggtcctctacttatccgccttcactagcaaggacgagggcacctacacgtgtgcactccaccactctggccattccccacccatctcctcccagaacgtcacagtgctcagagacaaactggtcaagtgtgagggcatcagcctgctggctcagaacacctcgtggctgctgctgctcctgctctccctctccctcctccaggccacggatttcatgtccctgtgactggtggggcccatggaggagacaggaagcctcaagttccagtgcagagatcctacttctctgagtcagctgaccccctccccgcaatccctcaaaccttgaggagaagtggggaccccacccctcatcaggagttccagtgctgcatgcgattatctacccacgtccacgcggccacctcaccctctccgcacacctctggctgtctttttgtactttttgttccagagctgcttctgtctggtttatttaggttttatccttccttttctttgagagttcgtgaagagggaagccaggattggggacctgatggagagtgagagcatgtgaggggtagtgggatggtggggtaccagccactggaggggtcatccttgcccatcgggaccagaaacctgggagagacttggatgaggagtggttgggctgtgcctgggcctagcacggacatggtctgtcctgacagcactcctcggcaggcatggctggtgcctgaagaccccagatgtgagggcaccaccaagaatttgtggcctaccttgtgagggagagaactgagcatctccagcattctcagccacaaccaaaaaaaaataaaaagggcagccctccttaccactgtggaagtccctcagaggccttggggcatgacccagtgaagatgcaggtttgaccaggaaagcagcgctagtggagggttggagaaggaggtaaaggatgagggttcatcatccctccctgcctaaggaagctaaaagcatggccctgctgcccctccctgcctccacccacagtggagagggctacaaaggaggacaagaccctctcaggctgtcccaagctcccaagagcttccagagctctgacccacagcctccaagtcaggtggggtggagtcccagagctgcacagggtttggcccaagtttctaagggaggcacttcctcccctcgcccatcagtgccagcccctgctggctggtgcctgagcccctcagacagccccctgccccgcaggcctgccttctcagggacttctgcggggcctgaggcaagccatggagtgagacccaggagccggacacttctcaggaaatggcttttcccaacccccagcccccacccggtggttcttcctgttctgtgactgtgtatagtgccaccacagcttatggcatctcattgaggacaaagaaaactgcacaataaaaccaagcctctggaatctgctcgtgtccacctggccttcgctcctccagcagtgcctgcctgcccccgcttcgctggggtctccacgggtgaggctggggaacgccacctcttcctcttccctgacttctccccaaccacttagtagcaacgctaccccaggggctaatgactgcacactgggcttcttttcagaatgaccctaacgagacacatttgcccaaataaacgaacatcccatgtctgctgactcacctggctggaacaacatgcttactgccaacatgtgggccgaaccacatggccctggctctggaatgcacaagtggctttgcgtgaatctgcgctaagctatgcagtctgctttttcttc

SEQ ID NO: 62254 - DNA, 2035 bp, Homo sapiens
atccccggtgaaaactgcgggctccgagctgggtgcagcaaccggaggcggcggcgcgtctggaggaggctgcagcagcggaagaccccagtccagatccaggactgagatcccagaaccatgaacctggccatcagcatcgctctcctgctaacagtcttgcaggtctcccgagggcagaaggtgaccagcctaacggcctgcctagtggaccagagccttcgtctggactgccgccatgagaataccagcagttcacccatccagtacgagttcagcctgacccgtgagacaaagaagcacgtgctctttggcactgtgggggtgcctgagcacacataccgctcccgaaccaacttcaccagcaaatacaacatgaaggtcctctacttatccgccttcactagcaaggacgagggcacctacacgtgtgcactccaccactctggccattccccacccatctcctcccagaacgtcacagtgctcagagacaaactggtcaagtgtgagggcatcagcctgctggctcagaacacctcgtggctgctgctgctcctgctctccctctccctcctccaggccacggatttcatgtccctgtgactggtggggcccatggaggagacaggaagcctcaagttccagtgcagagatcctacttctctgagtcagctgaccccctccccgcaatccctcaaaccttgaggagaagtggggaccccacccctcatcaggagttccagtgctgcatgcgattatctacccacgtccacgcggccacctcaccctctccgcacacctctggctgtctttttgtactttttgttccagagctgcttctgtctggtttatttaggttttatccttccttttctttgagagttcgtgaagagggaagccaggattggggacctgatggagagtgagagcatgtgaggggtagtgggatggtggggtaccagccactggaggggtcatccttgcccatcgggaccagaaacctgggagagacttggatgaggagtggttgggctgtgcctgggcctagcacggacatggtctgtcctgacagcactcctcggcaggcatggctggtgcctgaagaccccagatgtgagggcaccaccaagaatttgtggcctaccttgtgagggagagaactgagcatctccagcattctcagccacaaccaaaaaaaaataaaaagggcagccctccttaccactgtggaagtccctcagaggccttggggcatgacccagtgaagatgcaggtttgaccaggaaagcagcgctagtggagggttggagaaggaggtaaaggatgagggttcatcatccctccctgcctaaggaagctaaaagcatggccctgctgcccctccctgcctccacccacagtggagagggctacaaaggaggacaagaccctctcaggctgtcccaagctcccaagagcttccagagctctgacccacagcctccaagtcaggtggggtggagtcccagagctgcacagggtttggcccaagtttctaagggaggcacttcctcccctcgcccatcagtgccagcccctgctggctggtgcctgagcccctcagacagccccctgccccgcaggcctgccttctcagggacttctgcggggcctgaggcaagccatggagtgagacccaggagccggacacttctcaggaaatggcttttcccaacccccagcccccacccggtggttcttcctgttctgtgactgtgtatagtgccacctcttcctcttccctgacttctccccaaccacttagtagcaacgctaccccaggggctaatgactgcacactgggcttcttttcagaatgaccctaacgagacacatttgcccaaataaacgaacatcccatgtctgctgactcacctggctggaacaacatgcttactgccaacatgtgggccgaaccacatggccctggctctggaatgcacaagtggctttgcgtgaatctgcgctaagctatgcagtctgctttttcttc

SEQ ID NO: 62255 - DNA, 1660 bp, Homo sapiens
atccccggtgaaaactgcgggctccgagctgggtgcagcaaccggaggcggcggcgcgtctggaggaggctgcagcagcggaagaccccagtccagatccaggactgagatcccagaaccatgaacctggccatcagcatcgctctcctgctaacagtcttgcaggtctcccgagggcagaaggtgaccagcctaacggcctgcctagtggaccagagccttcgtctggactgccgccatgagaataccagcagttcacccatccagtacgagttcagcctgacccgtgagacaaagaagcacgtgctctttggcactgtgggggtgcctgagcacacataccgctcccgaaccaacttcaccagcaaatacaacatgaaggtcctctacttatccgccttcactagcaaggacgagggcacctacacgtgtgcactccaccactctggccattccccacccatctcctcccagaacgtcacagtgctcagagacaaactggtcaagtgtgagggcatcagcctgctggctcagaacacctcgtggctgctgctgctcctgctctccctctccctcctccaggccacggatttcatgtccctgtgactggtggggcccatggaggagacaggaagcctcaagttccagtgcagagatcctacttctctgagtcagctgaccccctccccgcaatccctcaaaccttgaggagaagtggggaccccacccctcatcaggagttccagtgctgcatgcgattatctacccacgtccacgcggccacctcaccctctccgcacacctctggctgtctttttgtactttttgttccagagctgcttctgtctggtttatttaggttttatccttccttttctttgagagttcgtgaagagggaagccaggattggggacctgatggagagtgagagcatgtgaggggtagtgggatggtggggtaccagccactggaggggtcatccttgcccatcgggaccagaaacctgggagagacttggatgaggagtggttgggctgtgcctgggcctagcacggacatggtctgtcctgacagcactcctcggcaggcatggctggtgcctgaagaccccagatgtgagggcaccaccaagaatttgtggcctaccttgtgagggagagaactgagcatctccagcattctcagccacaaccaaaaaaaaataaaaagggcagccctccttaccactgtggaagtccctcagaggccttggggcatgacccagtgaagatgcaggtttgaccaggaaagcagcgctagtggagggttggagaaggaggtaaaggatgagggttcatcatccctccctgcccccgcttcgctggggtctccacgggtgaggctggggaacgccacctcttcctcttccctgacttctccccaaccacttagtagcaacgctaccccaggggctaatgactgcacactgggcttcttttcagaatgaccctaacgagacacatttgcccaaataaacgaacatcccatgtctgctgactcacctggctggaacaacatgcttactgccaacatgtgggccgaaccacatggccctggctctggaatgcacaagtggctttgcgtgaatctgcgctaagctatgcagtctgctttttcttc

SEQ ID NO: 62256 - DNA, 1801 bp, Homo sapiens
tcccgctgcgcggcaagtttggaaagggtgggccatgcagcagcggaagacccagtccagatccaggactgagatcccagaaccatgaacctggccatcagcatcgctctcctgctaacagtcttgcaggtctcccgagggcagaaggtgaccagcctaacggcctgcctagtggaccagagccttcgtctggactgccgccatgagaataccagcagttcacccatccagtacgagttcagcctgacccgtgagacaaagaagcacgtgctctttggcactgtgggggtgcctgagcacacataccgctcccgaaccaacttcaccagcaaatacaacatgaaggtcctctacttatccgccttcactagcaaggacgagggcacctacacgtgtgcactccaccactctggccattccccacccatctcctcccagaacgtcacagtgctcagagacaaactggtcaagtgtgagggcatcagcctgctggctcagaacacctcgtggctgctgctgctcctgctctccctctccctcctccaggccacggatttcatgtccctgtgactggtggggcccatggaggagacaggaagcctcaagttccagtgcagagatcctacttctctgagtcagctgaccccctccccgcaatccctcaaaccttgaggagaagtggggaccccacccctcatcaggagttccagtgctgcatgcgattatctacccacgtccacgcggccacctcaccctctccgcacacctctggctgtctttttgtactttttgttccagagctgcttctgtctggtttatttaggttttatccttccttttctttgagagttcgtgaagagggaagccaggattggggacctgatggagagtgagagcatgtgaggggtagtgggatggtggggtaccagccactggaggggtcatccttgcccatcgggaccagaaacctgggagagacttggatgaggagtggttgggctgtgcctgggcctagcacggacatggtctgtcctgacagcactcctcggcaggcatggctggtgcctgaagaccccagatgtgagggcaccaccaagaatttgtggcctaccttgtgagggagagaactgagcatctccagcattctcagccacaaccaaaaaaaaataaaaagggcagccctccttaccactgtggaagtccctcagaggccttggggcatgacccagtgaagatgcaggtttgaccaggaaagcagcgctagtggagggttggagaaggaggtaaaggatgagggttcatcatccctccctgcctaaggaagctaaaagcatggccctgctgcccctccctgcctccacccacagtggagagggctacaaaggaggacaagaccctctcaggctgtcccaagctcccaagagcttccagagctctgacccacagcctccaagtcaggtggggtggagtcccagagctgcacagggtttggcccaagtttctaagggaggcacttcctcccctcgcccatcagtgccagcccctgctggctggtgcctgagcccctcagacagccccctgccccgcaggcctgccttctcagggacttctgcggggcctgaggcaagccatggagtgagacccaggagccggacacttctcaggaaatggcttttcccaacccccagcccccacccggtggttcttcctgttctgtgactgtgtatagtgccaccacagcttatggcatctcattgaggacaaagaaaactgcacaataaaaccaagcctctggaatctg

SEQ ID NO: 62257 - DNA, 1776 bp, Homo sapiens
  misc_feature (15)..(15): n is a, c, g, or t
tgctgtgttggtacnccggagtatgggatatgtgaccggccgcggcggcgcgtctggaggaggctgcagcagcggaagaccccagtccagatccaggactgagatcccagaaccatgaacctggccatcagcatcgctctcctgctaacagccagagccttcgtctggactgccgccatgagaataccagcagttcacccatccagtacgagttcagcctgacccgtgagacaaagaagcacgtgctctttggcactgtgggggtgcctgagcacacataccgctcccgaaccaacttcaccagcaaatacaacatgaaggtcctctacttatccgccttcactagcaaggacgagggcacctacacgtgtgcactccaccactctggccattccccacccatctcctcccagaacgtcacagtgctcagagacaaactggtcaagtgtgagggcatcagcctgctggctcagaacacctcgtggctgctgctgctcctgctctccctctccctcctccaggccacggatttcatgtccctgtgactggtggggcccatggaggagacaggaagcctcaagttccagtgcagagatcctacttctctgagtcagctgaccccctccccgcaatccctcaaaccttgaggagaagtggggaccccacccctcatcaggagttccagtgctgcatgcgattatctacccacgtccacgcggccacctcaccctctccgcacacctctggctgtctttttgtactttttgttccagagctgcttctgtctggtttatttaggttttatccttccttttctttgagagttcgtgaagagggaagccaggattggggacctgatggagagtgagagcatgtgaggggtagtgggatggtggggtaccagccactggaggggtcatccttgcccatcgggaccagaaacctgggagagacttggatgaggagtggttgggctgtgcctgggcctagcacggacatggtctgtcctgacagcactcctcggcaggcatggctggtgcctgaagaccccagatgtgagggcaccaccaagaatttgtggcctaccttgtgagggagagaactgagcatctccagcattctcagccacaaccaaaaaaaaataaaaagggcagccctccttaccactgtggaagtccctcagaggccttggggcatgacccagtgaagatgcaggtttgaccaggaaagcagcgctagtggagggttggagaaggaggtaaaggatgagggttcatcatccctccctgcctaaggaagctaaaagcatggccctgctgcccctccctgcctccacccacagtggagagggctacaaaggaggacaagaccctctcaggctgtcccaagctcccaagagcttccagagctctgacccacagcctccaagtcaggtggggtggagtcccagagctgcacagggtttggcccaagtttctaagggaggcacttcctcccctcgcccatcagtgccagcccctgctggctggtgcctgagcccctcagacagccccctgccccgcaggcctgccttctcagggacttctgcggggcctgaggcaagccatggagtgagacccaggagccggacacttctcaggaaatggcttttcccaacccccagcccccacccggtggttcttcctgttctgtgactgtgtatagtgccaccacagcttatggcatctcattgaggacaaagaaaactgcacaataaaaccaagcctctggaatctg

SEQ ID NO: 62258 - DNA, 1603 bp, Homo sapiens
  misc_feature (15)..(15): n is a, c, g, or t
tgctgtgttggtacnccggagtatgggatatgtgaccggccgcggcggcgcgtctggaggaggctgcagcagcggaagaccccagtccagatccaggactgagatcccagaaccatgaacctggccatcagcaaatacaacatgaaggtcctctacttatccgccttcactagcaaggacgagggcacctacacgtgtgcactccaccactctggccattccccacccatctcctcccagaacgtcacagtgctcagagacaaactggtcaagtgtgagggcatcagcctgctggctcagaacacctcgtggctgctgctgctcctgctctccctctccctcctccaggccacggatttcatgtccctgtgactggtggggcccatggaggagacaggaagcctcaagttccagtgcagagatcctacttctctgagtcagctgaccccctccccgcaatccctcaaaccttgaggagaagtggggaccccacccctcatcaggagttccagtgctgcatgcgattatctacccacgtccacgcggccacctcaccctctccgcacacctctggctgtctttttgtactttttgttccagagctgcttctgtctggtttatttaggttttatccttccttttctttgagagttcgtgaagagggaagccaggattggggacctgatggagagtgagagcatgtgaggggtagtgggatggtggggtaccagccactggaggggtcatccttgcccatcgggaccagaaacctgggagagacttggatgaggagtggttgggctgtgcctgggcctagcacggacatggtctgtcctgacagcactcctcggcaggcatggctggtgcctgaagaccccagatgtgagggcaccaccaagaatttgtggcctaccttgtgagggagagaactgagcatctccagcattctcagccacaaccaaaaaaaaataaaaagggcagccctccttaccactgtggaagtccctcagaggccttggggcatgacccagtgaagatgcaggtttgaccaggaaagcagcgctagtggagggttggagaaggaggtaaaggatgagggttcatcatccctccctgcctaaggaagctaaaagcatggccctgctgcccctccctgcctccacccacagtggagagggctacaaaggaggacaagaccctctcaggctgtcccaagctcccaagagcttccagagctctgacccacagcctccaagtcaggtggggtggagtcccagagctgcacagggtttggcccaagtttctaagggaggcacttcctcccctcgcccatcagtgccagcccctgctggctggtgcctgagcccctcagacagccccctgccccgcaggcctgccttctcagggacttctgcggggcctgaggcaagccatggagtgagacccaggagccggacacttctcaggaaatggcttttcccaacccccagcccccacccggtggttcttcctgttctgtgactgtgtatagtgccaccacagcttatggcatctcattgaggacaaagaaaactgcacaataaaaccaagcctctggaatctg

SEQ ID NO: 62259 - DNA, 1808 bp, Homo sapiens
  misc_feature (458)..(459): n is a, c, g, or t
  misc_feature (463)..(463): n is a, c, g, or t
  misc_feature (465)..(467): n is a, c, g, or t
  misc_feature (471)..(471): n is a, c, g, or t
  misc_feature (475)..(475): n is a, c, g, or t
  misc_feature (497)..(497): n is a, c, g, or t
tcccgctgcgcggcaagtttggaaagggtgggccatgcagcagcggaagacccagtccagatccaggactgagatcccagaaccatgaacctggccatcagcatcgctctcctgctaacagtcttgcaggtctcccgagggcagaaggtgaccagcctaacggcctgcctagtggaccagagccttcgtctggactgccgccatgagaataccagcagttcacccatccagtacgagttcagcctgacccgtgagacaaagaagcacgtgctctttggcactgtgggggtgcctgagcacacataccgctcccgaaccaacttcaccagcaaatacaacatgaaggtcctctacttatccgccttcactagcaaggacgagggcacctacacgtgtgcactccaccactctggccattccccacccatctcctcccagaacgtcacagtgctcagagnntttntnnntttnttantttttttttttttttttttttngtcttcataacacctcgtggctgctgctgctcctgctctccctctccctcctccaggccacggatttcatgtccctgtgactggtggggcccatggaggagacaggaagcctcaagttccagtgcagagatcctacttctctgagtcagctgaccccctccccgcaatccctcaaaccttgaggagaagtggggaccccacccctcatcaggagttccagtgctgcatgcgattatctacccacgtccacgcggccacctcaccctctccgcacacctctggctgtctttttgtactttttgttccagagctgcttctgtctggtttatttaggttttatccttccttttctttgagagttcgtgaagagggaagccaggattggggacctgatggagagtgagagcatgtgaggggtagtgggatggtggggtaccagccactggaggggtcatccttgcccatcgggaccagaaacctgggagagacttggatgaggagtggttgggctgtgcctgggcctagcacggacatggtctgtcctgacagcactcctcggcaggcatggctggtgcctgaagaccccagatgtgagggcaccaccaagaatttgtggcctaccttgtgagggagagaactgagcatctccagcattctcagccacaaccaaaaaaaaataaaaagggcagccctccttaccactgtggaagtccctcagaggccttggggcatgacccagtgaagatgcaggtttgaccaggaaagcagcgctagtggagggttggagaaggaggtaaaggatgagggttcatcatccctccctgcctaaggaagctaaaagcatggccctgctgcccctccctgcctccacccacagtggagagggctacaaaggaggacaagaccctctcaggctgtcccaagctcccaagagcttccagagctctgacccacagcctccaagtcaggtggggtggagtcccagagctgcacagggtttggcccaagtttctaagggaggcacttcctcccctcgcccatcagtgccagcccctgctggctggtgcctgagcccctcagacagccccctgccccgcaggcctgccttctcagggacttctgcggggcctgaggcaagccatggagtgagacccaggagccggacacttctcaggaaatggcttttcccaacccccagcccccacccggtggttcttcctgttctgtgactgtgtatagtgccaccacagcttatggcatctcattgaggacaaagaaaactgcacaataaaaccaagcctctggaatctg

SEQ ID NO: 62260 - DNA, 1244 bp, Homo sapiens
atccccggtgaaaactgcgggctccgagctgggtgcagcaaccggaggcggcggcgcgtctggaggaggctgcagcagcggaagaccccagtccagatccaggactgagatcccagaaccatgaacctggccatcagcatcgctctcctgctaacagtcttgcaggtctcccgagggcagaaggtgaccagcctaacggcctgcctagtggaccagagccttcgtctggactgccgccatgagaataccagcagttcacccatccagtacgagttcagcctgacccgtgagacaaagaagcacgtgctctttggcactgtgggggtgcctgagcacacataccgctcccgaaccaacttcaccagcaaatacaacatgaaggtcctctacttatccgccttcactagcaaggacgagggcacctacacgtgtgcactccaccactctggccattccccacccatctcctcccagaacgtcacagtgctcagagacaaactggtcaagtgtgagggcatcagcctgctggctcagaacacctcgtggctgctgctgctcctgctctccctctccctcctccaggccacggatttcatgtccctgtgactggtggggcccatggaggagacaggaagcctcaagttccagtgcagagatcctacttctctgagtcagctgaccccctccccgcaatccctcaaaccttgaggagaagtggggaccccacccctcatcaggagttccagtgctgcatgcgattatctacccacgtccacgcggccacctcaccctctccgcacacctctggctgtctttttgtactttttgttccagagctgcttctgtctggtttatttaggttttatccttccagagctctgacccacagcctccaagtcaggtggggtggagtcccagagctgcacagggtttggcccaagtttctaagggaggcacttcctcccctcgcccatcagtgccagcccctgctggctggtgcctgagcccctcagacagccccctgccccgcaggcctgccttctcagggacttctgcggggcctgaggcaagccatggagtgagacccaggagccggacacttctcaggaaatggcttttcccaacccccagcccccacccggtggttcttcctgttctgtgactgtgtatagtgccaccacagcttatggcatctcattgaggacaaagaaaactgcacaataaaaccaagcctctggaatctg

SEQ ID NO: 62261 - DNA, 704 bp, Homo sapiens
tggttgtggctgagaatgctggagatgctcagttctctccctcacaaggtaggccacaaccaaaaaaaaataaaaagggcagccctccttaccactgtggaagtccctcagaggccttggggcatgacccagtgaagatgcaggtttgaccaggaaagcagcgctagtggagggttggagaaggaggtaaaggatgagggttcatcatccctccctgcctaaggaagctaaaagcatggccctgctgcccctccctgcctccacccacagtggagagggctacaaaggaggacaagaccctctcaggctgtcccaagctcccaagagcttccagagctctgacccacagcctccaagtcaggtggggtggagtcccagagctgcacagggtttggcccaagtttctaagggaggcacttcctcccctcgcccatcagtgccagcccctgctggctggtgcctgagcccctcagacagccccctgccccgcaggcctgccttctcagggacttctgcggggcctgaggcaagccatggagtgagacccaggagccggacacttctcaggaaatggcttttcccaacccccagcccccacccggtggttcttcctgttctgtgactgtgtatagtgccaccacagcttatggcatctcattgaggacaaagaaaactgcacaataaaaccaagcctctggaatctg

SEQ ID NO: 62262 - DNA, 1160 bp, Homo sapiens
atccccggtgaaaactgcgggctccgagctgggtgcagcaaccggaggcggcggcgcgtctggaggaggctgcagcagcggaagaccccagtccagatccaggactgagatcccagaaccatgaacctggccatcagcatcgctctcctgctaacagtcttgcaggtctcccgagggcagaaggtgaccagcctaacggcctgcctagtggaccagagccttcgtctggactgccgccatgagaataccagcagttcacccatccagtacgagttcagcctgacccgtgagacaaagaagcacgtgctctttggcactgtgggggtgcctgagcacacataccgctcccgaaccaacttcaccagcaaatacaacatgaaggtcctctacttatccgccttcactagcaaggacgagggcacctacacgtgtgcactccaccactctggccattccccacccatctcctcccagaacgtcacagtgctcagagacaaactggtcaagtgtgagggcatcagcctgctggctcagaacacctcgtggctgctgctgctcctgctctccctctccctcctccaggccacggatttcatgtccctgtgactggtggggcccatggaggagacaggaagcctcaagttccagtgcagagatcctaacttctcaggaaatggcttttcccaacccccagcccccacccggtggttcttcctgttctgtgactgtgtatagtgccaccacagcttatggcatctcattgaggacaaagaaaactgcacaataaaaccaagcctctggaatctgctcgtgtccacctggccttcgctcctccagcagtgcctgcctgcccccgcttcgctggggtctccacgggtgaggctggggaacgccacctcttcctcttccctgacttctccccaaccacttagtagcaacgctaccccaggggctaatgactgcacactgggcttcttttcagaatgaccctaacgagacacatttgcccaaataaacgaacatcccatgtctgctgactcacctggctggaacaacatgcttactgccaacatgtgggccgaaccacatggccctggctctggaatgcacaagtggctttgcgtgaatctgcgctaagctatgcagtctgctttttcttc

SEQ ID NO: 62263 - DNA, 865 bp, Homo sapiens
gggtcgatctagacgattttccgctctcacccaccccaggcacctacacgtgtgcactccaccactctggccattccccacccatctcctcccagaacgtcacagtgctcagagacaaactggtcaagtgtgagggcatcagcctgctggctcagaacacctcgtggctgctgctgctcctgctctccctctccctcctccaggccacggatttcatgtccctgtgactggtggggcccatggaggagacaggaagcctcaagttccagtgcagagatcctacttctctgagtcagctgaccccctccccgcaatccctcaaaccttgaggagaagtggggaccccacccctcatcaggagttccagtgctgcatgcgattatctacccacgtccacgcggccacctcaccctctccgcacacctctggctgtctttttgtactttttgttccagagctgcttctgtctggtttatttaggttttatccttccagagctctgacccacagcctccaagtcaggtggggtggagtcccagagctgcacagggtttggcccaagtttctaagggaggcacttcctcccctcgcccatcagtgccagcccctgctggctggtgcctgagcccctcagacagccccctgccccgcaggcctgccttctcagggacttctgcggggcctgaggcaagccatggagtgagacccaggagccggacacttctcaggaaatggcttttcccaacccccagcccccacccggtggttcttcctgttctgtgactgtgtatagtgccaccacagcttatggcatctcattgaggacaaagaaaactgcacaataaaaccaagcctctggaatctg

SEQ ID NO: 62264 - DNA, 1831 bp, Homo sapiens
  misc_feature (15)..(15): n is a, c, g, or t
tgctgtgttggtacnccggagtatgggatatgtgaccggccgcggcggcgcgtctggaggaggctgcagcagcggaagaccccagtccagatccaggactgagatcccagaaccatgaacctggccatcagcatcgctctcctgctaacagtcttgcaggtctcccgagggcagaaggtgaccagcctaacggcctgcctagtggaccagagccttcgtctggactgccgccatgagaataccagcagttcacccatccagtacgagttcagcctgacccgtgagacaaagaagcacgtgctctttggcactgtgggggtgcctgagcacacataccgctcccgaaccaacttcaccagcaaatacaacatgaaggtcctctacttatccgccttcactagcaaggacgagggcacctacacgtgtgcactccaccactctggccattccccacccatctcctcccagaacgtcacagtgctcagagacaaactggtcaagtgtgagggcatcagcctgctggctcagaacacctcgtggctgctgctgctcctgctctccctctccctcctccaggccacggatttcatgtccctgtgactggtggggcccatggaggagacaggaagcctcaagttccagtgcagagatcctacttctctgagtcagctgaccccctccccgcaatccctcaaaccttgaggagaagtggggaccccacccctcatcaggagttccagtgctgcatgcgattatctacccacgtccacgcggccacctcaccctctccgcacacctctggctgtctttttgtactttttgttccagagctgcttctgtctggtttatttaggttttatccttccttttctttgagagttcgtgaagagggaagccaggattggggacctgatggagagtgagagcatgtgaggggtagtgggatggtggggtaccagccactggaggggtcatccttgcccatcgggaccagaaacctgggagagacttggatgaggagtggttgggctgtgcctgggcctagcacggacatggtctgtcctgacagcactcctcggcaggcatggctggtgcctgaagaccccagatgtgagggcaccaccaagaatttgtggcctaccttgtgagggagagaactgagcatctccagcattctcagccacaaccaaaaaaaaataaaaagggcagccctccttaccactgtggaagtccctcagaggccttggggcatgacccagtgaagatgcaggtttgaccaggaaagcagcgctagtggagggttggagaaggaggtaaaggatgagggttcatcatccctccctgcctaaggaagctaaaagcatggccctgctgcccctccctgcctccacccacagtggagagggctacaaaggaggacaagaccctctcaggctgtcccaagctcccaagagcttccagagctctgacccacagcctccaagtcaggtggggtggagtcccagagctgcacagggtttggcccaagtttctaagggaggcacttcctcccctcgcccatcagtgccagcccctgctggctggtgcctgagcccctcagacagccccctgccccgcaggcctgccttctcagggacttctgcggggcctgaggcaagccatggagtgagacccaggagccggacacttctcaggaaatggcttttcccaacccccagcccccacccggtggttcttcctgttctgtgactgtgtatagtgccaccacagcttatggcatctcattgaggacaaagaaaactgcacaataaaaccaagcctctggaatctg

SEQ ID NO: 62265 - DNA, 2235 bp, Homo sapiens
atccccggtgaaaactgcgggctccgagctgggtgcagcaaccggaggcggcggcgcgtctggaggaggctgcagcagcggaagaccccagtccagatccaggactgagatcccagaaccatgaacctggccatcagcatcgctctcctgctaacagtcttgcaggtctcccgagggcagaaggtgaccagcctaacggcctgcctagtggaccagagccttcgtctggactgccgccatgagaataccagcagttcacccatccagtacgagttcagcctgacccgtgagacaaagaagcacgtgctctttggcactgtgggggtgcctgagcacacataccgctcccgaaccaacttcaccagcaaatacaacatgaaggtcctctacttatccgccttcactagcaaggacgagggcacctacacgtgtgcactccaccactctggccattccccacccatctcctcccagaacgtcacagtgctcagagacaaactggtcaagtgtgagggcatcagcctgctggctcagaacacctcgtggctgctgctgctcctgctctccctctccctcctccaggccacggatttcatgtccctgtgactggtggggcccatggaggagacaggaagcctcaagttccagtgcagagatcctacttctctgagtcagctgaccccctccccgcaatccctcaaaccttgaggagaagtggggaccccacccctcatcaggagttccagtgctgcatgcgattatctacccacgtccacgcggccacctcaccctctccgcacacctctggctgtctttttgtactttttgttccagagctgcttctgtctggtttatttaggttttatccttccttttctttgagagttcgtgaagagggaagccaggattggggacctgatggagagtgagagcatgtgaggggtagtgggatggtggggtaccagccactggaggggtcatccttgcccatcgggaccagaaacctgggagagacttggatgaggagtggttgggctgtgcctgggcctagcacggacatggtctgtcctgacagcactcctcggcaggcatggctggtgcctgaagaccccagatgtgagggcaccaccaagaatttgtggcctaccttgtgagggagagaactgagcatctccagcattctcagccacaaccaaaaaaaaataaaaagggcagccctccttaccactgtggaagtccctcagaggccttggggcatgacccagtgaagatgcaggtttgaccaggaaagcagcgctagtggagggttggagaaggaggtaaaggatgagggttcatcatccctccctgcctaaggaagctaaaagcatggccctgctgcccctccctgcctccacccacagtggagagggctacaaaggaggacaagaccctctcaggctgtcccaagctcccaagagcttccagagctctgacccacagcctccaagtcaggtggggtggagtcccagagctgcacagggtttggcccaagtttctaagggaggcacttcctcccctcgcccatcagtgccagcccctgctggctggtgcctgagcccctcagacagccccctgccccgcaggcctgccttctcagggacttctgcggggcctgaggcaagccatggagtgagacccaggagccggacacttctcaggaaatggcttttcccaacccccagcccccacccggtggttcttcctgttctgtgactgtgtatagtgccaccacagcttatggcatctcattgaggacaaagaaaactgcacaataaaaccaagcctctggaatctggagaaacaaacaatacaaaagacaagaacaaaaaaacacaaaaaaaaagggggggcggccccctttttatgttttgttttacaaaaacaggggccccgcagatgcgggccaagaaaagggggccgtggtgcgcagcggtgcacaaagggggggaagagaggggcggaaccaagagtgaacgcgggcggggaaaacgattgcgcaaccccgccgcggcgaagagcgggcgggacacaacaagcgcaccgtgggctaccaaccattggcgacaagaaaagaacccccccccagcggggggaagaaagacccccaccgcgcaaaccatgagaggcccacccccccgaggagaacggagacacccagtgagaaaaagagccctgaccccggtgcacgcaccg

SEQ ID NO: 62266 - DNA, 1816 bp, Homo sapiens
  misc_feature (1432)..(1432): n is a, c, g, or t
  misc_feature (1435)..(1435): n is a, c, g, or t
  misc_feature (1437)..(1437): n is a, c, g, or t
atccccggtgaaaactgcgggctccgagctgggtgcagcaaccggaggcggcggcgcgtctggaggaggctgcagcagcggaagaccccagtccagatccaggactgagatcccagaaccatgaacctggccatcagcatcgctctcctgctaacagtcttgcaggtctcccgagggcagaaggtgaccagcctaacggcctgcctagtggaccagagccttcgtctggactgccgccatgagaataccagcagttcacccatccagtacgagttcagcctgacccgtgagacaaagaagcacgtgctctttggcactgtgggggtgcctgagcacacataccgctcccgaaccaacttcaccagcaaatacaacatgaaggtcctctacttatccgccttcactagcaaggacgagggcacctacacgtgtgcactccaccactctggccattccccacccatctcctcccagaacgtcacagtgctcagagacaaactggtcaagtgtgagggcatcagcctgctggctcagaacacctcgtggctgctgctgctcctgctctccctctccctcctccaggccacggatttcatgtccctgtgactggtggggcccatggaggagacaggaagcctcaagttccagtgcagagatcctacttctctgagtcagctgaccccctccccgcaatccctcaaaccttgaggagaagtggggaccccacccctcatcaggagttccagtgctgcatgcgattatctacccacgtccacgcggccacctcaccctctccgcacacctctggctgtctttttgtactttttgttccagagctgcttctgtctggtttatttaggttttatccttccttttctttgagagttcgtgaagagggaagccaggattggggacctgatggagagtgagagcatgtgaggggtagtgggatggtggggtaccagccactggaggggtcatccttgcccatcgggaccagaaacctgggagagacttggatgaggagtggttgggctgtgcctgggcctagcacggacatggtctgtcctgacagcactcctcggcaggcatggctggtgcctgaagaccccagatgtgagggcaccaccaagaatttgtggcctaccttgtgagggagagaactgagcatctccagcattctcagccacaaccaaaaaaaaataaaaagggcagccctccttaccactgtggaagtccctcagaggccttggggcatgacccagtgaagatgcaggtttgaccaggaaagcagcgccacccctcatcaggagttccagtgctgcatgcgattatctacccacgtccacgcggccacctcaccctctccgcacacctctggctgtctttttgtactttttgttccagagctgttctgtctggtttatttagnttntntccttccagagctctgacccacagcctccaagtcaggtggggtggagtcccagagctgcacagggtttggcccaagtttctaagggaggcacttcctcccctcgcccatcagtgccagcccctgctggctggtgcctgagcccctcagacagccccctgccccgcaggcctgccttctcagggacttctgcggggcctgaggcaagccatggagtgagacccaggagccggacacttctcaggaaatggcttttcccaacccccagcccccacccggtggttcttcctgttctgtgactgtgtatagtgccaccacagcttatggcatctcattgaggacaaagaaaactgcacaataaaaccaagcctctggaatctg

SEQ ID NO: 62267 - DNA, 1703 bp, Homo sapiens
ctccctggacgtcagaacaacgctcttgcaggtctcccgagggcagaaggtgaccagcctaacggcctgcctagtggaccagagccttcgtctggactgccgccatgagaataccagcagttcacccatccagtacgagttcagcctgacccgtgagacaaagaagcacgtgctctttggcactgtgggggtgcctgagcacacataccgctcccgaaccaacttcaccagcaaatacaacatgaaggtcctctacttatccgccttcactagcaaggacgagggcacctacacgtgtgcactccaccactctggccattccccacccatctcctcccagaacgtcacagtgctcagagacaaactggtcaagtgtgagggcatcagcctgctggctcagaacacctcgtggctgctgctgctcctgctctccctctccctcctccaggccacggatttcatgtccctgtgactggtggggcccatggaggagacaggaagcctcaagttccagtgcagagatcctacttctctgagtcagctgaccccctccccgcaatccctcaaaccttgaggagaagtggggaccccacccctcatcaggagttccagtgctgcatgcgattatctacccacgtccacgcggccacctcaccctctccgcacacctctggctgtctttttgtactttttgttccagagctgcttctgtctggtttatttaggttttatccttccttttctttgagagttcgtgaagagggaagccaggattggggacctgatggagagtgagagcatgtgaggggtagtgggatggtggggtaccagccactggaggggtcatccttgcccatcgggaccagaaacctgggagagacttggatgaggagtggttgggctgtgcctgggcctagcacggacatggtctgtcctgacagcactcctcggcaggcatggctggtgcctgaagaccccagatgtgagggcaccaccaagaatttgtggcctaccttgtgagggagagaactgagcatctccagcattctcagccacaaccaaaaaaaaataaaaagggcagccctccttaccactgtggaagtccctcagaggccttggggcatgacccagtgaagatgcaggtttgaccaggaaagcagcgctagtggagggttggagaaggaggtaaaggatgagggttcatcatccctccctgcctaaggaagctaaaagcatggccctgctgcccctccctgcctccacccacagtggagagggctacaaaggaggacaagaccctctcaggctgtcccaagctcccaagagcttccagagctctgacccacagcctccaagtcaggtggggtggagtcccagagctgcacagggtttggcccaagtttctaagggaggcacttcctcccctcgcccatcagtgccagcccctgctggctggtgcctgagcccctcagacagccccctgccccgcaggcctgccttctcagggacttctgcggggcctgaggcaagccatggagtgagacccaggagccggacacttctcaggaaatggcttttcccaacccccagcccccacccggtggttcttcctgttctgtgactgtgtatagtgccaccacagcttatggcatctcattgaggacaaagaaaactgcacaataaaaccaagcctctggaatctg

SEQ ID NO: 62268 - DNA, 1688 bp, Homo sapiens
ccgaaccaacttcaccagcaaatacaacatgaaggtgaccagcctaacggcctgcctagtggaccagagccttcgtctggactgccgccatgagaataccagcagttcacccatccagtacgagttcagcctgacccgtgagacaaagaagcacgtgctctttggcactgtgggggtgcctgagcacacataccgctcccgaaccaacttcaccagcaaatacaacatgaaggtcctctacttatccgccttcactagcaaggacgagggcacctacacgtgtgcactccaccactctggccattccccacccatctcctcccagaacgtcacagtgctcagagacaaactggtcaagtgtgagggcatcagcctgctggctcagaacacctcgtggctgctgctgctcctgctctccctctccctcctccaggccacggatttcatgtccctgtgactggtggggcccatggaggagacaggaagcctcaagttccagtgcagagatcctacttctctgagtcagctgaccccctccccgcaatccctcaaaccttgaggagaagtggggaccccacccctcatcaggagttccagtgctgcatgcgattatctacccacgtccacgcggccacctcaccctctccgcacacctctggctgtctttttgtactttttgttccagagctgcttctgtctggtttatttaggttttatccttccttttctttgagagttcgtgaagagggaagccaggattggggacctgatggagagtgagagcatgtgaggggtagtgggatggtggggtaccagccactggaggggtcatccttgcccatcgggaccagaaacctgggagagacttggatgaggagtggttgggctgtgcctgggcctagcacggacatggtctgtcctgacagcactcctcggcaggcatggctggtgcctgaagaccccagatgtgagggcaccaccaagaatttgtggcctaccttgtgagggagagaactgagcatctccagcattctcagccacaaccaaaaaaaaataaaaagggcagccctccttaccactgtggaagtccctcagaggccttggggcatgacccagtgaagatgcaggtttgaccaggaaagcagcgctagtggagggttggagaaggaggtaaaggatgagggttcatcatccctccctgcctaaggaagctaaaagcatggccctgctgcccctccctgcctccacccacagtggagagggctacaaaggaggacaagaccctctcaggctgtcccaagctcccaagagcttccagagctctgacccacagcctccaagtcaggtggggtggagtcccagagctgcacagggtttggcccaagtttctaagggaggcacttcctcccctcgcccatcagtgccagcccctgctggctggtgcctgagcccctcagacagccccctgccccgcaggcctgccttctcagggacttctgcggggcctgaggcaagccatggagtgagacccaggagccggacacttctcaggaaatggcttttcccaacccccagcccccacccggtggttcttcctgttctgtgactgtgtatagtgccaccacagcttatggcatctcattgaggacaaagaaaactgcacaataaaaccaagcctctggaatctg

SEQ ID NO: 62269 - DNA, 1790 bp, Homo sapiens
gccacagcggcccaggaccagaccctggctggaagccagaacgcagactgcaggggccgcgcctggctcaggcggtcccacccctcgggacgtggggtcacttccttcatgtaagacgttggccgaaatttctactacctgtgtctagtcctcccctccaagagcattaagctatttaaaaatcaacggaaaagaggaaaaaaaagaacagaggcccgcctcgtacccgagtcaggacccctccgtgttgcttctgctgaaattggagtggggtgatcctggagggagtaggcgctgcacgaagcgagctgcaaacagcaaatacaacatgaaggtcctctacttatccgccttcactagcaaggacgagggcacctacacgtgtgcactccaccactctggccattccccacccatctcctcccagaacgtcacagtgctcagagacaaactggtcaagtgtgagggcatcagcctgctggctcagaacacctcgtggctgctgctgctcctgctctccctctccctcctccaggccacggatttcatgtccctgtgactggtggggcccatggaggagacaggaagcctcaagttccagtgcagagatcctacttctctgagtcagctgaccccctccccgcaatccctcaaaccttgaggagaagtggggaccccacccctcatcaggagttccagtgctgcatgcgattatctacccacgtccacgcggccacctcaccctctccgcacacctctggctgtctttttgtactttttgttccagagctgcttctgtctggtttatttaggttttatccttccttttctttgagagttcgtgaagagggaagccaggattggggacctgatggagagtgagagcatgtgaggggtagtgggatggtggggtaccagccactggaggggtcatccttgcccatcgggaccagaaacctgggagagacttggatgaggagtggttgggctgtgcctgggcctagcacggacatggtctgtcctgacagcactcctcggcaggcatggctggtgcctgaagaccccagatgtgagggcaccaccaagaatttgtggcctaccttgtgagggagagaactgagcatctccagcattctcagccacaaccaaaaaaaaataaaaagggcagccctccttaccactgtggaagtccctcagaggccttggggcatgacccagtgaagatgcaggtttgaccaggaaagcagcgctagtggagggttggagaaggaggtaaaggatgagggttcatcatccctccctgcctaaggaagctaaaagcatggccctgctgcccctccctgcctccacccacagtggagagggctacaaaggaggacaagaccctctcaggctgtcccaagctcccaagagcttccagagctctgacccacagcctccaagtcaggtggggtggagtcccagagctgcacagggtttggcccaagtttctaagggaggcacttcctcccctcgcccatcagtgccagcccctgctggctggtgcctgagcccctcagacagccccctgccccgcaggcctgccttctcagggacttctgcggggcctgaggcaagccatggagtgagacccaggagccggacacttctcaggaaatggcttttcccaacccccagcccccacccggtggttcttcctgttctgtgactgtgtatagtgccaccacagcttatggcatctcattgaggacaaagaaaactgcacaataaaaccaagcctctggaatctg

SEQ ID NO: 62270 - DNA, 1232 bp, Homo sapiens
ccggaattcccgggcccgcgcgtcgcgaagcctcaagttccagtgcagagatcctacttctctgagtcagctgaccccctccccgcaatccctcaaaccttgaggagaagtggggaccccacccctcatcaggagttccagtgctgcatgcgattatctacccacgtccacgcggccacctcaccctctccgcacacctctggctgtctttttgtactttttgttccagagctgcttctgtctggtttatttaggttttatccttccttttctttgagagttcgtgaagagggaagccaggattggggacctgatggagagtgagagcatgtgaggggtagtgggatggtggggtaccagccactggaggggtcatccttgcccatcgggaccagaaacctgggagagacttggatgaggagtggttgggctgtgcctgggcctagcacggacatggtctgtcctgacagcactcctcggcaggcatggctggtgcctgaagaccccagatgtgagggcaccaccaagaatttgtggcctaccttgtgagggagagaactgagcatctccagcattctcagccacaaccaaaaaaaaataaaaagggcagccctccttaccactgtggaagtccctcagaggccttggggcatgacccagtgaagatgcaggtttgaccaggaaagcagcgctagtggagggttggagaaggaggtaaaggatgagggttcatcatccctccctgcctaaggaagctaaaagcatggccctgctgcccctccctgcctccacccacagtggagagggctacaaaggaggacaagaccctctcaggctgtcccaagctcccaagagcttccagagctctgacccacagcctccaagtcaggtggggtggagtcccagagctgcacagggtttggcccaagtttctaagggaggcacttcctcccctcgcccatcagtgccagcccctgctggctggtgcctgagcccctcagacagccccctgccccgcaggcctgccttctcagggacttctgcggggcctgaggcaagccatggagtgagacccaggagccggacacttctcaggaaatggcttttcccaacccccagcccccacccggtggttcttcctgttctgtgactgtgtatagtgccaccacagcttatggcatctcattgaggacaaagaaaactgcacaataaaaccaagcctctggaatctg

SEQ ID NO: 62271 - DNA, 1049 bp, Homo sapiens
atccccggtgaaaactgcgggctccgagctgggtgcagcaaccggaggcggcggcgcgtctggaggaggctgcagcagcggaagaccccagtccagatccaggactgagatcccagaaccatgaacctggccatcagcatcgctctcctgctaacagtcttgcaggtctcccgagggcagaaggtgaccagcctaacggcctgcctagtggaaaacctgggagagacttggatgaggagtggttgggctgtgcctgggcctagcacggacatggtctgtcctgacagcactcctcggcaggcatggctggtgcctgaagaccccagatgtgagggcaccaccaagaatttgtggcctaccttgtgagggagagaactgagcatctccagcattctcagccacaaccaaaaaaaaataaaaagggcagccctccttaccactgtggaagtccctcagaggccttggggcatgacccagtgaagatgcaggtttgaccaggaaagcagcgctagtggagggttggagaaggaggtaaaggatgagggttcatcatccctccctgcctaaggaagctaaaagcatggccctgctgcccctccctgcctccacccacagtggagagggctacaaaggaggacaagaccctctcaggctgtcccaagctcccaagagcttccagagctctgacccacagcctccaagtcaggtggggtggagtcccagagctgcacagggtttggcccaagtttctaagggaggcacttcctcccctcgcccatcagtgccagcccctgctggctggtgcctgagcccctcagacagccccctgccccgcaggcctgccttctcagggacttctgcggggcctgaggcaagccatggagtgagacccaggagccggacacttctcaggaaatggcttttcccaacccccagcccccacccggtggttcttcctgttctgtgactgtgtatagtgccaccacagcttatggcatctcattgaggacaaagaaaactgcacaataaaaccaagcctctggaatctg

SEQ ID NO: 62272 - DNA, 1129 bp, Homo sapiens
atccccggtgaaaactgcgggctccgagctgggtgcagcaaccggaggcggcggcgcgtctggaggaggctgcagcagcggaagaccccagtccagatccaggactgagatcccagaaccatgaacctggccatcagcatcgctctcctgctaacagtcttgcaggtctcccgagggcagaaggtgaccagcctaacggcctgcctagtggaccagagccttcgtctggactgccgccatgagaataccagcagttcacccatccagtacgagttcagcctgacccgtgagacaaagaagcacgtgctctttggcactgtgggggtgcctgagcacacataccgctcccgaaccaacttcaccagcaaatacaacatgaaggtcctctacttatccgccttcactagcaaggacgagggcacctacacgtgtgcactccaccactctggccattccccacccatctcctcccagaacgtcacagtgctcagagacaaactggtcaagtgtgagggcatcagcctgctggctcagaacacctcgtggctgctgctgctcctgctctccctctccctcctccaggccacggatttcatgtccctgtgactggtggggcccatggaggagacaggaagcctcaagttccagtgcagagatcctacttctctgagtcagctgaccccctccccgcaatccctcaaaccttgaggagaagtggggaccccacccctcatcaggagttccagtgctgcatgcgattatctacccacgtccacctcgtgtccacctggccttcgctcctccagcagtgcctgcctgcccccgcttcgctggggtctccacgggtgaggctggggaacgccacctcttcctcttccctgacttctccccaaccacttagtagcaacgctaccccaggggctaatgactgcacactgggcttcttttcagaatgaccctaacgagacacatttgcccaaataaacgaacatcccatgtctgctgactcacctggctggaacaacatgcttactgccaacatgtgggccgaaccacatggccctggctctggaatgcacaagtggctttgcgtgaatctgcgctaagctatgcagtctgctttttcttc

SEQ ID NO: 62273 - DNA, 807 bp, Homo sapiens
atccccggtgaaaactgcgggctccgagctgggtgcagcaaccggaggcggcggcgcgtctggaggaggctgcagcagcggaagaccccagtccagatccaggactgagatcccagaaccatgaacctggccatcagcatcgctctcctgctaacagtcttgcaggtctcccgagggcagaaggtgaccagcctaacggcctgcctagtggaccagagccttcgtctggactgccgccatgagaataccagcagttcacccatccagtacgagttcagcctgacccgtgagacaaagaagcacgtgctctttggcactgtgggggtgcctgagcacacataccgctcccgaaccaacttcaccagcaaatacaacatgaaggtcctctacttatccgccttcactagcaaggacgagggcacctacacgtgtgcactccaccactctggccattccccacccatctcctcccagaacgtcacagtgctcagagacaaactggtcaagtgtgagggcatcagcctgctggctcagaacacctcgtggctgctgctgctcctgctctccctctccctcctccaggccacggatttcatgtccctgtgactggtggggcccatggaggagacaggaagcctcaagttccagtgcagagatcctaacttctcaggaaatggcttttcccaacccccagcccccacccggtggttcttcctgttctgtgactgtgtatagtgccaccacagcttatggcatctcattgaggacaaagaaaactgcacaataaaaccaagcctctggaatctg

SEQ ID NO: 62274 - DNA, 871 bp, Homo sapiens
cgatttcggctcacttcaacctccccctcccgggttcaagggattctcgtgcctcactcagcctcctgagtagctgggattacaggcgcccgccatcatacctggctaatttttgtatttttagtagagacggggtttcaccatgttggccaggctggtcttgaactcctgatctcaagtgatacactttgcctcagcctcccaaagtgttgggattacaggcgtgagccaccacacctggtcatctttatctttttgacatgttcatcctcgtccccacactaaggtagagataaagcaattatcttctcaatgcttgaaacattttaagttgaattcattctatgattttctttagatttctccgcatatatcaatggaaaaaattaactatcttaatttctcatctatatagaaatgccagtgcaacaaaaccaaatgtagggttagaatatcagcaaggcaaagagagaagagaaaactctttcaacccattttctatacactccattattctttcttagaattcttacacaaatatttagtacaattttggaggaatagtagaaacattttatagtttttccttgtcctgtatcttcatctagccttcttttcagctttcctatgtcctttgttctccttttataaggagagatgagttgtacaataacatccattttcataagttatttaggtaaattattttgaagtatacatgttggatttccaaagcagctgtttttaattaaaatttaattaactaatttatgtcattatatatcttgtgttaagacaaccttaactttcttttagtaagattttacccaactgtttaccctaattatagacaattaaaatgttctctctt

SEQ ID NO: 62275 - DNA, 885 bp, Homo sapiens
caaacttatgtgctgagcacttgagtcacatgggcccagttggcttgacctggtggtatgcccaaccttgtatccaatcactgtggccagagaatggaatatggtgataggcttagccaaggtgagagggatggagtctgctggacccgaaacatggcatgaatgccaggaggtggactcatggcagccactcgtatgagtattatgagtctatctgccacagtaaggaacaggcccaacactaaggtagagataaagcaattatcttctcaatgcttgaaacattttaagttgaattcattctatgattttctttagatttctccgcatatatcaatggaaaaaattaactatcttaatttctcatctatatagaaatgccagtgcaacaaaaccaaatgtagggttagaatatcagcaaggcaaagagagaagagaaaattcccagattatgaaatggagaagaagaacagaaacatgatatttagctcacaactctttcaacccattttctatacactccattattctttcttagaattcttacacaaatatttagtacaattttggaggaatagtagaaacattttatagtttttccttgtcctgtatcttcatctagccttcttttcagctttcctatgtcctttgttctccttttataaggagagatgagttgtacaataacatccattttcataagttatttaggtaaattattttgaagtatacatgttggatttccaaagcagctgtttttaattaaaatttaattaactaatttatgtcattatatatcttgtgttaagacaaccttaactttcttttagtaagattttacccaactgtttaccctaattatagacaattaaaatgttctctctt

SEQ ID NO: 62276 - DNA, 187 bp, Homo sapiens
ggagagacttttgaccataagcctttttatggttttttttctctctttttaagccatgtgaatgtattacctctccaaaaatattaaagttttaaaaagttttggatgctgaaaaaaaaaatgaatgaagttcaactgaattcccctgctcccctcttaccccctctcccctctccatacgtctcag

SEQ ID NO: 62277 - DNA, 992 bp, Homo sapiens
ccacgagagattagcgaggcgatcccggtgtttaatttcagtaccagggctggcgtttacttctaattgcgaggcactctggcttgacagagttctctgaaagtcccggagggtcccctactgagggcggagggagcgcggctggcggaccggagcctccatggcgggaggatgagatctgcgttgtgggaatcttcggcaagacggctctacgcctgaattccgagaagttctctcttgtgaatacggtgtgcgaccgacaggtctttcctctctttcgccaccaagatcctggggatccaggacctggaatcagaactgaggctggcgccgtgggtgaggccggtggagccgaggaccctggggctgcagccgggggttcagttcggggaagtggagctgtcgcggaaggtaaccgaactgaggcaggctcccaggactacagccttctgcaggcctactacagtcaggaaagcaaagttctgtatcttctcctcacctccatctgtgacaattcacagcttctccgggcttgtcgggctcttcagagcggggaagctggaggtggactctctttacctcatgcagaagcacacgagttctggaagcatcaagagaagctgcagtgcctcagtctcctttacctattctctgtctgtcatatcttgcttctggtccatcccacttgttcctttgatatcacttatgatcgagtattcagagccctggatgggctgagacagaaggtcctgccgctccttaaaacagccattagatgtcagtggaagatggagtaaatgcgactggcactagatcttttctcttcatcaatgggctcaggtgaactctgggaccagacagtcttcagaaaggcaagaaattccaagggtgggtgcgtgggggcatttaaatcggaggggtggggaaaagggaagggtttgggggcactttggttcgggcggggccttttggctatttgggggttgggctgg

SEQ ID NO: 62278 - DNA, 3310 bp, Homo sapiens
gaccggaaggactctagagaacgctctgcactatggctggtcccgtgagcttgcgagaccttctaatgggagcgtcagcctggatgggctctgaaagtcccggagggtcccctactgagggcggagggagcgcggctggcggaccggagcctccatggcgggaggatgagatctgcgttgtgggaatcttcggcaagacggctctacgcctgaattccgagaagttctctcttgtgaatacggtgtgcgaccgacaggtctttcctctctttcgccaccaagatcctggggatccaggacctggaatcagaactgaggctggcgccgtgggtgaggccggtggagccgaggaccctggggctgcagccgggggttcagttcggggaagtggagctgtcgcggaaggtaaccgaactgaggcaggctcccaggactacagccttctgcaggcctactacagtcaggaaagcaaagttctgtatcttctcctcacctccatctgtgacaattcacagcttctccgggcttgtcgggctcttcagagcggggaagctggaggtggactctctttacctcatgcagaagcacacgagttctggaagcatcaagagaagctgcagtgcctcagtctcctttacctattctctgtctgtcatatcttgcttctggtccatcccacttgttcctttgatatcacttatgatcgagtattcagagccctggatgggctgagacagaaggtcctgccgctccttaaaacagccattaaggattgtccagttggcaaagactggaagctaaactgccgaccttgcccacctagactccttttcctctttcaactcaatggagccctcaaggtagaacctcctcggaaccaagacccagctcatccagacaagcccaagaaacattctcccaaaaggaggctgcagcatgccctggaggaccagatctatagaatcttccggaagagtcgtgtcttgactaatcagagcatcaactgcctctttactgtgcctgccaaccaagctttcgtgtacatagtaccgggaagccaggaggaggacccagtaggtatgttgctggaccaacttaggagtcattgtactgtgaaggacccggaatctttgctggtgcctgcacccctttctgggcctaggcgataccaggtgatgaggcagcacagccgacaacaactttcctttcacattgacagcagcagttccagttcttcaggccagctagtggatttcactcttcgggaattcctatggcagcatgtggagctagttctaagcaagaaaggtttcgatgacagtgtgggcaggaacccacagccttcccattttgaacttcctacttatcagaagtggatctcagcagcttcaaaactgtatgaggtggctattgatgggaaagaagaggacttggggtcacccactggagagctaacatctaagattttaagcagtattaaagtcttggaaggatttttggatattgacacaaaattctcagaaaaccgatgccaaaaagctttacccatggcccacagtgcctaccagtcaaatttgcctcataattacacaatgactgtccataagaatcagcttgcccaggctcttcgagtgtacagtcaacatgctagaggtccagcatttcacaaatacgccatgcagttacatgaggactgctacaaattttggagcaatggccatcagctctgtgaggagaggagtttaactgatcaacactgtgtgcacaaatttcactcattacctaaatcaggagaaaaaccagaggctgatagaaatccgcctgtgctatatcacaatagccgagctcgatctactggtgcttgcaactgtggaaggaaacaagcacctcgagatgatccctttgatatcaaagcagccaattatgacttctatcagcttctggaagaaaagtgttgtggaaaattggatcatatcaatttcccagtatttgaaccaagtactccagatcctgctcctgctaaaaatgaatcctctcctgctcctccagattcggatgctgataaacttaaagaaaaagaacctcaaacccaaggagagagcacgagcctgagtttagctttgagtttgggccaatccacagatagcttaggtacctatccagctgatccacaagcaggaggagataatccagaagttcatggtcaagtagaagtgaaaactgagaagaggccaaacttcgttgatcgacaggcatccacagttgagtatctcccaggcatgctacattcaaattgccctaaaggtctcctacccaaattctccagctggtctttggttaaactaggccctgctaagtcttataactttcatacaggtttggaccaacagggctttattccaggaacaaattatcttatgccttgggacattgtcatcaggactagagctgaagatgaaggagacttagacacaaactcttggcctgctccaaataaagctattcctggaaagagaagtgcggttgtaatgggaagaggaagacggcgagatgacatagctcgagcttttgtgggctttgaatatgaagactctcgaggtcggagattcatgtgctctgggcctgacaaagtaatgaaagtaatgggaagtgggccaaaggaatcagctttaaaagccctaaatagtgacatgcccttatatattctgtcatcctctcaaggtagagggctgaaacctcattatgctcaacttatgaggctttttgttgtggttcctgatgctcctttgcagataatactaatgcctcaggttcagccaggcccaccaccatgtccggtattctacccagaaaaacaagaaatcacccttccacctgatggcctttgggttttgagatttccttatgcatatgtgactgagagaggaccttgtttcccccctaaggaaaatgtgcagttaatgagctacaaggtgctccgtggggttcttaaggcagtaacacaataagtgttttccagccagttcaatcctatacttgagctggtttttgtttttggtatttgtggctgtgtttttggtatgtgtttactgtgttttcccaaatccaaaatgtgttttggttacaggagttcagtatttggaaactaatttgttctactttttcattatattgttgatatttattgtaaacgtgactacaactttctaataaagattggttgttctagaaaagaatataaaatacatggatgatacctgttttttctcgtttctgttttactctccataattaaacatgtttctattat

SEQ ID NO: 62279 - DNA, 2298 bp, Homo sapiens
gaccggaaggactctagagaacgctctgcactatggctggtcccgtgagcttgcgagaccttctaatgggagcgtcagcctggatgggctctgaaagtcccggagggtcccctactgagggcggagggagcgcggctggcggaccggagcctccatggcgggaggatgagatctgcgttgtgggaatcttcggcaagacggctctacgcctgaattccgagaagttctctcttgtgaatacggtgtgcgaccgacaggtctttcctctctttcgccaccaagatcctggggatccaggacctggaatcagaactgaggctggcgccgtgggtgaggccggtggagccgaggaccctggggctgcagccgggggttcagttcggggaagtggagctgtcgcggaaggtaaccgaactgaggcaggctcccaggactacagccttctgcaggcctactacagtcaggaaagcaaagttctgtatcttctcctcacctccatctgtgacaattcacagcttctccgggcttgtcgggctcttcagagcggggaagctggaggtggactctctttacctcatgcagaagcacacgagttctggaagcatcaagagaagctgcagtgcctcagtctcctttacctattctctgtctgtcatatcttgcttctggtccatcccacttgttcctttgatatcacttatgatcgagtattcagagccctggatgggctgagacagaaggtcctgccgctccttaaaacagccattaaggattgtccagttggcaaagactggaagctaaactgccgaccttgcccacctagactccttttcctctttcaactcaatggagccctcaaggtagaacctcctcggaaccaagacccagctcatccagacaagcccaagaaacattctcccaaaaggaggctgcagcatgccctggaggaccagatctatagaatcttccggaagagtcgtgtcttgactaatcagagcatcaactgcctctttactgtgcctgccaaccaagctttcgtgtacatagtaccgggaagccaggaggaggacccagtaggtatgttgctggaccaacttaggagtcattgtactgtgaaggacccggaatctttgctggtgcctgcacccctttctgggcctaggcgataccaggtgatgaggcagcacagccgacaacaactttcctttcacattgacagcagcagttccagttcttcaggccagctagtggatttcactcttcgggaattcctatggcagcatgtggagctagttctaagcaagaaaggtttcgatgacagtgtgggcaggaacccacagccttcccattttgaacttcctacttatcagaagtggatctcagcagcttcaaaactgtatgaggtggctattgatgggaaagaagaggacttggggtcacccactggagagctaacatctaagattttaagcagtattaaagtcttggaaggatttttggatattgacacaaaattctcagaaaaccgatgccaaaaagctttacccatggcccacagtgcctaccagtcaaatttgcctcataattacacaatgactgtccataagaatcagcttgcccaggctcttcgagtgtacagtcaacatgctagaggtccagcatttcacaaatacgccatgcagttacatgaggactgctacaaattttggagcaatggccatcagctctgtgaggagaggagtttaactgatcaacactgtgtgcacaaatttcactcattacctaaatcaggagaaaaaccagaggctgatagaaatccgcctgtgctatatcacaatagccgagctcgatctactggtgcttgcaactgtggaaggaaacaagcacctcgagatgatccctttgatatcaaagcagccaattatgacttctatcagcttctggaagaaaagtgttgtggaaaattggatcatatcaatttcccagtatttgaaccaagtactccagatcctgctcctgctaaaaatgaatcctctcctgctcctccagattcggatgctgataaaaaaaaacaaaaaaaaaaaaaacaaacaaaaaacaaacaaaaaaaaaaacaaaaaaaaaaaaaacacacggggaggccatctcatagcggggggagcaaaaacaagagcgaaaagagcggaagggggagacaaaggtcgcaccaaagcaacagtctggagaacaagggggaaaacgggcgggccccccaaaagggggcgaaaatctacaaaacgcgggaaccggtaatagagg

SEQ ID NO: 62280 - DNA, 389 bp, Homo sapiens
gctaacatctaagattttaagcagtattaaagtcttggaaggatttttggatattgacacaaaattctcagaaaaccgatgccaaaaagctttacccatggcccacagtgcctaccagtcaaatttgcctcataattacacaatgactgtccataagaatcagcttgcccaggctcttcgagtgtacagtcaacatgctagaggtccagcatttcacaaatacgccatgcagttacatgaggactgctacaaattttggagcaatggccatcagctctgtgaggagaggagtttaactgatcaacactgtgtgcacaaatttcactcattacctaaatcaggtagctaaaatttgttcagcattttgaaataaaaactttgagctgtgt

SEQ ID NO: 62281 - DNA, 3255 bp, Homo sapiens
gaccggaaggactctagagaacgctctgcactatggctggtcccgtgagcttgcgagaccttctaatgggagcgtcagcctggatgggctctgaaagtcccggagggtcccctactgagggcggagggagcgcggctggcggaccggagcctccatggcgggaggatgagatctgcgttgtgggaatcttcggcaagacggctctacgcctgaattccgagaagttctctcttgtgaatacggtgtgcgaccgacaggtctttcctctctttcgccaccaagatcctggggatccaggacctggaatcagaactgaggctggcgccgtgggtgaggccggtggagccgaggaccctggggctgcagccgggggttcagttcggggaagtggagctgtcgcggaaggtaaccgaactgaggcaggctcccaggactacagccttctgcaggcctactacagtcaggaaagcaaagttctgtatcttctcctcacctccatctgtgacaattcacagcttctccgggcttgtcgggctcttcagagcggggaagctggaggtggactctctttacctcatgcagaagcacacgagttctggaagcatcaagagaagctgcagtgcctcagtctcctttacctattctctgtctgtcatatcttgcttctggtccatcccacttgttcctttgatatcacttatgatcgagtattcagagccctggatgggctgagacagaaggtcctgccgctccttaaaacagccattaaggattgtccagttggcaaagactggaagctaaactgccgaccttgcccacctagactccttttcctctttcaactcaatggagccctcaaggtagaacctcctcggaaccaagacccagctcatccagacaagcccaagaaacattctcccaaaaggaggctgcagcatgccctggaggaccagatctatagaatcttccggaagagtcgtgtcttgactaatcagagcatcaactgcctctttactgtgcctgccaaccaagctttcgtgtacatagtaccgggaagccaggaggaggacccagtaggtatgttgctggaccaacttaggagtcattgtactgtgaaggacccggaatctttgctggtgcctgcacccctttctgggcctaggcgataccaggtgatgaggcagcacagccgacaacaactttcctttcacattgacagcagcagttccagttcttcaggccagctagtggatttcactcttcgggaattcctatggcagcatgtggagctagttctaagcaagaaaggtttcgatgacagtgtgggcaggaacccacagccttcccattttgaacttcctacttatcagaagtggatctcagcagcttcaaaactgtatgaggtggctattgatgggaaagaagaggacttggggtcacccactggagagctaacatctaagattttaagcagtattaaagtcttggaaggatttttggatattgacacaaaattctcagaaaaccgatgccaaaaagctttacccatggcccacagtgcctaccagtcaaatttgcctcataattacacaatgactgtccataagaatcagcttgcccaggctcttcgagtgtacagtcaacatgctagaggtccagcatttcacaaatacgccatgcagttacatgaggactgctacaaattttggagcaatggccatcagctctgtgaggagaggagtttaactgatcaacactgtgtgcacaaatttcactcattacctaaatcaggagaaaaaccagaggctgatagaaatccgcctgtgctatatcacaatagccgagctcgatctactggtgcttgcaactgtggaaggaaacaagcacctcgagatgatccctttgatatcaaagcagccaattatgacttctatcagcttctggaagaaaagtgttgtggaaaattggatcatatcaatttcccagtatttgaaccaagtactccagatcctgctcctgctaaaaatgaatcctctcctgctcctccagattcggatgctgataaacttaaagaaaaagaacctcaaacccaaggagagagcacgagcctgagtttagctttgagtttgggccaatccacagatagcttaggtacctatccagctgatccacaagcaggaggagataatccagaagttcatggtcaagtagaagtgaaaactgagaagaggccaaacttcgttgatcgacaggcatccacagttgagtatctcccaggcatgctacattcaaattgccctaaaggtctcctacccaaattctccagctggtctttggttaaactaggccctgctaagtcttataactttcatacaggtttggaccaacagggctttattccaggaacaaattatcttatgccttgggacattgtcatcaggactagagctgaagatgaaggagacttagacacaaactcttggcctgctccaaataaagctattcctggaaagagaagtgcggttgtaatgggaagaggaagacggcgagatgacatagctcgagcttttgtgggctttgaatatgaagactctcgaggtcggagattcatgtgctctgggcctgacaaagtaatgaaagtaatgggaagtgggccaaaggaatcagctttaaaagccctaaatagtgacatgcccttatatattctgtcatcctctcaaggtagagggctgaaacctcattatgctcaacttatgaggctttttgttgtggttcctgatgctcctttgcagataatactaatgcctcaggttcagccaggcccaccaccatgtccggtattctacccagaaaaacaagaaatcacccttccacctgatggcctttgggttttgagatttccttatgcatatgtgactgagagaggaccttgtttcccccctaaggaaaatgtgcagttaatgagctacaaggtgctccgtggggttcttaaggcagtaacacaataagtgttttccagccagttcaatcctatacttgagctggtttttgtttttggtatttgtggctgtgtttttggtatgtgtttactgtgttttcccaaatccaaaatgtgttttggttacaggagttcagtatttggaaactaatttgttctactttttcattatattgttgatatttattgtaaacgtgactacaactttctaataaagattggttgttctagaaaagaatataaaatacatggatgat

SEQ ID NO: 62282 - DNA, 3261 bp, Homo sapiens
ccacgagagattagcgaggcgatcccggtgtttaatttcagtaccagggctggcgtttacttctaattgcgaggcactctggcttgacagagttctctgaaagtcccggagggtcccctactgagggcggagggagcgcggctggcggaccggagcctccatggcgggaggatgagatctgcgttgtgggaatcttcggcaagacggctctacgcctgaattccgagaagttctctcttgtgaatacggtgtgcgaccgacaggtctttcctctctttcgccaccaagatcctggggatccaggacctggaatcagaactgaggctggcgccgtgggtgaggccggtggagccgaggaccctggggctgcagccgggggttcagttcggggaagtggagctgtcgcggaaggtaaccgaactgaggcaggctcccaggactacagccttctgcaggcctactacagtcaggaaagcaaagttctgtatcttctcctcacctccatctgtgacaattcacagcttctccgggcttgtcgggctcttcagagcggggaagctggaggtggactctctttacctcatgcagaagcacacgagttctggaagcatcaagagaagctgcagtgcctcagtctcctttacctattctctgtctgtcatatcttgcttctggtccatcccacttgttcctttgatatcacttatgatcgagtattcagagccctggatgggctgagacagaaggtcctgccgctccttaaaacagccattaaggattgtccagttggcaaagactggaagctaaactgccgaccttgcccacctagactccttttcctctttcaactcaatggagccctcaaggtagaacctcctcggaaccaagacccagctcatccagacaagcccaagaaacattctcccaaaaggaggctgcagcatgccctggaggaccagatctatagaatcttccggaagagtcgtgtcttgactaatcagagcatcaactgcctctttactgtgcctgccaaccaagctttcgtgtacatagtaccgggaagccaggaggaggacccagtaggtatgttgctggaccaacttaggagtcattgtactgtgaaggacccggaatctttgctggtgcctgcacccctttctgggcctaggcgataccaggtgatgaggcagcacagccgacaacaactttcctttcacattgacagcagcagttccagttcttcaggccagctagtggatttcactcttcgggaattcctatggcagcatgtggagctagttctaagcaagaaaggtttcgatgacagtgtgggcaggaacccacagccttcccattttgaacttcctacttatcagaagtggatctcagcagcttcaaaactgtatgaggtggctattgatgggaaagaagaggacttggggtcacccactggagagctaacatctaagattttaagcagtattaaagtcttggaaggatttttggatattgacacaaaattctcagaaaaccgatgccaaaaagctttacccatggcccacagtgcctaccagtcaaatttgcctcataattacacaatgactgtccataagaatcagcttgcccaggctcttcgagtgtacagtcaacatgctagaggtccagcatttcacaaatacgccatgcagttacatgaggactgctacaaattttggagcaatggccatcagctctgtgaggagaggagtttaactgatcaacactgtgtgcacaaatttcactcattacctaaatcaggagaaaaaccagaggctgatagaaatccgcctgtgctatatcacaatagccgagctcgatctactggtgcttgcaactgtggaaggaaacaagcacctcgagatgatccctttgatatcaaagcagccaattatgacttctatcagcttctggaagaaaagtgttgtggaaaattggatcatatcaatttcccagtatttgaaccaagtactccagatcctgctcctgctaaaaatgaatcctctcctgctcctccagattcggatgctgataaacttaaagaaaaagaacctcaaacccaaggagagagcacgagcctgagtttagctttgagtttgggccaatccacagatagcttaggtacctatccagctgatccacaagcaggaggagataatccagaagttcatggtcaagtagaagtgaaaactgagaagaggccaaacttcgttgatcgacaggcatccacagttgagtatctcccaggcatgctacattcaaattgccctaaaggtctcctacccaaattctccagctggtctttggttaaactaggccctgctaagtcttataactttcatacaggtttggaccaacagggctttattccaggaacaaattatcttatgccttgggacattgtcatcaggactagagctgaagatgaaggagacttagacacaaactcttggcctgctccaaataaagctattcctggaaagagaagtgcggttgtaatgggaagaggaagacggcgagatgacatagctcgagcttttgtgggctttgaatatgaagactctcgaggtcggagattcatgtgctctgggcctgacaaagtaatgaaagtaatgggaagtgggccaaaggaatcagctttaaaagccctaaatagtgacatgcccttatatattctgtcatcctctcaaggtagagggctgaaacctcattatgctcaacttatgaggctttttgttgtggttcctgatgctcctttgcagataatactaatgcctcaggttcagccaggcccaccaccatgtccggtattctacccagaaaaacaagaaatcacccttccacctgatggcctttgggttttgagatttccttatgcatatgtgactgagagaggaccttgtttcccccctaaggaaaatgtgcagttaatgagctacaaggtgctccgtggggttcttaaggcagtaacacaataagtgttttccagccagttcaatcctatacttgagctggtttttgtttttggtatttgtggctgtgtttttggtatgtgtttactgtgttttcccaaatccaaaatgtgttttggttacaggagttcagtatttggaaactaatttgttctactttttcattatattgttgatatttattgtaaacgtgactacaactttctaataaagattggttgttctagaaaagaatataaaatacatggatgat

SEQ ID NO: 62283 - DNA, 744 bp, Homo sapiens
ggatcctgcgctaaatccgtaccagaggaagacggcgagatgacatagctcgagcttttgtgggctttgaatatgaagactctcgaggtcggagattcatgtgctctgggcctgacaaagtaatgaaagtaatgggaagtgggccaaaggaatcagctttaaaagccctaaatagtgacatgcccttatatattctgtcatcctctcaaggtagagggctgaaacctcattatgctcaacttatgaggctttttgttgtggttcctgatgctcctttgcagataatactaatgcctcaggttcagccaggcccaccaccatgtccggtattctacccagaaaaacaagaaatcacccttccacctgatggcctttgggttttgagatttccttatgcatatgtgactgagagaggaccttgtttcccccctaaggaaaatgtgcagttaatgagctacaaggtgctccgtggggttcttaaggcagtaacacaataagtgttttccagccagttcaatcctatacttgagctggtttttgtttttggtatttgtggctgtgtttttggtatgtgtttactgtgttttcccaaatccaaaatgtgttttggttacaggagttcagtatttggaaactaatttgttctactttttcattatattgttgatatttattgtaaacgtgactacaactttctaataaagattggttgttctagaaaagaatataaaatacatggatgat

SEQ ID NO: 62284 - DNA, 397 bp, Homo sapiens
gctaacattatcagggcaaaggtatcctaatataatttggccattggcaaacactggaatctggatttcagtaaaatgaatttacaattgccttgagagaacatcccaagtaatgtgtgtgtttgtgcactaaaatgtgttgagattttttagtaataagaaatctgtctctatttctgaaggttgtggggcatttgcagagcatcactggtattgccttggcaagcattgctgagttctcttatgcaatcctgactcacggagtgggagccaacactccggggagacagcagtctattcctccccacctggcagccagagctctgaagactgttgcttcctctaacacatgagggaggctgaatccaccaaatataaacagccatccgtcactgca

SEQ ID NO: 62285 - DNA, 1245 bp, Homo sapiens
cggggcagagccgcggttcccgggcacaggggatggacgcgggaggtgagaagcggacgtgctttctgattggctgaggagtccgtggccgttggggcgggaaaaagctgtggagggttcgaggctgtggtggtaattgggttttcctcagacttgaggcgacgacacactcattggaaggggacgaggaatccagggtgtggcagaagactggagaggagctaagggggtcggtatgtggatccagtgaacccgtccaggtgccccaagaggctcgtgaatatggacggacccatgaggccacgatcggcctccctcgttgactttcagtttggagttgtcgccacagagacgattgaagacgccctgcttcacttggcccagcagaatgagcaagcagtgagggaggcttcggggcggctgggccgcttcagggagccccagatcgtggaggtttatggtaaaacaggcagagaacatctgcaggcaagccacaatccagccaagagataataagagagagtctcagaattggagggctctgaaacagcagcttgtcaacaagtttactctccgtcttgtgtcatgtgttcagctggccagcaaactttccttccgaaacaaaataatcagcaacattacagtcttgaatttcctccaggctctaggctatctacacactaaagaagaactgctggaatcagagcttgatgttttgaagtccttgaacttccgaattaatctgcccactcccctggcatatgtggagacgctcctagaggttttaggatacaatggctgtttggttccagccatgaggctgcatgcaacctgcctgacactgctcgacctggtctatcttctgcatgaacccatatatgagagcctgttgagggcttcaattgagaactccactcccagtcagctgcaaggggaaaagtttacttcagtgaaggaagacttcatgctgttggcagtaggaatcattgcagcaagtgctttcatccaaaaccatgagtgttggagccaggttgtggggcatttgcagagcatcactggtattgccttggcaagcattgctgagttctcttatgcaatcctgactcacggagtgggagccaacactccggggagacagcagtctattcctccccacctggcagccagagctctgaagactgttgcttcctctaacacatgagggaggctgaatccaccaaatataaacagccatccgtcactgca

SEQ ID NO: 62286 - DNA, 1273 bp, Homo sapiens
cggggcagagccgcggttcccgggcacaggggatggacgcgggaggtgagaagcggacgtgctttctgattggctgaggagtccgtggccgttggggcgggaaaaagctgtggagggttcgaggctgtggtggtaattgggttttcctcagacttgaggcgacgacacactcattggaaggggacgaggaatccagggtgtggcagaagactggagaggagctaagggggtcggtatgtggatccagtgaacccgtccaggtgccccaagaggctcgtgaatatggacggacccatgaggccacgatcggcctccctcgttgactttcagtttggagttgtcgccacagagacgattgaagacgccctgcttcacttggcccagcagaatgagcaagcagtgagggaggcttcggggcggctgggccgcttcagggagccccagatcgtggaggtttatggtaaaacaggcagagaacatctgcaggcaagccacaatccagccaagagataataagagagagtctcagaattggagggctctgaaacagcagcttgtcaacaagtttactctccgtcttgtgtcatgtgttcagctggccagcaaactttccttccgaaacaaaataatcagcaacattacagtcttgaatttcctccaggctctaggctatctacacactaaagaagaactgctggaatcagagcttgatgttttgaagtccttgaacttccgaattaatctgcccactcccctggcatatgtggagacgctcctagaggttttaggatacaatggctgtttggttccagccatgaggctgcatgcaacctgcctgacactgctcgacctggtctatcttctgcatgaacccatatatgagagcctgttgagggcttcaattgagaactccactcccagtcagctgcaaggggaaaagtttacttcagtgaaggaagacttcatgctgttggcagtaggaatcattgcagcaagtgctttcatccaaaaccatgagtgttggagccaggtatgcaccactgagcaggaccagcatggttgtggggcatttgcagagcatcactggtattgccttggcaagcattgctgagttctcttatgcaatcctgactcacggagtgggagccaacactccggggagacagcagtctattcctccccacctggcagccagagctctgaagactgttgcttcctctaacacatgagggaggctgaatccaccaaatataaacagccatccgtcactgca

SEQ ID NO: 62287 - DNA, 477 bp, Homo sapiens
gggtgggagatgggaggatcctaagagaagagggagaggaattagggaggaaaggaagggagatccaggtatagaaaacagcctgtgtagtggcttggagagggacagcatggtgggtttgggaactgtaagcaatttggaatgacaagcagagtgtgagggggaattaccaagagacaagactgaagatgaaggaataggctggattatgaagggctttgtgcactctgtcaagacgtatgaactttatcctaacattcttctttccctctcttttctttgctcagataatcagcaacattacagtcttgaatttcctccaggctctaggctatctacacactaaagaagaactgctggaatcagagcttgatgttttgaagtccttgaacttccgaattaatctgcccactcccctggcatatgtggagacgctcctagaggttttaggtatcttactgtgttagggaatatggg

SEQ ID NO: 62288 - DNA, 1320 bp, Homo sapiens
cggggcagagccgcggttcccgggcacaggggatggacgcgggaggtgagaagcggacgtgctttctgattggctgaggagtccgtggccgttggggcgggaaaaagctgtggagggttcgaggctgtggtggtaattgggttttcctcagacttgaggcgacgacacactcattggaaggggacgaggaatccagggtgtggcagaagactggagaggagctaagggggtcggtatgtggatccagtgaacccgtccaggtgccccaagaggctcgtgaatatggacggacccatgaggccacgatcggcctccctcgttgactttcagtttggagttgtcgccacagagacgattgaagacgccctgcttcacttggcccagcagaatgagcaagcagtgagggaggcttcggggcggctgggccgcttcagggagccccagatcgtggagtttgtttttctcctgtctgaacaatggtgtctggagaaatctgtgagctaccaggctgtagaaatcctagaaaaggtttatggtaaaacaggcagagaacatctgcaggcaagccacaatccagccaagagataataagagagagtctcagaattggagggctctgaaacagcagcttgtcaacaagtttactctccgtcttgtgtcatgtgttcagctggccagcaaactttccttccgaaacaaaataatcagcaacattacagtcttgaatttcctccaggctctaggctatctacacactaaagaagaactgctggaatcagagcttgatgttttgaagtccttgaacttccgaattaatctgcccactcccctggcatatgtggagacgctcctagaggttttaggatacaatggctgtttggttccagccatgaggctgcatgcaacctgcctgacactgctcgacctggtctatcttctgcatgaacccatatatgagagcctgttgagggcttcaattgagaactccactcccagtcagctgcaaggggaaaagtttacttcagtgaaggaagacttcatgctgttggcagtaggaatcattgcagcaagtgctttcatccaaaaccatgagtgttggagccaggttgtggggcatttgcagagcatcactggtattgccttggcaagcattgctgagttctcttatgcaatcctgactcacggagtgggagccaacactccggggagacagcagtctattcctccccacctggcagccagagctctgaagactgttgcttcctctaacacatgagggaggctgaatccaccaaatataaacagccatccgtcactgca

SEQ ID NO: 62289 - DNA, 452 bp, Homo sapiens
tgatatgagactgaaaccctggggttgtggagggaaattggctcagagatggacaacctggcaactgtgagtccttgctggccctgcccttcccacaggtgagcagggctcctgtccaccagcacactcagttctcttccctgcagtgttttcattttattttagccaaacattttgcctgttttctgtttcaaacatgatagttgatatgagactgaaacccctgggttgtggagggaaattggctcagagatggacaacacctgggccaatgggccatctggaccaaaggtggggtgtggggccctggatggcagctctggcccagacatgaatacctcgtgttcctcctccctctattactgtttcaccagagctgtcttagctcaaatctgttgtgtttctgagtctagggtctgtacacttgtttataataaatgcaatcgtttgga

SEQ ID NO: 62290 - DNA, 310 bp, Homo sapiens
acggtgttctggcagcagggacacctggactggggtacaggagttgttgcatattccatgaggctggtgtcgggaagcagggactgtaccccagtccacggtgttctggcagcagggacacctgggccaatgggccatctggaccaaaggtggggtgtggggccctggatggcagctctggcccagacatgaatacctcgtgttcctcctccctctattactgtttcaccagagctgtcttagctcaaatctgttgtgtttctgagtctagggtctgtacacttgtttataataaatgcaatcgtttgga

SEQ ID NO: 62291 - DNA, 1949 bp, Homo sapiens
gccctgtaggcttggctcagggaggcagctctgggaggcaaatggggcacctctgcttcccctcctccccggcccccgccccttggctccttggctgctagccggctgctgggcggggccatcctgtgtctttaagagggtggaacggggcttcgcgtctgtgcttcctgtggctgacgtcatctggaggagatttgctttctttttctccaaaaggggaggaaattgaaactgagtggcccacgatgggaagaggggaaagcccaggggtacaggaggcctctgggtgaaggcagaggctaacatggggttcggagcgaccttggccgttggcctgaccatctttgtgctgtctgtcgtcactatcatcatctgcttcacctgctcctgctgctgcctttacaagacgtgccgccgaccacgtccggttgtcaccaccaccacatccaccactgtggtgcatgccccttatcctcagcctccaagtgtgccgcccagctaccctggaccaagctaccagggctaccacaccatgccgcctcagccagggatgccagcagcaccctacccaatgcagtacccaccaccttacccagcccagcccatgggcccaccggcctaccacgagaccctggctggaggagcagccgcgccctaccccgccagccagcctccttacaacccggcctacatggatgccccgaaggcggccctctgagcattccctggcctctctggctgccacttggttatgttgtgtgtgtgcgtgagtggtgtgcaggcgcggttccttacgccccatgtgtgctgtgtgtgtccaggcacggttccttacgccccatgtgtgctgtgtgtgtcctgcctgtatatgtggcttcctctgatgctgacaaggtggggaacaatccttgccagagtgggctgggaccagactttgttctcttcctcacctgaaattatgcttcctaaaatctcaagccaaactcaaagaatggggtggtggggggcaccctgtgaggtggcccctgagaggtgggggcctctccagggcacatctggagttcttctccagcttaccctagggtgaccaagtagggcctgtcacaccagggtggcgcagctttctgtgtgatgcagatgtgtcctggtttcggcagcgtagccagctgctgcttgaggccatggctcgtccccggagttgggggtacccgttgcagagccagggacatgatgcaggcgaagcttgggatctggccaagttggactttgatcctttgggcagatgtcccattgctccctggagcctgtcatgcctgttggggatcaggcagcctcctgatgccagaacacctcaggcagagccctactcagctgtacctgtctgcctggactgtcccctgtccccgcatctcccctgggaccagctggagggccacatgcacacacagcctagctgcccccagggagctctgctgcccttgctggccctgcccttcccacaggtgagcagggctcctgtccaccagcacactcagttctcttccctgcagtgttttcattttattttagccaaacattttgcctgttttctgtttcaaacatgatagttgatatgagactgaaacccctgggttgtggagggaaattggctcagagatggacaacctggcaactgtgagtccctgcttcccgacaccagcctcatggaatatgcaacaactcctgtaccccagtccacggtgttctggcagcagggacacctgggccaatgggccatctggaccaaaggtggggtgtggggccctggatggcagctctggcccagacatgaatacctcgtgttcctcctccctctattactgtttcaccagagctgtcttagctcaaatctgttgtgtttctgagtctagggtctgtacacttgtttataataaatgcaatcgtttgga

SEQ ID NO: 62292 - DNA, 1915 bp, Homo sapiens
gccctgtaggcttggctcagggaggcagctctgggaggcaaatggggcacctctgcttcccctcctccccggcccccgccccttggctccttggctgctagccggctgctgggcggggccatcctgtgtctttaagagggtggaacggggcttcgcgtctgtgcttcctgtggctgacgtcatctggaggagatttgctttctttttctccaaaaggggaggaaattgaaactgagtggcccacgatgggaagaggggaaagcccaggggtacaggaggcctctgggtgaaggcagaggctaacatggggttcggagcgaccttggccgttggcctgaccatctttgtgctgtctgtcgtcactatcatcatctgcttcacctgctcctgctgctgcctttacaagacgtgccgccgaccacgtccggttgtcaccaccaccacatccaccactgtggtgcatgccccttatcctcagcctccaagtgtgccgcccagctaccctggaccaagctaccagggctaccacaccatgccgcctcagccagggatgccagcagcaccctacccaatgcagtacccaccaccttacccagcccagcccatgggcccaccggcctaccacgagaccctggctggaggagcagccgcgccctaccccgccagccagcctccttacaacccggcctacatggatgccccgaaggcggccctctgagcattccctggcctctctggctgccacttggttatgttgtgtgtgtgcgtgagtggtgtgcaggcgcggttccttacgccccatgtgtgtgtgtgctgtgtgtgtcctgcctgtatatgtggcttcctctgatgctgacaaggtggggaacaatccttgccagagtgggctgggaccagactttgttctcttcctcacctgaaattatgcttcctaaaatctcaagccaaactcaaagaatggggtggtggggggcaccctgtgaggtggcccctgagaggtgggggcctctccagggcacatctggagttcttctccagcttaccctagggtgaccaagtagggcctgtcacaccagggtggcgcagctttctgtgtgatgcagatgtgtcctggtttcggcagcgtagccagctgctgcttgaggccatggctcgtccccggagttgggggtacccgttgcagagccagggacatgatgcaggcgaagcttgggatctggccaagttggactttgatcctttgggcagatgtcccattgctccctggagcctgtcatgcctgttggggatcaggcagcctcctgatgccagaacacctcaggcagagccctactcagctgtacctgtctgcctggactgtcccctgtccccgcatctcccctgggaccagctggagggccacatgcacacacagcctagctgcccccagggagctctgctgcccttgctggccctgcccttcccacaggtgagcagggctcctgtccaccagcacactcagttctcttccctgcagtgttttcattttattttagccaaacattttgcctgttttctgtttcaaacatgatagttgatatgagactgaaacccctgggttgtggagggaaattggctcagagatggacaacctggcaactgtgagtccctgcttcccgacaccagcctcatggaatatgcaacaactcctgtaccccagtccacggtgttctggcagcagggacacctgggccaatgggccatctggaccaaaggtggggtgtggggccctggatggcagctctggcccagacatgaatacctcgtgttcctcctccctctattactgtttcaccagagctgtcttagctcaaatctgttgtgtttctgagtctagggtctgtacacttgtttataataaatgcaatcgtttgga

SEQ ID NO: 62293 - DNA, 1790 bp, Homo sapiens
  misc_feature (12)..(12): n is a, c, g, or t
  misc_feature (15)..(15): n is a, c, g, or t
tcatcgctgtcnccncgcgtatgggattcgtcgaccacgcctcgttttctccaaaaggggaggaaattgaaactgagtggcccacgatgggaagaggggaaagcccaggggtacaggaggcctctgggtgaaggcagaggctaacatggggttcggagcgaccttggccgttggcctgaccatctttgtgctgtctgtcgtcactatcatcatctgcttcacctgctcctgctgctgcctttacaagacgtgccgccgaccacgtccggttgtcaccaccaccacatccaccactgtggtgcatgccccttatcctcagcctccaagtgtgccgcccagctaccctggaccaagctaccagggctaccacaccatgccgcctcagccagggatgccagcagcaccctacccaatgcagtacccaccaccttacccagcccagcccatgggcccaccggcctaccacgagaccctggctggaggagcagccgcgccctaccccgccagccagcctccttacaacccggcctacatggatgccccgaaggcggccctctgagcattccctggcctctctggctgccacttggttatgttgtgtgtgtgcgtgagtggtgtgcaggcgcggttccttacgccccatgtgtgctgtgtgtgtccaggcacggttccttacgccccatgtgtgctgtgtgtgtcctgcctgtatatgtggcttcctctgatgctgacaaggtggggaacaatccttgccagagtgggctgggaccagactttgttctcttcctcacctgaaattatgcttcctaaaatctcaagccaaactcaaagaatggggtggtggggggcaccctgtgaggtggcccctgagaggtgggggcctctccagggcacatctggagttcttctccagcttaccctagggtgaccaagtagggcctgtcacaccagggtggcgcagctttctgtgtgatgcagatgtgtcctggtttcggcagcgtagccagctgctgcttgaggccatggctcgtccccggagttgggggtacccgttgcagagccagggacatgatgcaggcgaagcttgggatctggccaagttggactttgatcctttgggcagatgtcccattgctccctggagcctgtcatgcctgttggggatcaggcagcctcctgatgccagaacacctcaggcagagccctactcagctgtacctgtctgcctggactgtcccctgtccccgcatctcccctgggaccagctggagggccacatgcacacacagcctagctgcccccagggagctctgctgcccttgctggccctgcccttcccacaggtgagcagggctcctgtccaccagcacactcagttctcttccctgcagtgttttcattttattttagccaaacattttgcctgttttctgtttcaaacatgatagttgatatgagactgaaacccctgggttgtggagggaaattggctcagagatggacaacctggcaactgtgagtccctgcttcccgacaccagcctcatggaatatgcaacaactcctgtaccccagtccacggtgttctggcagcagggacacctgggccaatgggccatctggaccaaaggtggggtgtggggccctggatggcagctctggcccagacatgaatacctcgtgttcctcctccctctattactgtttcaccagagctgtcttagctcaaatctgttgtgtttctgagtctagggtctgtacacttgtttataataaatgcaatcgtttgga

SEQ ID NO: 62294 - DNA, 1880 bp, Homo sapiens
  misc_feature (12)..(12): n is a, c, g, or t
  misc_feature (15)..(15): n is a, c, g, or t
  misc_feature (1849)..(1849): n is a, c, g, or t
tcatcgctgtcnccncgcgtatgggattcgtcgaccacgcctcgttttctccaaaaggggaggaaattgaaactgagtggcccacgatgggaagaggggaaagcccaggggtacaggaggcctctgggtgaaggcagaggctaacatggggttcggagcgaccttggccgttggcctgaccatctttgtgctgtctgtcgtcactatcatcatctgcttcacctgctcctgctgctgcctttacaagacgtgccgccgaccacgtccggttgtcaccaccaccacatccaccactgtggtgcatgccccttatcctcagcctccaagtgtgccgcccagctaccctggaccaagctaccagggctaccacaccatgccgcctcagccagggatgccagcagcaccctacccaatgcagtacccaccaccttacccagcccagcccatgggcccaccggcctaccacgagaccctggctggaggagcagccgcgccctaccccgccagccagcctccttacaacccggcctacatggatgccccgaaggcggccctctgagcattccctggcctctctggctgccacttggttatgttgtgtgtgtgcgtgagtggtgtgcaggcgcggttccttacgccccatgtgtgctgtgtgtgtccaggcacggttccttacgccccatgtgtgctgtgtgtgtcctgcctgtatatgtggcttcctctgatgctgacaaggtggggaacaatccttgccagagtgggctgggaccagactttgttctcttcctcacctgaaattatgcttcctaaaatctcaagccaaactcaaagaatggggtggtggggggcaccctgtgaggtggcccctgagaggtgggggcctctccagggcacatctggagttcttctccagcttaccctagggtgaccaagtagggcctgtcacaccagggtggcgcagctttctgtgtgatgcagatgtgtcctggtttcggcagcgtagccagctgctgcttgaggccatggctcgtccccggagttgggggtacccgttgcagagccagggacatgatgcaggcgaagcttgggatctggccaagttggactttgatcctttgggcagatgtcccattgctccctggagcctgtcatgcctgttggggatcaggcagcctcctgatgccagaacacctcaggcagagccctactcagctgtacctgtctgcctggactgtcccctgtccccgcatctcccctgggaccagctggagggccacatgcacacacagcctagctgcccccagggagctctgctgcccttgctggccctgcccttcccacaggtgagcagggctcctgtccaccagcacactcagttctcttccctgcagtgttttcattttattttagccaaacattttgcctgttttctgtttcaaacatgatagttgatatgagactgaaacccctgggttgtggagggaaattggctcagagatggacaacctggcaactgtgagtccctgcttcccgacaccagcctcatggaatatgcaacaactcctgtaccccagtccacggtgttctggcagcagggacacctgggccaatgggccatctggaccaaaggtggggtgtggggccctggatggcagctctggcccagacatgaatacctcgtgttcctcctccctctattactgtttcaccagagctgtcttagctcaaatctgttgtgtttctgagtctagggtctgtacacttgtttataataaatgcaatcgtttggaaaaaaaaaaatgggtacccaactgttggaaaatcaataaaggttaattcacacattttnttatcggcccccgtggcctcagagggggagc

SEQ ID NO: 62295 - DNA, 1633 bp, Homo sapiens
  misc_feature (12)..(12): n is a, c, g, or t
  misc_feature (15)..(15): n is a, c, g, or t
  misc_feature (1623)..(1623): n is a, c, g, or t
tcatcgctgtcnccncgcgtatgggattcgtcgaccacgcctcgttttctccaaaaggggaggaaattgaaactgagtggcccacgatgggaagaggggaaagcccaggggtacaggaggcctctgggtgaaggcagaggctaacatggggttcggagcgaccttggccgttggcctgaccatctttgtgctgtctgtcgtcactatcatcatctgcttcacctgctcctgctgctgcctttacaagacgtgccgccgaccacgtccggttgtcaccaccaccacatccaccactgtggtgcatgccccttatcctcagcctccaagtgtgccgcccagctaccctggaccaagctaccagggctaccacaccatgccgcctcagccagggatgccagcagcaccctacccaatgcagtacccaccaccttacccagcccagcccatgggcccaccggcctaccacgagaccctggctggaggagcagccgcgccctaccccgccagccagcctccttacaacccggcctacatggatgccccgaaggcggccctctgagcattccctggcctctctggctgccacttggttatgttgtgtgtgtgcgtgagtggtgtgcaggcgcggttccttacgccccatgtgtgctgtgtgtgtccaggcacggttccttacgccccatgtgtgctgtgtgtgtcctgcctgtatatgtggcttcctctgatgctgacaaggtggggaacaatccttgccagagtgggctgggaccagactttgttctcttcctcacctgaaattatgcttcctaaaatctcaagccaaactcaaagaatggggtggtggggggcaccctgtgaggtggcccctgagaggtgggggcctctccagggcacatctggagttcttctccagcttaccctagggtgaccaagtagggcctgtcacaccagggtggcgcagctttctgtgtgatgcagatgtgtcctggtttcggcagcgtagccagctgctgcttgaggccatggctcgtccccggagttgggggtacccgttgcagagccagggacatgatgcaggcgaagcttgggatctggccaagttggactttgatcctttgggcagatgtcccattgctccctggagcctgtcatgcctgttggggatcaggcagcctcctgatgccagaacacctcaggcagagccctactcagctgtacctgtctgcctggactgtcccctgtccccgcatctcccctgggaccagctggagggccacatgcacacacagcctagctgcccccagggagctctgctgcccttgctggccctgcccttcccacaggtgagcagggctcctgtccaccagcacactcagttctcttccctgcagtgttttcattttattttagccaaacattttgcctgttttctgtttcaaacatgatagttgatatgagactgaaacccctgggttgtggagggaaattggctcagagatggacaacctggcaactgtgagtccctgcttcccgacaccagcctcatggaatatgcaacaactcctgtaccccagtccacggtgttctggcagcagggacttgagtgaatgggatcctctagancactgcgcac

SEQ ID NO: 62296 - DNA, 1755 bp, Homo sapiens
  misc_feature (12)..(12): n is a, c, g, or t
  misc_feature (15)..(15): n is a, c, g, or t
tcatcgctgtcnccncgcgtatgggattcgtcgaccacgcctcgttttctccaaaaggggaggaaattgaaactgagtggcccacgatgggaagaggggaaagcccaggggtacaggaggcctctgggtgaaggcagaggctaacatggggttcggagcgaccttggccgttggcctgaccatctttgtgctgtctgtcgtcactatcatcatctgcttcacctgctcctgctgctgcctttacaagacgtgccgccgaccacgtccggttgtcaccaccaccacatccaccactgtggtgcatgccccttatcctcagcctccaagtgtgccgcccagctaccctggaccaagctaccagggctaccacaccatgccgcctcagccagggatgccagcagcaccctacccaatgcagtacccaccaccttacccagcccagcccatgggcccaccggcctaccacgagaccctggctggaggagcagccgcgccctaccccgccagccagcctccttacaacccggcctacatggatgccccgaaggcggccctctgagcattccctggcctctctggctgccacttggttatgttgtgtgtgtgcgtgagtggtgtgcaggcgcggttccttacgccccatgtgtgctgtgtgtgtccaggcacggttccttacgccccatgtgtgctgtgtgtgtcctgcctgtatatgtggcttcctctgatgctgacaaggtggggaacaatccttgccagagtgggctgggaccagactttgttctcttcctcacctgaaattatgcttcctaaaatctcaagccaaactcaaagaatggggtggtggggggcaccctgtgaggtggcccctgagaggtgggggcctctccagggcacatctggagttcttctccagcttaccctagggtgaccaagtagggcctgtcacaccagggtggcgcagctttctgtgtgatgcagatgtgtcctggtttcggcagcgtagccagctgctgcttgaggccatggctcgtccccggagttgggggtacccgttgcagagccagggacatgatgcaggcgaagcttgggatctggccaagttggactttgatcctttgggcagatgtcccattgctccctggagcctgtcatgcctgttggggatcaggcagcctcctgatgccagaacacctcaggcagagccctactcagctgtacctgtctgcctggactgtcccctgtccccgcatctcccctgggaccagctggagggccacatgcacacacagcctagctgcccccagggagctctgctgcccttgctggccctgcccttcccacaggtgagcagggctcctgtccaccagcacactcagttctcttccctgcagtgttttcattttattttagccaaacattttgcctgttttctgtttcaaacatgatagttgatatgagactgaaacccctgggttgtggagggaaattggctcagagatggacaacctggcaactgtgagtccctgcttcccgacaccagcctcatggaatatgcaacaactccacctgggccaatgggccatctggaccaaaggtggggtgtggggccctggatggcagctctggcccagacatgaatacctcgtgttcctcctccctctattactgtttcaccagagctgtcttagctcaaatctgttgtgtttctgagtctagggtctgtacacttgtttataataaatgcaatcgtttgga

SEQ ID NO: 62297 - DNA, 1697 bp, Homo sapiens
  misc_feature (12)..(12): n is a, c, g, or t
  misc_feature (15)..(15): n is a, c, g, or t
tcatcgctgtcnccncgcgtatgggattcgtcgaccacgcctcgttttctccaaaaggggaggaaattgaaactgagtggcccacgatgggaagaggggaaagcccaggggtacaggaggcctctgggtgaaggcagaggctaacatggggttcggagcgaccttggccgttggcctgaccatctttgtgctgtctgtcgtcactatcatcatctgcttcacctgctcctgctgctgcctttacaagacgtgccgccgaccacgtccggttgtcaccaccaccacatccaccactgtggtgcatgccccttatcctcagcctccaagtgtgccgcccagctaccctggaccaagctaccagggctaccacaccatgccgcctcagccagggatgccagcagcaccctacccaatgcagtacccaccaccttacccagcccagcccatgggcccaccggcctaccacgagaccctggctggaggagcagccgcgccctaccccgccagccagcctccttacaacccggcctacatggatgccccgaaggcggccctctgagcattccctggcctctctggctgccacttggttatgttgtgtgtgtgcgtgagtggtgtgcaggcgcggttccttacgccccatgtgtgctgtgtgtgtccaggcacggttccttacgccccatgtgtgctgtgtgtgtcctgcctgtatatgtggcttcctctgatgctgacaaggtggggaacaatccttgccagagtgggctgggaccagactttgttctcttcctcacctgaaattatgcttcctaaaatctcaagccaaactcaaagaatggggtggtggggggcaccctgtgaggtggcccctgagaggtgggggcctctccagggcacatctggagttcttctccagcttaccctagggtgaccaagtagggcctgtcacaccagggtggcgcagctttctgtgtgatgcagatgtgtcctggtttcggcagcgtagccagctgctgcttgaggccatggctcgtccccggagttgggggtacccgttgcagagccagggacatgatgcaggcgaagcttgggatctggccaagttggactttgatcctttgggcagatgtcccattgctccctggagcctgtcatgcctgttggggatcaggcagcctcctgatgccagaacacctcaggcagagccctactcagctgtacctgtctgcctggactgtcccctgtccccgcatctcccctgggaccagctggagggccacatgcacacacagcctagctgcccccagggagctctgctgcccttgctggccctgcccttcccacaggtgagcagggctcctgtccaccagcacactcagttctcttccctgcagtgttttcattttattttagccaaacattttgcctgttttctgtttcaaacatgatagttgatatgagactgaaacccctgggttgtggagggaaattggctcagagatggacaacacctgggccaatgggccatctggaccaaaggtggggtgtggggccctggatggcagctctggcccagacatgaatacctcgtgttcctcctccctctattactgtttcaccagagctgtcttagctcaaatctgttgtgtttctgagtctagggtctgtacacttgtttataataaatgcaatcgtttgga

SEQ ID NO: 62298 - DNA, 2114 bp, Homo sapiens
agcggctcctcctcctcctgctcccccggacagaggttccgggaaccagccgggccggggcggggcggggcgagggagaggggcggccgcgcggatcactgaggctgtggcggcactgcgcccggcgctcgcgtccgtccgcccgtccgcccgcccagccatgactgcgccggtccccgcgccgcggatcctgttgccgttgctgttgctgctgctgctaacgccgcctccgggtgcacgtggtgaggtgtgtatggcttcccgtggactcagcctcttccccgagtcctgtccagatttctgctgtggtacctgtgatgaccaatactgctgctctgacgtgctgaagaaatttgtgtggagcgaggaaaggtgtgctgtgcctgaggccagcgtgcctgccagtgtagagccggtggagcagctgggctcggcgctgaggtttcgccctggctacaacgaccccatgtcagggttcggagcgaccttggccgttggcctgaccatctttgtgctgtctgtcgtcactatcatcatctgcttcacctgctcctgctgctgcctttacaagacgtgccgccgaccacgtccggttgtcaccaccaccacatccaccactgtggtgcatgccccttatcctcagcctccaagtgtgccgcccagctaccctggaccaagctaccagggctaccacaccatgccgcctcagccagggatgccagcagcaccctacccaatgcagtacccaccaccttacccagcccagcccatgggcccaccggcctaccacgagaccctggctggaggagcagccgcgccctaccccgccagccagcctccttacaacccggcctacatggatgccccgaaggcggccctctgagcattccctggcctctctggctgccacttggttatgttgtgtgtgtgcgtgagtggtgtgcaggcgcggttccttacgccccatgtgtgctgtgtgtgtccaggcacggttccttacgccccatgtgtgctgtgtgtgtcctgcctgtatatgtggcttcctctgatgctgacaaggtggggaacaatccttgccagagtgggctgggaccagactttgttctcttcctcacctgaaattatgcttcctaaaatctcaagccaaactcaaagaatggggtggtggggggcaccctgtgaggtggcccctgagaggtgggggcctctccagggcacatctggagttcttctccagcttaccctagggtgaccaagtagggcctgtcacaccagggtggcgcagctttctgtgtgatgcagatgtgtcctggtttcggcagcgtagccagctgctgcttgaggccatggctcgtccccggagttgggggtacccgttgcagagccagggacatgatgcaggcgaagcttgggatctggccaagttggactttgatcctttgggcagatgtcccattgctccctggagcctgtcatgcctgttggggatcaggcagcctcctgatgccagaacacctcaggcagagccctactcagctgtacctgtctgcctggactgtcccctgtccccgcatctcccctgggaccagctggagggccacatgcacacacagcctagctgcccccagggagctctgctgcccttgctggccctgcccttcccacaggtgagcagggctcctgtccaccagcacactcagttctcttccctgcagtgttttcattttattttagccaaacattttgcctgttttctgtttcaaacatgatagttgatatgagactgaaacccctgggttgtggagggaaattggctcagagatggacaacctggcaactgtgagtccctgcttcccgacaccagcctcatggaatatgcaacaactcctgtaccccagtccacggtgttctggcagcagggacacctgggccaatgggccatctggaccaaaggtggggtgtggggccctggatggcagctctggcccagacatgaatacctcgtgttcctcctccctctattactgtttcaccagagctgtcttagctcaaatctgttgtgtttctgagtctagggtctgtacacttgtttataataaatgcaatcgtttgga

SEQ ID NO: 62299 - DNA, 1964 bp, Homo sapiens
  misc_feature (12)..(12): n is a, c, g, or t
  misc_feature (15)..(15): n is a, c, g, or t
tcatcgctgtcnccncgcgtatgggattcgtcgaccacgcctcgttttctccaaaaggggaggaaattgaaactgagtggcccacgatgggaagaggggaaagcccaggggtacaggaggcctctgggtgaaggcagaggctaacatggggttcggagcgaccttggccgttggcctgaccatctttgtgctgtctgtcgtcactatcatcatctgcttcacctgctcctgctgctgcctttacaagacgtgccgccgaccacgtccggttgtcaccaccaccacatccaccactgtggtgcatgccccttatcctcagcctccaagtgtgccgcccagctaccctggaccaagctaccagggctaccacaccatgccgcctcagccagggatgccagcagcaccctacccaatgcagtacccaccaccttacccagcccagcccatgggcccaccggcctaccacgagaccctggctggtgagtgcccctgccaactctagccctgcccgacttcccgagtctctgccagcatccctcgggcacccatcccaaactacatcactcaacaggcctctgcccctttctgcttgcctgccactcacacggcagcccaccatgctcacagccaaccagggtcctctctgctttcaggaggagcagccgcgccctaccccgccagccagcctccttacaacccggcctacatggatgccccgaaggcggccctctgagcattccctggcctctctggctgccacttggttatgttgtgtgtgtgcgtgagtggtgtgcaggcgcggttccttacgccccatgtgtgctgtgtgtgtccaggcacggttccttacgccccatgtgtgctgtgtgtgtcctgcctgtatatgtggcttcctctgatgctgacaaggtggggaacaatccttgccagagtgggctgggaccagactttgttctcttcctcacctgaaattatgcttcctaaaatctcaagccaaactcaaagaatggggtggtggggggcaccctgtgaggtggcccctgagaggtgggggcctctccagggcacatctggagttcttctccagcttaccctagggtgaccaagtagggcctgtcacaccagggtggcgcagctttctgtgtgatgcagatgtgtcctggtttcggcagcgtagccagctgctgcttgaggccatggctcgtccccggagttgggggtacccgttgcagagccagggacatgatgcaggcgaagcttgggatctggccaagttggactttgatcctttgggcagatgtcccattgctccctggagcctgtcatgcctgttggggatcaggcagcctcctgatgccagaacacctcaggcagagccctactcagctgtacctgtctgcctggactgtcccctgtccccgcatctcccctgggaccagctggagggccacatgcacacacagcctagctgcccccagggagctctgctgcccttgctggccctgcccttcccacaggtgagcagggctcctgtccaccagcacactcagttctcttccctgcagtgttttcattttattttagccaaacattttgcctgttttctgtttcaaacatgatagttgatatgagactgaaacccctgggttgtggagggaaattggctcagagatggacaacctggcaactgtgagtccctgcttcccgacaccagcctcatggaatatgcaacaactcctgtaccccagtccacggtgttctggcagcagggacacctgggccaatgggccatctggaccaaaggtggggtgtggggccctggatggcagctctggcccagacatgaatacctcgtgttcctcctccctctattactgtttcaccagagctgtcttagctcaaatctgttgtgtttctgagtctagggtctgtacacttgtttataataaatgcaatcgtttgga

SEQ ID NO: 62300 - DNA, 1756 bp, Homo sapiens
  misc_feature (12)..(12): n is a, c, g, or t
  misc_feature (15)..(15): n is a, c, g, or t
tcatcgctgtcnccncgcgtatgggattcgtcgaccacgcctcgttttctccaaaaggggaggaaattgaaactgagtggcccacgatgggaagaggggaaagcccaggggtacaggaggcctctgggtgaaggcagaggctaacatggggttcggagcgaccttggccgttggcctgaccatctttgtgctgtctgtcgtcactatcatcatctgcttcacctgctcctgctgctgcctttacaagacgtgccgccgaccacgtccggttgtcaccaccaccacatccaccactgtggtgcatgccccttatcctcagcctccaagtgtgccgcccagctaccctggaccaagctaccagggctaccacaccatgccgcctcagccagggatgccagcagcaccctacccaatgcagtacccaccaccttacccagcccagcccatgggcccaccggcctaccacgagaccctggctggaggagcagccgcgccctaccccgccagccagcctccttacaacccggcctacatggatgccccgaaggcggccctctgagcattccctggcctctctggctgccacttggttatgttgtgtgtgtgcgtgagtggtgtgcaggcgcggttccttacgccccatgtgtgtgtgtgctgtgtgtgtcctgcctgtatatgtggcttcctctgatgctgacaaggtggggaacaatccttgccagagtgggctgggaccagactttgttctcttcctcacctgaaattatgcttcctaaaatctcaagccaaactcaaagaatggggtggtggggggcaccctgtgaggtggcccctgagaggtgggggcctctccagggcacatctggagttcttctccagcttaccctagggtgaccaagtagggcctgtcacaccagggtggcgcagctttctgtgtgatgcagatgtgtcctggtttcggcagcgtagccagctgctgcttgaggccatggctcgtccccggagttgggggtacccgttgcagagccagggacatgatgcaggcgaagcttgggatctggccaagttggactttgatcctttgggcagatgtcccattgctccctggagcctgtcatgcctgttggggatcaggcagcctcctgatgccagaacacctcaggcagagccctactcagctgtacctgtctgcctggactgtcccctgtccccgcatctcccctgggaccagctggagggccacatgcacacacagcctagctgcccccagggagctctgctgcccttgctggccctgcccttcccacaggtgagcagggctcctgtccaccagcacactcagttctcttccctgcagtgttttcattttattttagccaaacattttgcctgttttctgtttcaaacatgatagttgatatgagactgaaacccctgggttgtggagggaaattggctcagagatggacaacctggcaactgtgagtccctgcttcccgacaccagcctcatggaatatgcaacaactcctgtaccccagtccacggtgttctggcagcagggacacctgggccaatgggccatctggaccaaaggtggggtgtggggccctggatggcagctctggcccagacatgaatacctcgtgttcctcctccctctattactgtttcaccagagctgtcttagctcaaatctgttgtgtttctgagtctagggtctgtacacttgtttataataaatgcaatcgtttgga

SEQ ID NO: 62301 - DNA, 1743 bp, Homo sapiens
  misc_feature (12)..(12): n is a, c, g, or t
  misc_feature (15)..(15): n is a, c, g, or t
tcatcgctgtcnccncgcgtatgggattcgtcgaccacgcctcgttttctccaaaaggggaggaaattgaaactgagtggcccacgatgggaagaggggaaagcccaggggtacaggaggcctctgggtgaaggcagaggctaacatggggttcggagcgaccttggccgttggcctgaccatctttgtgctgtctgtcgtcactatcatcatctgcttcacctgctcctgctgctgcctttacaagacgtgccgccgaccacgtccctcagcctccaagtgtgccgcccagctaccctggaccaagctaccagggctaccacaccatgccgcctcagccagggatgccagcagcaccctacccaatgcagtacccaccaccttacccagcccagcccatgggcccaccggcctaccacgagaccctggctggaggagcagccgcgccctaccccgccagccagcctccttacaacccggcctacatggatgccccgaaggcggccctctgagcattccctggcctctctggctgccacttggttatgttgtgtgtgtgcgtgagtggtgtgcaggcgcggttccttacgccccatgtgtgctgtgtgtgtccaggcacggttccttacgccccatgtgtgctgtgtgtgtcctgcctgtatatgtggcttcctctgatgctgacaaggtggggaacaatccttgccagagtgggctgggaccagactttgttctcttcctcacctgaaattatgcttcctaaaatctcaagccaaactcaaagaatggggtggtggggggcaccctgtgaggtggcccctgagaggtgggggcctctccagggcacatctggagttcttctccagcttaccctagggtgaccaagtagggcctgtcacaccagggtggcgcagctttctgtgtgatgcagatgtgtcctggtttcggcagcgtagccagctgctgcttgaggccatggctcgtccccggagttgggggtacccgttgcagagccagggacatgatgcaggcgaagcttgggatctggccaagttggactttgatcctttgggcagatgtcccattgctccctggagcctgtcatgcctgttggggatcaggcagcctcctgatgccagaacacctcaggcagagccctactcagctgtacctgtctgcctggactgtcccctgtccccgcatctcccctgggaccagctggagggccacatgcacacacagcctagctgcccccagggagctctgctgcccttgctggccctgcccttcccacaggtgagcagggctcctgtccaccagcacactcagttctcttccctgcagtgttttcattttattttagccaaacattttgcctgttttctgtttcaaacatgatagttgatatgagactgaaacccctgggttgtggagggaaattggctcagagatggacaacctggcaactgtgagtccctgcttcccgacaccagcctcatggaatatgcaacaactcctgtaccccagtccacggtgttctggcagcagggacacctgggccaatgggccatctggaccaaaggtggggtgtggggccctggatggcagctctggcccagacatgaatacctcgtgttcctcctccctctattactgtttcaccagagctgtcttagctcaaatctgttgtgtttctgagtctagggtctgtacacttgtttataataaatgcaatcgtttgga

SEQ ID NO: 62302 - DNA, 1585 bp, Homo sapiens
cgctccgaaccctgacatggggtcgttgtagccagggcgaaacctcagcgccgaccacgtccggttgtcaccaccaccacatccaccactgtggtgcatgccccttatcctcagcctccaagtgtgccgcccagctaccctggaccaagctaccagggctaccacaccatgccgcctcagccagggatgccagcagcaccctacccaatgcagtacccaccaccttacccagcccagcccatgggcccaccggcctaccacgagaccctggctggaggagcagccgcgccctaccccgccagccagcctccttacaacccggcctacatggatgccccgaaggcggccctctgagcattccctggcctctctggctgccacttggttatgttgtgtgtgtgcgtgagtggtgtgcaggcgcggttccttacgccccatgtgtgctgtgtgtgtccaggcacggttccttacgccccatgtgtgctgtgtgtgtcctgcctgtatatgtggcttcctctgatgctgacaaggtggggaacaatccttgccagagtgggctgggaccagactttgttctcttcctcacctgaaattatgcttcctaaaatctcaagccaaactcaaagaatggggtggtggggggcaccctgtgaggtggcccctgagaggtgggggcctctccagggcacatctggagttcttctccagcttaccctagggtgaccaagtagggcctgtcacaccagggtggcgcagctttctgtgtgatgcagatgtgtcctggtttcggcagcgtagccagctgctgcttgaggccatggctcgtccccggagttgggggtacccgttgcagagccagggacatgatgcaggcgaagcttgggatctggccaagttggactttgatcctttgggcagatgtcccattgctccctggagcctgtcatgcctgttggggatcaggcagcctcctgatgccagaacacctcaggcagagccctactcagctgtacctgtctgcctggactgtcccctgtccccgcatctcccctgggaccagctggagggccacatgcacacacagcctagctgcccccagggagctctgctgcccttgctggccctgcccttcccacaggtgagcagggctcctgtccaccagcacactcagttctcttccctgcagtgttttcattttattttagccaaacattttgcctgttttctgtttcaaacatgatagttgatatgagactgaaacccctgggttgtggagggaaattggctcagagatggacaacctggcaactgtgagtccctgcttcccgacaccagcctcatggaatatgcaacaactcctgtaccccagtccacggtgttctggcagcagggacacctgggccaatgggccatctggaccaaaggtggggtgtggggccctggatggcagctctggcccagacatgaatacctcgtgttcctcctccctctattactgtttcaccagagctgtcttagctcaaatctgttgtgtttctgagtctagggtctgtacacttgtttataataaatgcaatcgtttgga

SEQ ID NO: 62303 - DNA, 2023 bp, Homo sapiens
agcggctcctcctcctcctgctcccccggacagaggttccgggaaccagccgggccggggcggggcggggcgagggagaggggcggccgcgcggatcactgaggctgtggcggcactgcgcccggcgctcgcgtccgtccgcccgtccgcccgcccagccatgactgcgccggtccccgcgccgcggatcctgttgccgttgctgttgctgctgctgctaacgccgcctccgggtgcacgtggtgaggtgtgtatggcttcccgtggactcagcctcttccccgagtcctgtccagatttctgctgtggtacctgtgatgaccaatactgctgctctgacgtgctgaagaaatttgtgtggagcgaggaaaggtgtgctgtgcctgaggccagcgtgcctgccagtgtagagccggtggagcagctgggctcggcgctgaggtttcgccctggctacaacgaccccatgtcagggttcggagcgaccttggccgttggcctgaccatctttgtgctgtctgtcgtcactatcatcatctgcttcacctgctcctgctgctgcctttacaagacgtgccgccgaccacgtccggttgtcaccaccaccacatccaccactgtggtgcatgccccttatcctcagcctccaagtgtgccgcccagctaccctggaccaagctaccagggctaccacaccatgccgcctcagccagggatgccagcagcaccctacccaatgcagtacccacttacaacccggcctacatggatgccccgaaggcggccctctgagcattccctggcctctctggctgccacttggttatgttgtgtgtgtgcgtgagtggtgtgcaggcgcggttccttacgccccatgtgtgctgtgtgtgtccaggcacggttccttacgccccatgtgtgctgtgtgtgtcctgcctgtatatgtggcttcctctgatgctgacaaggtggggaacaatccttgccagagtgggctgggaccagactttgttctcttcctcacctgaaattatgcttcctaaaatctcaagccaaactcaaagaatggggtggtggggggcaccctgtgaggtggcccctgagaggtgggggcctctccagggcacatctggagttcttctccagcttaccctagggtgaccaagtagggcctgtcacaccagggtggcgcagctttctgtgtgatgcagatgtgtcctggtttcggcagcgtagccagctgctgcttgaggccatggctcgtccccggagttgggggtacccgttgcagagccagggacatgatgcaggcgaagcttgggatctggccaagttggactttgatcctttgggcagatgtcccattgctccctggagcctgtcatgcctgttggggatcaggcagcctcctgatgccagaacacctcaggcagagccctactcagctgtacctgtctgcctggactgtcccctgtccccgcatctcccctgggaccagctggagggccacatgcacacacagcctagctgcccccagggagctctgctgcccttgctggccctgcccttcccacaggtgagcagggctcctgtccaccagcacactcagttctcttccctgcagtgttttcattttattttagccaaacattttgcctgttttctgtttcaaacatgatagttgatatgagactgaaacccctgggttgtggagggaaattggctcagagatggacaacctggcaactgtgagtccctgcttcccgacaccagcctcatggaatatgcaacaactcctgtaccccagtccacggtgttctggcagcagggacacctgggccaatgggccatctggaccaaaggtggggtgtggggccctggatggcagctctggcccagacatgaatacctcgtgttcctcctccctctattactgtttcaccagagctgtcttagctcaaatctgttgtgtttctgagtctagggtctgtacacttgtttataataaatgcaatcgtttgga

SEQ ID NO: 62304 - DNA, 1699 bp, Homo sapiens
  misc_feature (12)..(12): n is a, c, g, or t
  misc_feature (15)..(15): n is a, c, g, or t
tcatcgctgtcnccncgcgtatgggattcgtcgaccacgcctcgttttctccaaaaggggaggaaattgaaactgagtggcccacgatgggaagaggggaaagcccaggggtacaggaggcctctgggtgaaggcagaggctaacatggggttcggagcgaccttggccgttggcctgaccatctttgtgctgtctgtcgtcactatcatcatctgcttcacctgctcctgctgctgcctttacaagacgtgccgccgaccacgtccggttgtcaccaccaccacatccaccactgtggtgcatgccccttatcctcagcctccaagtgtgccgcccagctaccctggaccaagctaccagggctaccacaccatgccgcctcagccagggatgccagcagcaccctacccaatgcagtacccacttacaacccggcctacatggatgccccgaaggcggccctctgagcattccctggcctctctggctgccacttggttatgttgtgtgtgtgcgtgagtggtgtgcaggcgcggttccttacgccccatgtgtgctgtgtgtgtccaggcacggttccttacgccccatgtgtgctgtgtgtgtcctgcctgtatatgtggcttcctctgatgctgacaaggtggggaacaatccttgccagagtgggctgggaccagactttgttctcttcctcacctgaaattatgcttcctaaaatctcaagccaaactcaaagaatggggtggtggggggcaccctgtgaggtggcccctgagaggtgggggcctctccagggcacatctggagttcttctccagcttaccctagggtgaccaagtagggcctgtcacaccagggtggcgcagctttctgtgtgatgcagatgtgtcctggtttcggcagcgtagccagctgctgcttgaggccatggctcgtccccggagttgggggtacccgttgcagagccagggacatgatgcaggcgaagcttgggatctggccaagttggactttgatcctttgggcagatgtcccattgctccctggagcctgtcatgcctgttggggatcaggcagcctcctgatgccagaacacctcaggcagagccctactcagctgtacctgtctgcctggactgtcccctgtccccgcatctcccctgggaccagctggagggccacatgcacacacagcctagctgcccccagggagctctgctgcccttgctggccctgcccttcccacaggtgagcagggctcctgtccaccagcacactcagttctcttccctgcagtgttttcattttattttagccaaacattttgcctgttttctgtttcaaacatgatagttgatatgagactgaaacccctgggttgtggagggaaattggctcagagatggacaacctggcaactgtgagtccctgcttcccgacaccagcctcatggaatatgcaacaactcctgtaccccagtccacggtgttctggcagcagggacacctgggccaatgggccatctggaccaaaggtggggtgtggggccctggatggcagctctggcccagacatgaatacctcgtgttcctcctccctctattactgtttcaccagagctgtcttagctcaaatctgttgtgtttctgagtctagggtctgtacacttgtttataataaatgcaatcgtttgga

SEQ ID NO: 62305 - DNA, 2118 bp, Homo sapiens
  misc_feature (12)..(12): n is a, c, g, or t
  misc_feature (15)..(15): n is a, c, g, or t
tcatcgctgtcnccncgcgtatgggattcgtcgaccacgcctcgttttctccaaaaggggaggaaattgaaactgagtggcccacgatgggaagaggggaaagcccaggggtacaggaggcctctgggtgaaggcagaggctaacatggggttcggagcgaccttggccgttggcctgaccatctttgtgctgtctgtcgtcactatcatcatctgcttcacctgctcctgctgctgcctttacaagacgtgccgccgaccacgtcgtaagcgtgcccaccctgccccactgtgaccccctggggtggtaagggaagctgaccaggccctgctttggctaagctggagggatgggtggcaagcctggctctcaagacctggggagatggaggagggtcctgactggaattctctttgcagcggttgtcaccaccaccacatccaccactgtggtgcatgccccttatcctcagcctccaagtgtgccgcccagctaccctggaccaagctaccagggctaccacaccatgccgcctcagccagggatgccagcagcaccctacccaatgcagtacccaccaccttacccagcccagcccatgggcccaccggcctaccacgagaccctggctggtgagtgcccctgccaactctagccctgcccgacttcccgagtctctgccagcatccctcgggcacccatcccaaactacatcactcaacaggcctctgcccctttctgcttgcctgccactcacacggcagcccaccatgctcacagccaaccagggtcctctctgctttcaggaggagcagccgcgccctaccccgccagccagcctccttacaacccggcctacatggatgccccgaaggcggccctctgagcattccctggcctctctggctgccacttggttatgttgtgtgtgtgcgtgagtggtgtgcaggcgcggttccttacgccccatgtgtgctgtgtgtgtccaggcacggttccttacgccccatgtgtgctgtgtgtgtcctgcctgtatatgtggcttcctctgatgctgacaaggtggggaacaatccttgccagagtgggctgggaccagactttgttctcttcctcacctgaaattatgcttcctaaaatctcaagccaaactcaaagaatggggtggtggggggcaccctgtgaggtggcccctgagaggtgggggcctctccagggcacatctggagttcttctccagcttaccctagggtgaccaagtagggcctgtcacaccagggtggcgcagctttctgtgtgatgcagatgtgtcctggtttcggcagcgtagccagctgctgcttgaggccatggctcgtccccggagttgggggtacccgttgcagagccagggacatgatgcaggcgaagcttgggatctggccaagttggactttgatcctttgggcagatgtcccattgctccctggagcctgtcatgcctgttggggatcaggcagcctcctgatgccagaacacctcaggcagagccctactcagctgtacctgtctgcctggactgtcccctgtccccgcatctcccctgggaccagctggagggccacatgcacacacagcctagctgcccccagggagctctgctgcccttgctggccctgcccttcccacaggtgagcagggctcctgtccaccagcacactcagttctcttccctgcagtgttttcattttattttagccaaacattttgcctgttttctgtttcaaacatgatagttgatatgagactgaaacccctgggttgtggagggaaattggctcagagatggacaacctggcaactgtgagtccctgcttcccgacaccagcctcatggaatatgcaacaactcctgtaccccagtccacggtgttctggcagcagggacacctgggccaatgggccatctggaccaaaggtggggtgtggggccctggatggcagctctggcccagacatgaatacctcgtgttcctcctccctctattactgtttcaccagagctgtcttagctcaaatctgttgtgtttctgagtctagggtctgtacacttgtttataataaatgcaatcgtttgga

SEQ ID NO: 62306 - DNA, 1465 bp, Homo sapiens
  misc_feature (12)..(12): n is a, c, g, or t
  misc_feature (15)..(15): n is a, c, g, or t
tcatcgctgtcnccncgcgtatgggattcgtcgaccacgcctcgttttctccaaaaggggaggaaattgaaactgagtggcccacgatgggaagaggggaaagcccaggggtacaggaggcctctgggtgaaggcagaggctaacatggggttcggagcgaccttggccgttggcctgaccatctttgtgctgtctgtcgtcactatcatcatctgcttcacctgctcctgctgctgcctttacaagacgtgccgccgaccacgtctatgttgtgtgtgtgcgtgagtggtgtgcaggcgcggttccttacgccccatgtgtgctgtgtgtgtccaggcacggttccttacgccccatgtgtgctgtgtgtgtcctgcctgtatatgtggcttcctctgatgctgacaaggtggggaacaatccttgccagagtgggctgggaccagactttgttctcttcctcacctgaaattatgcttcctaaaatctcaagccaaactcaaagaatggggtggtggggggcaccctgtgaggtggcccctgagaggtgggggcctctccagggcacatctggagttcttctccagcttaccctagggtgaccaagtagggcctgtcacaccagggtggcgcagctttctgtgtgatgcagatgtgtcctggtttcggcagcgtagccagctgctgcttgaggccatggctcgtccccggagttgggggtacccgttgcagagccagggacatgatgcaggcgaagcttgggatctggccaagttggactttgatcctttgggcagatgtcccattgctccctggagcctgtcatgcctgttggggatcaggcagcctcctgatgccagaacacctcaggcagagccctactcagctgtacctgtctgcctggactgtcccctgtccccgcatctcccctgggaccagctggagggccacatgcacacacagcctagctgcccccagggagctctgctgcccttgctggccctgcccttcccacaggtgagcagggctcctgtccaccagcacactcagttctcttccctgcagtgttttcattttattttagccaaacattttgcctgttttctgtttcaaacatgatagttgatatgagactgaaacccctgggttgtggagggaaattggctcagagatggacaacctggcaactgtgagtccctgcttcccgacaccagcctcatggaatatgcaacaactcctgtaccccagtccacggtgttctggcagcagggacacctgggccaatgggccatctggaccaaaggtggggtgtggggccctggatggcagctctggcccagacatgaatacctcgtgttcctcctccctctattactgtttcaccagagctgtcttagctcaaatctgttgtgtttctgagtctagggtctgtacacttgtttataataaatgcaatcgtttgga

SEQ ID NO: 62307 - DNA, 1356 bp, Homo sapiens
  misc_feature (12)..(12): n is a, c, g, or t
  misc_feature (15)..(15): n is a, c, g, or t
tcatcgctgtcnccncgcgtatgggattcgtcgaccacgcctcgttttctccaaaaggggaggaaattgaaactgagtggcccacgatgggaagaggggaaagcccaggggtacaggaggcctctgggtgaaggcagaggctaacatggggttcggagcgaccttggccgttggcctgaccatctttgtgctgtctgtcgtcactatcatcatcctgtgtgtgtccaggcacggttccttacgccccatgtgtgctgtgtgtgtcctgcctgtatatgtggcttcctctgatgctgacaaggtggggaacaatccttgccagagtgggctgggaccagactttgttctcttcctcacctgaaattatgcttcctaaaatctcaagccaaactcaaagaatggggtggtggggggcaccctgtgaggtggcccctgagaggtgggggcctctccagggcacatctggagttcttctccagcttaccctagggtgaccaagtagggcctgtcacaccagggtggcgcagctttctgtgtgatgcagatgtgtcctggtttcggcagcgtagccagctgctgcttgaggccatggctcgtccccggagttgggggtacccgttgcagagccagggacatgatgcaggcgaagcttgggatctggccaagttggactttgatcctttgggcagatgtcccattgctccctggagcctgtcatgcctgttggggatcaggcagcctcctgatgccagaacacctcaggcagagccctactcagctgtacctgtctgcctggactgtcccctgtccccgcatctcccctgggaccagctggagggccacatgcacacacagcctagctgcccccagggagctctgctgcccttgctggccctgcccttcccacaggtgagcagggctcctgtccaccagcacactcagttctcttccctgcagtgttttcattttattttagccaaacattttgcctgttttctgtttcaaacatgatagttgatatgagactgaaacccctgggttgtggagggaaattggctcagagatggacaacctggcaactgtgagtccctgcttcccgacaccagcctcatggaatatgcaacaactcctgtaccccagtccacggtgttctggcagcagggacacctgggccaatgggccatctggaccaaaggtggggtgtggggccctggatggcagctctggcccagacatgaatacctcgtgttcctcctccctctattactgtttcaccagagctgtcttagctcaaatctgttgtgtttctgagtctagggtctgtacacttgtttataataaatgcaatcgtttgga

SEQ ID NO: 62308 - DNA, 1925 bp, Homo sapiens
  misc_feature (12)..(12): n is a, c, g, or t
  misc_feature (15)..(15): n is a, c, g, or t
tcatcgctgtcnccncgcgtatgggattcgtcgaccacgcctcgttttctccaaaaggggaggaaattgaaactgagtggcccacgatgggaagaggggaaagcccaggggtacaggaggcctctgggtgaaggcagaggctaacatggggttcggagcgaccttggccgttggcctgaccatctttgtgctgtctgtcgtcactatcatcatctgcttcacctgctcctgctgctgcctttacaagacgtgccgccgaccacgtccggttgtcaccaccaccacatccaccactgtggtgcatgccccttatcctcagcctccaagtgtgccgcccagctaccctggaccaagctaccagggctaccacaccatgccgcctcagccagggatgccagcagcaccctacccaatgcagtacccaccaccttacccagcccagcccatgggcccaccggcctaccacgagaccctggctggtgagtgcccctgccaactctagccctgcccgacttcccgagtctctgccagcatccctcgggcacccatcccaaactacatcactcaacaggcctctgcccctttctgcttgcctgccactcacacggcagcccaccatgctcacagccaaccagggtcctctctgctttcaggaggagcagccgcgccctaccccgccagccagcctccttacaacccggcctacatggatgccccgaaggcggccctctgagcattccctggcctctctggctgccacttggttatgttgtgtgtgtgcgtgagtggtgtgcaggcgcggttccttacgccccatgtgtgctgtgtgtgtccaggcacggttccttacgccccatgtgtgctgtgtgtgtcctgcctgtatatgtggcttcctctgatgctgacaaggtggggaacaatccttgccagagtgggctgggaccagactttgttctcttcctcacctgaaattatgcttcctaaaatctctgaggtggcccctgagaggtgggggcctctccagggcacatctggagttcttctccagcttaccctagggtgaccaagtagggcctgtcacaccagggtggcgcagctttctgtgtgatgcagatgtgtcctggtttcggcagcgtagccagctgctgcttgaggccatggctcgtccccggagttgggggtacccgttgcagagccagggacatgatgcaggcgaagcttgggatctggccaagttggactttgatcctttgggcagatgtcccattgctccctggagcctgtcatgcctgttggggatcaggcagcctcctgatgccagaacacctcaggcagagccctactcagctgtacctgtctgcctggactgtcccctgtccccgcatctcccctgggaccagctggagggccacatgcacacacagcctagctgcccccagggagctctgctgcccttgctggccctgcccttcccacaggtgagcagggctcctgtccaccagcacactcagttctcttccctgcagtgttttcattttattttagccaaacattttgcctgttttctgtttcaaacatgatagttgatatgagactgaaacccctgggttgtggagggaaattggctcagagatggacaacctggcaactgtgagtccctgcttcccgacaccagcctcatggaatatgcaacaactcctgtaccccagtccacggtgttctggcagcagggacacctgggccaatgggccatctggaccaaaggtggggtgtggggccctggatggcagctctggcccagacatgaatacctcgtgttcctcctccctctattactgtttcaccagagctgtcttagctcaaatctgttgtgtttctgagtctagggtctgtacacttgtttataataaatgcaatcgtttgga

SEQ ID NO: 62309 - DNA, 1152 bp, Homo sapiens
  misc_feature (12)..(12): n is a, c, g, or t
  misc_feature (15)..(15): n is a, c, g, or t
tcatcgctgtcnccncgcgtatgggattcgtcgaccacgcctcgttttctccaaaaggggaggaaattgaaactgagtggcccacgatgggaagaggggaaagcccaggggtacaggaggcctctgggtgaaggcagaggctaacatggggttcggagcgaccttggccgttggcctgaccatctttgtgctgtctgtcgtcactatcatcatctgcttcacctgctcctgctgctgcctttacaagacgtgccgccgaccacgtccggttgtcaccaccaccacatccaccactgtggtgcatgccccttatcctcagcctccaagtgtgccgcccagctaccctggaccaagctaccagggctaccacaccatgccgcctcagccagggatgccagcagcaccctacccaatgcagtacccaccaccttacccagcccagcccatgggcccaccggcctaccacgagaccctggctggaggagcagccgcgccctaccccgccagccagcctccttacaacccggcctacatggatgccccgaaggcggccctctgagcattccctggcctctctggctgccacttggttatgttgtgtgtgtgcgtgagtggtgtgcaggcgcggttccttacgccccatgtgtgctgtgtgtgtccaggcacggttccttacgccccatgtgtgctgtgtgtgtcctgcctgtatatgtggcttcctctgatgctgacaaggtggggaacaatccttgccagagtgggctgggaccagacaaacattttgcctgttttctgtttcaaacatgatagttgatatgagactgaaacccctgggttgtggagggaaattggctcagagatggacaacctggcaactgtgagtccctgcttcccgacaccagcctcatggaatatgcaacaactcctgtaccccagtccacggtgttctggcagcagggacacctgggccaatgggccatctggaccaaaggtggggtgtggggccctggatggcagctctggcccagacatgaatacctcgtgttcctcctccctctattactgtttcaccagagctgtcttagctcaaatctgttgtgtttctgagtctagggtctgtacacttgtttataataaatgcaatcgtttgga

SEQ ID NO: 62310 - DNA, 1476 bp, Homo sapiens
agcggctcctcctcctcctgctcccccggacagaggttccgggaaccagccgggccggggcggggcggggcgagggagaggggcggccgcgcggatcactgaggctgtggcggcactgcgcccggcgctcgcgtccgtccgcccgtccgcccgcccagccatgactgcgccggtccccgcgccgcggatcctgttgccgttgctgttgctgctgctgctaacgccgcctccgggtgcacgtggtgaggtgtgtatggcttcccgtggactcagcctcttccccgagtcctgtccagatttctgctgtggtacctgtgatgaccaatactgctgctctgacgtgctgaagaaatttgtgtggagcgaggaaaggtgtgctgtgcctgaggccagcgtgcctgccagtgtagagccggtggagcagctgggctcggcgctgaggtttcgccctggctacaacgaccccatgtcagggttcggagcgaccttggccgttggcctgaccatctttgtgctgtctgtcgtcactatcatcatctgcttcacctgctcctgctgctgcctttacaagacgtgccgccgaccacgtccggttgtcaccaccaccacatccaccactgtggtgcatgccccttatcctcagcctccaagtgtgccgcccagctaccctggaccaagctaccagggctaccacaccatgccgcctcagccagggatgccagcagcaccctacccaatgcagtacccaccaccttacccagcccagcccatgggcccaccggcctaccacgagaccctggctggaggagcagccgcgccctaccccgccagccagcctccttacaacccggcctacatggatgccccgaaggcggccctctgagcattccctggcctctctggctgccacttggttatgttgtgtgtgtgcgtgagtggtgtgcaggcgcggttccttacgccccatgtgtgctgtgtgtgtccaggcacggttccttacgccccatgtgtgctgtgtgtgtcctgcctgtatatgtggcttcctctgatgctgacaaggtggggaacaatccttgccagagtgggctgggaccagacaaacattttgcctgttttctgtttcaaacatgatagttgatatgagactgaaacccctgggttgtggagggaaattggctcagagatggacaacctggcaactgtgagtccctgcttcccgacaccagcctcatggaatatgcaacaactcctgtaccccagtccacggtgttctggcagcagggacacctgggccaatgggccatctggaccaaaggtggggtgtggggccctggatggcagctctggcccagacatgaatacctcgtgttcctcctccctctattactgtttcaccagagctgtcttagctcaaatctgttgtgtttctgagtctagggtctgtacacttgtttataataaatgcaatcgtttgga

SEQ ID NO: 62311 - DNA, 817 bp, Homo sapiens
  misc_feature (12)..(12): n is a, c, g, or t
  misc_feature (15)..(15): n is a, c, g, or t
tcatcgctgtcnccncgcgtatgggattcgtcgaccacgcctcgttttctccaaaaggggaggaaattgaaactgagtggcccacgatgggaagaggggaaagcccaggggtacaggaggcctctgggtgaaggcagaggctaacatggggttcggagcgaccttggccgttggcctgaccatctttgtgctgtctgtcgtcactatcatcatctgcttcacctgctcctgctgctgcctttacaagacgtgccgccgaccacgtccggttgtcaccaccaccacatccaccactgtggtgcatgccccttatcctcagcctccaagtgtgccgcccagctaccctggaccaagctaccagggctaccacaccatgccgcctcagccagggatgccagcagcaccctacccaatgcagtacccaccaccttacccagcccagcccatgggcccaccggcctaccacgagaccctggctgtatgagactgaaacccctgggttgtggagggaaattggctcagagatggacaacctggcaactgtgagtccctgcttcccgacaccagcctcatggaatatgcaacaactcctgtaccccagtccacggtgttctggcagcagggacacctgggccaatgggccatctggaccaaaggtggggtgtggggccctggatggcagctctggcccagacatgaatacctcgtgttcctcctccctctattactgtttcaccagagctgtcttagctcaaatctgttgtgtttctgagtctagggtctgtacacttgtttataataaatgcaatcgtttgga

SEQ ID NO: 62312 - DNA, 907 bp, Homo sapiens
  misc_feature (12)..(12): n is a, c, g, or t
  misc_feature (15)..(15): n is a, c, g, or t
  misc_feature (876)..(876): n is a, c, g, or t
tcatcgctgtcnccncgcgtatgggattcgtcgaccacgcctcgttttctccaaaaggggaggaaattgaaactgagtggcccacgatgggaagaggggaaagcccaggggtacaggaggcctctgggtgaaggcagaggctaacatggggttcggagcgaccttggccgttggcctgaccatctttgtgctgtctgtcgtcactatcatcatctgcttcacctgctcctgctgctgcctttacaagacgtgccgccgaccacgtccggttgtcaccaccaccacatccaccactgtggtgcatgccccttatcctcagcctccaagtgtgccgcccagctaccctggaccaagctaccagggctaccacaccatgccgcctcagccagggatgccagcagcaccctacccaatgcagtacccaccaccttacccagcccagcccatgggcccaccggcctaccacgagaccctggctgtatgagactgaaacccctgggttgtggagggaaattggctcagagatggacaacctggcaactgtgagtccctgcttcccgacaccagcctcatggaatatgcaacaactcctgtaccccagtccacggtgttctggcagcagggacacctgggccaatgggccatctggaccaaaggtggggtgtggggccctggatggcagctctggcccagacatgaatacctcgtgttcctcctccctctattactgtttcaccagagctgtcttagctcaaatctgttgtgtttctgagtctagggtctgtacacttgtttataataaatgcaatcgtttggaaaaaaaaaaatgggtacccaactgttggaaaatcaataaaggttaattcacacattttnttatcggcccccgtggcctcagagggggagc

SEQ ID NO: 62313 - DNA, 428 bp, Homo sapiens
  misc_feature (12)..(12): n is a, c, g, or t
  misc_feature (15)..(15): n is a, c, g, or t
tcatcgctgtcnccncgcgtatgggattcgtcgaccacgcctcgttttctccaaaaggggaggaaattgaaactgagtggcccacgatgggaagaggggaaagcccaggggtacaggaggcctctgggtgaaggcagaggctaacatggggttcggagcgaccttggccgttggcctgaccatctttgtgctgtctgtcgtcactatcatcatctgcttcacctgctcctgctgctgcctttacaagacgtgccgccgaccacgtccggttgtcaccaccaccacatccaccactgtggtgcatgccccttatcctcagcctccaagtgtgccgcccagctaccctggaccaagctaccagggctaccacaccatgccgcctcagccagggatgccagcaccagcaatacaggggataatctagagtg

SEQ ID NO: 62314 - DNA, 491 bp, Homo sapiens
  misc_feature (12)..(12): n is a, c, g, or t
  misc_feature (15)..(15): n is a, c, g, or t
tcatcgctgtcnccncgcgtatgggattcgtcgaccacgcctcgttttctccaaaaggggaggaaattgaaactgagtggcccacgatgggaagaggggaaagcccaggggtacaggaggcctctgggtgaaggcagaggctaacatggggttcggagcgaccttggccgttggcctgaccatctttgtgctgtctgtcgtcactatcatcatctgcttcacctgctcctgctgctgcctttacaagacgtgccgccgaccacgtccggttgtcaccaccaccacatccaccactgtggtgcatgccccttatcctcagcctccaagtgtgccgcccagctacccctggatggcagctctggcccagacatgaatacctcgtgttcctcctccctctattactgtttcaccagagctgtcttagctcaaatctgttgtgtttctgagtctagggtctgtacacttgtttataataaatgcaatcgtttgga

SEQ ID NO: 62315 - DNA, 1527 bp, Homo sapiens
gccctgtaggcttggctcagggaggcagctctgggaggcaaatggggcacctctgcttcccctcctccccggcccccgccccttggctccttggctgctagccggctgctgggcggggccatcctgtgtctttaagagggtggaacggggcttcgcgtctgtgcttcctgtggctgacgtcatctggaggagatttgctttctttttctccaaaaggggaggaaattgaaactgagtggcccacgatgggaagaggggaaagcccaggggtacaggaggcctctgggtgaaggcagaggctaacatggggttcggagcgaccttggccgttggcctgaccatctttctgtgtgtgtccaggcacggttccttacgccccatgtgtgctgtgtgtgtcctgcctgtatatgtggcttcctctgatgctgacaaggtggggaacaatccttgccagagtgggctgggaccagactttgttctcttcctcacctgaaattatgcttcctaaaatctcaagccaaactcaaagaatggggtggtggggggcaccctgtgaggtggcccctgagaggtgggggcctctccagggcacatctggagttcttctccagcttaccctagggtgaccaagtagggcctgtcacaccagggtggcgcagctttctgtgtgatgcagatgtgtcctggtttcggcagcgtagccagctgctgcttgaggccatggctcgtccccggagttgggggtacccgttgcagagccagggacatgatgcaggcgaagcttgggatctggccaagttggactttgatcctttgggcagatgtcccattgctccctggagcctgtcatgcctgttggggatcaggcagcctcctgatgccagaacacctcaggcagagccctactcagctgtacctgtctgcctggactgtcccctgtccccgcatctcccctgggaccagctggagggccacatgcacacacagcctagctgcccccagggagctctgctgcccttgctggccctgcccttcccacaggtgagcagggctcctgtccaccagcacactcagttctcttccctgcagtgttttcattttattttagccaaacattttgcctgttttctgtttcaaacatgatagttgaaatgccccttatcctcagcctccaagtgtgccgcccagctaccctggaccaagctaccagggctaccacaccatgccgcctcagccagggatgccagcagcaccctacccaatgcagtacccaccaccttacccagcccagcccatgggcccaccggcctaccacgagaccctggctggaggagcagccgcgccctaccccgccagccagcctccttacaacccggcctacctggatggcagctctggcccagacatgaatacctcgtgttcctcctccctctattactgtttcaccagagctgtcttagctcaaatctgttgtgtttctgagtctagggtctgtacacttgtttataataaatgcaatcgtttgga

SEQ ID NO: 62316 - DNA, 721 bp, Homo sapiens
tcccctgtccccgcagacaggtacagctgagttggactttgatcctttgggcagatgtcccattgctccctggagcctgtcatgcctgttggggatcaggcagcctcctgatgccagaacacctcaggcagagccctactcagctgtacctgtctgcctggactgtcccctgtccccgcatctcccctgggaccagctggagggccacatgcacacacagcctagctgcccccagggagctctgctgcccttgctggccctgcccttcccacaggtgagcagggctcctgtccaccagcacactcagttctcttccctgcagtgttttcattttattttagccaaacattttgcctgttttctgtttcaaacatgatagttgatatgagactgaaacccctgggttgtggagggaaattggctcagagatggacaacctggcaactgtgagtccctgcttcccgacaccagcctcatggaatatgcaacaactcctgtaccccagtccacggtgttctggcagcagggacacctgggccaatgggccatctggaccaaaggtggggtgtggggccctggatggcagctctggcccagacatgaatacctcgtgttcctcctccctctattactgtttcaccagagctgtcttagctcaaatctgttgtgtttctgagtctagggtctgtacacttgtttataataaatgcaatcgtttgga

SEQ ID NO: 62317 - DNA, 2133 bp, Homo sapiens
  misc_feature (12)..(12): n is a, c, g, or t
  misc_feature (15)..(15): n is a, c, g, or t
  misc_feature (1805)..(1805): n is a, c, g, or t
  misc_feature (1807)..(1807): n is a, c, g, or t
  misc_feature (1810)..(1810): n is a, c, g, or t
  misc_feature (1813)..(1813): n is a, c, g, or t
tcatcgctgtcnccncgcgtatgggattcgtcgaccacgcctcgttttctccaaaaggggaggaaattgaaactgagtggcccacgatgggaagaggggaaagcccaggggtacaggaggcctctgggtgaaggcagaggctaacatggggttcggagcgaccttggccgttggcctgaccatctttgtgctgtctgtcgtcactatcatcatctgcttcacctgctcctgctgctgcctttacaagacgtgccgccgaccacgtccggttgtcaccaccaccacatccaccactgtggtgcatgccccttatcctcagcctccaagtgtgccgcccagctaccctggaccaagctaccagggctaccacaccatgccgcctcagccagggatgccagcagcaccctacccaatgcagtacccaccaccttacccagcccagcccatgggcccaccggcctaccacgagaccctggctggaggagcagccgcgccctaccccgccagccagcctccttacaacccggcctacatggatgccccgaaggcggccctctgagcattccctggcctctctggctgccacttggttatgttgtgtgtgtgcgtgagtggtgtgcaggcgcggttccttacgccccatgtgtgctgtgtgtgtccaggcacggttccttacgccccatgtgtgctgtgtgtgtcctgcctgtatatgtggcttcctctgatgctgacaaggtggggaacaatccttgccagagtgggctgggaccagactttgttctcttcctcacctgaaattatgcttcctaaaatctcaagccaaactcaaagaatggggtggtggggggcaccctgtgaggtggcccctgagaggtgggggcctctccagggcacatctggagttcttctccagcttaccctagggtgaccaagtagggcctgtcacaccagggtggcgcagctttctgtgtgatgcagatgtgtcctggtttcggcagcgtagccagctgctgcttgaggccatggctcgtccccggagttgggggtacccgttgcagagccagggacatgatgcaggcgaagcttgggatctggccaagttggactttgatcctttgggcagatgtcccattgctccctggagcctgtcatgcctgttggggatcaggcagcctcctgatgccagaacacctcaggcagagccctactcagctgtacctgtctgcctggactgtcccctgtccccgcatctcccctgggaccagctggagggccacatgcacacacagcctagctgcccccagggagctctgctgcccttgctggccctgcccttcccacaggtgagcagggctcctgtccaccagcacactcagttctcttccctgcagtgttttcattttattttagccaaacattttgcctgttttctgtttcaaacatgatagttgatatgagactgaaacccctgggttgtggagggaaattggctcagagatggacaacctggcaactgtgagtccctgcttcccgacaccagcctcatggaatatgcaacaactcctgtaccccagtccacggtgttctggcagcagggacacctgggccaatgggccatctggaccaaaggtggggtgtggggccctggatggcagctctggcccagacatgaatacctcgtgttcctcctccctctattactgtttcaccagagctgtcttagctcaaatctgttgtgtttctgagtctagggtctgtacacttgtttataataaatgcaatcgtttggaaaaaaaaaaaaaaananacnaanaacaaaaaaacacaccaacaacccacacaaacaacaacaaaaccaggcgggggcgccgctcacaaacaaacacacaccccccaagaggagcccaaaccgacgcacggaaacgagcaccgcaacaagacagctgacgaaaaaacaggaggcccacaacagaaagacagaggaagaagaaaacaagagaaccagaacgagagagcaggaagcaaaaaaacaccgaggagagcaaggagcaccaccgacgccgaaggcacaatcccggagaaaaacgaacaacaacacatgtcgggaagacaaatgagggaacaactacacag

SEQ ID NO: 62318 - DNA, 1848 bp, Homo sapiens
  misc_feature (12)..(12): n is a, c, g, or t
  misc_feature (15)..(15): n is a, c, g, or t
tcatcgctgtcnccncgcgtatgggattcgtcgaccacgcctcgttttctccaaaaggggaggaaattgaaactgagtggcccacgatgggaagaggggaaagcccaggggtacaggaggcctctgggtgaaggcagaggctaacatggggttcggagcgaccttggccgttggcctgaccatctttgtgctgtctgtcgtcactatcatcatctgcttcacctgctcctgctgctgcctttacaagacgtgccgccgaccacgtccggttgtcaccaccaccacatccaccactgtggtgcatgccccttatcctcagcctccaagtgtgccgcccagctaccctggaccaagctaccagggctaccacaccatgccgcctcagccagggatgccagcagcaccctacccaatgcagtacccaccaccttacccagcccagcccatgggcccaccggcctaccacgagaccctggctggaggagcagccgcgccctaccccgccagccagcctccttacaacccggcctacatggatgccccgaaggcggccctctgagcattccctggcctctctggctgccacttggttatgttgtgtgtgtgcgtgagtggtgtgcaggcgcggttccttacgccccatgtgtgctgtgtgtgtccaggcacggttccttacgccccatgtgtgctgtgtgtgtcctgcctgtatatgtggcttcctctgatgctgacaaggtggggaacaatccttgccagagtgggctgggaccagactttgttctcttcctcacctgaaattatgcttcctaaaatctcaagccaaactcaaagaatggggtggtggggggcaccctgtgaggtggcccctgagaggtgggggcctctccagggcacatctggagttcttctccagcttaccctagggtgaccaagtagggcctgtcacaccagggtggcgcagctttctgtgtgatgcagatgtgtcctggtttcggcagcgtagccagctgctgcttgaggccatggctcgtccccggagttgggggtacccgttgcagagccagggacatgatgcaggcgaagcttgggatctggccaagttggactttgatcctttgggcagatgtcccattgctccctggagcctgtcatgcctgttggggatcaggcagcctcctgatgccagaacacctcaggcagagccctactcagctgtacctgtctgcctggactgtcccctgtccccgcatctcccctgggaccagctggagggccacatgcacacacagcctagctgcccccagggagctctgctgcccttgctggccctgcccttcccacaggtgagcagggctcctgtccaccagcacactcagttctcttccctgcagtgttttcattttattttagccaaacattttgcctgttttctgtttcaaacatgatagttgatatgagactgaaacccctgggttgtggagggaaattggctcagagatggacaacctggcaactgtgagtccctgcttcccgacaccagcctcatggaatatgcaacaactcctgtaccccagtccacggtgttctggcagcagggacacctgggccaatgggccatctggaccaaaggtggggtgtggggccctggatggcagctctggcccagacatgaatacctcgtgttcctcctccctctattactgtttcaccagagctgtcttagctcaaatctgttgtgtttctgagtctagggtctgtacacttgtttataataaatgcaatcgtttggaaaaaaaacaagtccaatctccctatcaactagcccctcagtaaccaccaccaagaggg

SEQ ID NO: 62319 - DNA, 1145 bp, Homo sapiens
  misc_feature (12)..(12): n is a, c, g, or t
  misc_feature (15)..(15): n is a, c, g, or t
tcatcgctgtcnccncgcgtatgggattcgtcgaccacgcctcgttttctccaaaaggggaggaaattgaaactgagtggcccacgatgggaagaggggaaagcccaggggtacaggaggcctctgggtgaaggcagaggctaacatggggttcggagcgaccttggccgttggcctgaccatctttgtgctgtctgtcgtcactatcatcatctgcttcacctgctcctgctgctgcctttacaagacgtgccgccgaccacgtccggttgtcaccaccaccacatccaccactgtggtgcatgccccttatcctcagcctccaagtgtgccgcccagctaccctggaccaagctaccagggctaccacaccatgccgcctcagccagggatgccagcagcaccctacccaatgcagtacccacttacaacccggcctacatggatgccccgaaggcggccctctgagcattccctggcctctctggctgccacttggttatgttgtgtgtgtgcgtgagtggtgtgcaggcgcggttccttacgccccatgtgtgctgtgtgtgtccaggcacggttccttacgccccatgtgtgctgtgtgtgtcctgcctgtatatgtggcttcctctgatgctgacaaggtggggaacaatccttgccagagtgggctgggaccagactttgttctcttcctcacctgaaattatgcttcctaaaatctcactcagttctcttccctgcagtgttttcattttattttagccaaacattttgcctgttttctgtttcaaacatgatagttgatatgagactgaaacccctgggttgtggagggaaattggctcagagatggacaacctggcaactgtgagtccctgcttcccgacaccagcctcatggaatatgcaacaactcctgtaccccagtccacggtgttctggcagcagggacacctgggccaatgggccatctggaccaaaggtggggtgtggggccctggatggcagctctggcccagacatgaatacctcgtgttcctcctccctctattactgtttcaccagagctgtcttagctcaaatctgttgtgtttctgagtctagggtctgtacacttgtttataataaatgcaatcgtttgga

SEQ ID NO: 62320 - DNA, 661 bp, Homo sapiens
  misc_feature (12)..(12): n is a, c, g, or t
  misc_feature (15)..(15): n is a, c, g, or t
tcatcgctgtcnccncgcgtatgggattcgtcgaccacgcctcgttttctccaaaaggggaggaaattgaaactgagtggcccacgatgggaagaggggaaagcccaggggtacaggaggcctctgggtgaaggcagaggctaacatggggttcggagcgaccttggccgttggcctgaccatctttgtgctgtctgtcgtcactatcatcatctgcttcacctgctcctgctgctgcctttacaagacgtgccgccgaccacgtccggttgtcaccaccaccacatccaccactgtggtgcatgccccttatcctcagcctccaagtgtgccgcccagctaccctggaccaagctaccagggctaccacaccatgccgcctcagccagggatgccagcagcaccctacccaatgcagtacccaggaagatggcggacattcagactgagcgtgcctaccaaaagcagccgaccatctttcaaaacaagaagagggtcctgctgggagaaactggcaaggagaagctcccgcggtactacaagaacatcggtctggggcttcaagacacccaaggaggctattgagggcacctacattgacaagaaatgccccttcactggtaatgtgtccattcgagggcggatcctctctggcgtggtg

SEQ ID NO: 62321 - DNA, 454 bp, Homo sapiens
ttccctgcagtgttttcattttattttagccaaacattttgcctgttttctgtttcaaacatgatagttgatatgagactgaaacccctgggttgtggagggaaattggctcagagatggacaacctggcaactgtgagtccctgcttcccgacaccagcctcatggaatatgcaacaactcctgtaccccagtccacggtgttctggcagcagggacacctgggccaatgggccatctggaccaaaggtggggtgtggggccctggatggcagctctggcccagacatgaatacctcgtgttcctcctccctctattactgtttcaccagagctgtcttagctcaaatctgttgtgtttctgagtctagggtctgtacacttgtttataataaatgcaatcgtttggaagctgctgccccctttcttcctggcctcggctgctggaattggaa

SEQ ID NO: 62322 - DNA, 403 bp, Homo sapiens
tattagcaatgtttattaaaagtcacaaaatactagtctctgaaacaaaaatctcatgactgagattggcttttagtaaatagttgccatgaagaaaaacagttctttgggcaaagctttaatgagtgcattatttataataacaaactttagaaacaacctaaatataaaaaaaaagtgtaacaaataaactgtggcacaaccattcaatggaacgttaaacacaattttcaattattttataaagaaactgtaataacataaaaaatgaaaagcaatgagtaattttaaaaatcttcactcaactgggaatgttatttttatagtgtaaaagattagtaaatttttttttttttgagacagattcttgctctgttgcccaggctggagtgagtggcatgat

SEQ ID NO: 62323 - DNA, 892 bp, Homo sapiens
  misc_feature (639)..(639): n is a, c, g, or t
  misc_feature (718)..(719): n is a, c, g, or t
  misc_feature (736)..(736): n is a, c, g, or t
  misc_feature (738)..(739): n is a, c, g, or t
  misc_feature (791)..(791): n is a, c, g, or t
  misc_feature (813)..(813): n is a, c, g, or t
ggtcttctccaagctgaagggccgtggcggtcttctggggaggcagcgttcagggagattactatggagatctggctgctcgcctgggctatttccccagtagcattgtccgagaggaccagaccctgaaacctggcaaagtcgatgtgaagacagacacttcctcttcaaattcctggtgattggcagtgcaggaactggcaaatcatgtctccttcatcagttcattgagaataagttcaaacaggactccaaccacacaatcggcgtggagtttggatcccgggtggtcaacgtgggtgggaagactgtgaagctacagatttgggacacggctggccaggagcggtttcggtcagtgacgcggagttattaccgaggggcggctggagccctgctggtgtacgacatcaccagccgggagacatacaactcactggctgcctggctgacggatgcccgcaccctggccagccccaacatcgtggtcatcctctgtggcaacaagaaggacctggaccctgagcgggaggtcactttcctggaggcctcccgctttgcccaggagaatgagctgatgttcctggagaccagcgctctcacaggcgagaacgtggaggaggcgttcctcaagtgtgnccgcactatcctcaacaagattgactcaggcgagctagacccggagaggatgggctctggcattcagtacggggatgcnntcctccgcagcttcggnannctcggagtgcccaggccgtggccctcagcgtgtggtgctgagctctgtgganccagtcacctgttctccaggancaagcctgctggggccaggccaaggtctgagagccgtgtctaacttgcctggccggaaaaactaattggccactgtccc

SEQ ID NO: 62324 - DNA, 378 bp, Homo sapiens
agacttacttgggtgttcagaaagggcctctgaacaggtggcatttaagctgagattcatatgacaaggatggagcagttatgtggagatcagggagaagggagaatgcaaaggccttcagcaggcacaagcttgccatcttcccagaccctagcttttaactcctcttccccaggttcagggagattactatggagatctggctgctcgcctgggctatttccccagtagcattgtccgagaggaccagaccctgaaacctggcaaagtcgatgtgaagacagacaaatgggatttctactgccagtgagctcagcctaccgctggccctgccgtttcccctccttgggtttatgcaaatacaatcagcccagtgca

SEQ ID NO: 62325 - DNA, 899 bp, Homo sapiens
  misc_feature (646)..(646): n is a, c, g, or t
  misc_feature (725)..(726): n is a, c, g, or t
  misc_feature (743)..(743): n is a, c, g, or t
  misc_feature (745)..(746): n is a, c, g, or t
  misc_feature (798)..(798): n is a, c, g, or t
  misc_feature (820)..(820): n is a, c, g, or t
cgccggaggggggcggaggcggaagtggcggtgccgggcccggggagtaggaaggagccggggctgtagccggagtggagcggctgccagccgaggagcaggcgcggccgcggcgccatattgcggccctcagcggccgcgaccgagtcatggctgagacctacgacttcctcttcaaattcctggtgattggcagtgcaggaactggcaaatcatgtctccttcatcagttcattgagaataagttcaaacaggactccaaccacacaatcggcgtggagtttggatcccgggtggtcaacgtgggtgggaagactgtgaagctacagatttgggacacggctggccaggagcggtttcggtcagtgacgcggagttattaccgaggggcggctggagccctgctggtgtacgacatcaccagccgggagacatacaactcactggctgcctggctgacggatgcccgcaccctggccagccccaacatcgtggtcatcctctgtggcaacaagaaggacctggaccctgagcgggaggtcactttcctggaggcctcccgctttgcccaggagaatgagctgatgttcctggagaccagcgctctcacaggcgagaacgtggaggaggcgttcctcaagtgtgnccgcactatcctcaacaagattgactcaggcgagctagacccggagaggatgggctctggcattcagtacggggatgcnntcctccgcagcttcggnannctcggagtgcccaggccgtggccctcagcgtgtggtgctgagctctgtgganccagtcacctgttctccaggancaagcctgctggggccaggccaaggtctgagagccgtgtctaacttgcctggccggaaaaactaattggccactgtccc

SEQ ID NO: 62326 - DNA, 536 bp, Homo sapiens
cagaccactaccttccatacaccaccctggagcctccctgtgacggggcttcctgaccggcctgtctgagcatgaaagggctgagccctccataggcgggcgtgctgacaggatgcacgtggtggaggacatctgctgcatttggctgtgtgacatctccccctcgccttctgaacaggtctctgcagaggccatgaaaaatgtgccattcagcttttctgctaattgttgaaggcccagctgccaccgctctggatctacaccccatttgcaatgaagccacacatctcgtgagccactcccagcccgtgactgggcacagcaggggccctaacgcaggatagctctgaggaggtgtgggacccttgacagtggaggacattggcccgagaactcttcatcgacctgatcaaacctctcttggaactgcaaagcagtctgagactcttctcccagtttattatctccctattaactatctatagtgtagctcattggaaaagagtcattaattttgattatcaaattcactcctt

SEQ ID NO: 62327 - DNA, 337 bp, Homo sapiens
ggtggacccagccttctgtctgtgttgtgcacaggggacacgaggactccccctgccctgccgcagcccccagagcacatggtgcgggttccaatccgcgcctgccctgccacagcctccagagcacatggcgcgctttccaaaccactcctgggagcctagaggccagaggagggaggagagcaggaccagcagctggcccagaccccgcctcttcctacaccacttccgcttttctccctcctcactgagtcatcttgaaagggctcagcagcagtaactgtgggacaggggctcttccatttgaaaaattaaaagaggcttggttaaggcacca

SEQ ID NO: 62328 - DNA, 222 bp, Homo sapiens
gtgccattacaacttttctgtaaccctgaaattgtgtcaaagtgaaaattttttaaatgagattataagagcataatcaaattggaattttcttaggataccagagaatcattttcttctcaggtaaaggaatttttcttttgtagtccagagctatacatgattaagaaaatgttcagaccaggaagatgacatctctgctaacctaatcgattatcatgg

SEQ ID NO: 62329 - DNA, 5764 bp, Homo sapiens
atctctatccttcttctggtccttcctagaaaatcaggtggagatgatagtggcttgcatgatggtggtagagctggaggtgcagggcaaaggtcagattctgaatatattttgaaagtaaaggcaacaagatttcctgacagattgattatggtgtgtcaaagaaagagaggaatgcaggatgattccagtgtttttgttgacaactataagtctggagctgccaactggatgcagaagttcactggagggcccagcctggggaaaggatcaggagcaggttaggcatgttaagcttgagatgtctgttaaacatccagataggaatgtcaaagatgcacttgtgtttaagagtcaggaatgcaagagggaattttaggctagaaacaaaaagttagaaattattcgatacagatggtatttaaagctgtgtgactgactgacatgacagaagtggcgagaatagactgagaagtccaaggaatgagccttggaccactccagtgttaggtaagtagttgaaaaaaagagagagagagaaggcatcaaaggagactgaggaagagtgatcaggaaagcataggaaaatccgagaaacatatggtgtcctggaatctatatgaaaaagatatattcagaaagacagagtgataaatctgtcaaattattgaatttgtcaggtaaaataagaacagagaattgatctttggacttagcaaagcagagattatcagtgacttttataaaaatagtttcggtagtgtggaaagatcaaacttctgtttagagtgggtttcagagagaacaacaggaattgaagaagtaataaactttgccaaccagtttagctccaaaggaaaagagggaaatatgatggtagctggcaggggaagtgtggtcaagagaggttttttgtttgtttttcaagatggaagaaataacagtatgtatgtaagctcacaggagggatccagcaggcatggggaaattgatgatataggacagaaagggaagaatggctccttgtgaaagtgaaaggggatgggatctacaggatgaacatgcaaacaaagactggctgcaaagagaggcatgaatagttcatttacagaaacagcaaaggcagagtgttggtacagatgctggtaagtggaaaaatatcatggtaggaggttatggagttccattctaaacacttcaacttcatcagtgaaataagcacggtaatttagcagaatgtgaagatgtaaaagaacagaatttgagaaaacagacgatatgaaataattattagaaaagcagagactgaagaaactgtcatctccttatgtgctaatgagtttaataatgtcctccagtcaccacaagccttctttcaaactacacaattccaactgcttccgtctcagagtatcttgaaataatgatctgaccgcctgttagaccagtgaagggaaggaatttgggttgatttaagaagagaatcctcatggtcatggtagactgatatggagagaaaacattttgaggaaaaatactcaactaaattcatttctactccagcatgcagtttcaagtcaagttccaccttagctccaggtggcaggcagagcaggatgcagaggcacagcacaagtaagggatccaatgactgagtcaagaattacataacctggccagacagctggtacatgggaaagtgctaagagggcaccaacagcgttcctcctccccaaggagcataatgtgatggttcctgccggccctggctgactctcgccgtccttggagataattgggttcagtgccacctggaccagaactggggatgcggaagcaacctgccagacacgcgcgaggttcgaggctgagatggatcttgaggcggcaaagaacggaacagcctggcgccccacgagcgcggagggcgactttgaactgggcatcagcagcaaacaaaaaaggaaaaaaacgaagacagtgaaaatgattggagtattaacattgtttcgatactccgattggcaggataaattgtttatgtcgctgggtaccatcatggccatagctcacggatcaggtctccccctcatgatgatagtatttggagagatgactgacaaatttgttgatactgcaggaaacttctcctttccagtgaacttttccttgtcgctgctaaatccaggcaaaattctggaagaagaaatgactagatatgcatattactactcaggattgggtgctggagttcttgttgctgcctatatacaagtttcattttggactttggcagctggtcgacagatcaggaaaattaggcagaagttttttcatgctattctacgacaggaaataggatggtttgacatcaatgacaccactgaactcaatacgcggctaacagatgacatctccaaaatcagtgaaggaattggtgacaaggttggaatgttctttcaagcagtagccacgttttttgcaggattcatagtgggattcatcagaggatggaagctcacccttgtgataatggccatcagccctattctaggactctctgcagccgtttgggcaaagatactctcggcatttagtgacaaagaactagctgcttatgcaaaagcaggcgccgtggcagaagaggctctgggggccatcaggactgtgatagctttcgggggccagaacaaagagctggaaaggtatcagaaacatttagaaaatgccaaagagattggaattaaaaaagctatttcagcaaacatttccatgggtattgccttcctgttaatatatgcatcatatgcactggccttctggtatggatccactctagtcatatcaaaagaatatactattggaaatgcaatgacagtttttttttcaatcctaattggagctttcagtgttggccaggctgccccatgtattgatgcttttgccaatgcaagaggagcagcatatgtgatctttgatattattgataataatcctaaaattgacagtttttcagagagaggacacaaaccagacagcatcaaagggaatttggagttcaatgatgttcacttttcttacccttctcgagctaacgtcaagatcttgaagggcctcaacctgaaggtgcagagtgggcagacggtggccctggttggaagtagtggctgtgggaagagcacaacggtccagctgatacagaggctctatgaccctgatgagggcacaattaacattgatgggcaggatattaggaactttaatgtaaactatctgagggaaatcattggtgtggtgagtcaggagccggtgctgttttccaccacaattgctgaaaatatttgttatggccgtggaaatgtaaccatggatgagataaagaaagctgtcaaagaggccaacgcctatgagtttatcatgaaattaccacagaaatttgacaccctggttggagagagaggggcccagctgagtggtgggcagaagcagaggatcgccattgcacgtgccctggttcgcaaccccaagatccttctgctggatgaggccacgtcagcattggacacagaaagtgaagctgaggtacaggcagctctggataaggccagagaaggccggaccaccattgtgatagcacaccgactgtctacggtccgaaatgcagatgtcatcgctgggtttgaggatggagtaattgtggagcaaggaagccacagcgaactgatgaagaaggaaggggtgtacttcaaacttgtcaacatgcagacatcaggaagccagatccagtcagaagaatttgaactaaatgatgaaaaggctgccactagaatggccccaaatggctggaaatctcgcctatttaggcattctactcagaaaaaccttaaaaattcacaaatgtgtcagaagagccttgatgtggaaaccgatggacttgaagcaaatgtgccaccagtgtcctttctgaaggtcctgaaactgaataaaacagaatggccctactttgtcgtgggaacagtatgtgccattgccaatggggggcttcagccggcattttcagtcatattctcagagatcatagcgatttttggaccaggcgatgatgcagtgaagcagcagaagtgcaacatattctctttgattttcttatttctgggaattatttctttttttactttcttccttcagggtttcacgtttgggaaagctggcgagatcctcaccagaagactgcggtcaatggcttttaaagcaatgctaagacaggacatgagctggtttgatgaccataaaaacagtactggtgcactttctacaagacttgccacagatgctgcccaagtccaaggagccacaggaaccaggttggctttaattgcacagaatatagctaaccttggaactggtattatcatatcatttatctacggttggcagttaaccctattgctattagcagttgttccaattattgctgtgtcaggaattgttgaaatgaaattgttggctggaaatgccaaaagagataaaaaagaactggaagctgctggaaagattgcaacagaggcaatagaaaatattaggacagttgtgtctttgacccaggaaagaaaatttgaatcaatgtatgttgaaaaattgtatggaccttacaggaattctgtgcagaaggcacacatctatggaattacttttagtatctcacaagcatttatgtatttttcctatgccggttgttttcgatttggtgcatatctcattgtgaatggacatatgcgcttcagagatgttattctggtgttttctgcaattgtatttggtgcagtggctctaggacatgccagttcatttgctccagactatgctaaagctaagctgtctgcagcccacttattcatgctgtttgaaagacaacctctgattgacagctacagtgaagaggggctgaagcctgataaatttgaaggaaatataacatttaatgaagtcgtgttcaactatcccacccgagcaaacgtgccagtgcttcaggggctgagcctggaggtgaagaaaggccagacactagccctggtgggcagcagtggctgtgggaagagcacggtggtccagctcctggagcggttctacgaccccttggcggggacagtgcttctcgatggtcaagaagcaaagaaactcaatgtccagtggctcagagctcaactcggaatcgtgtctcaggagcctatcctatttgactgcagcattgccgagaatattgcctatggagacaacagccgggttgtatcacaggatgaaattgtgagtgcagccaaagctgccaacatacatcctttcatcgagacgttaccccacaaatatgaaacaagagtgggagataaggggactcagctctcaggaggtcaaaaacagaggattgctattgcccgagccctcatcagacaacctcaaatcctcctgttggatgaagctacatcagctctggatactgaaagtgaaaaggttgtccaagaagccctggacaaagccagagaaggccgcacctgcattgtgattgctcaccgcctgtccaccatccagaatgcagacttaatagtggtgtttcagaatgggagagtcaaggagcatggcacgcatcagcagctgctggcacagaaaggcatctatttttcaatggtcagtgtccaggctgggacacagaacttatgaacttttgctacagtatattttaaaaataaattcaaattattctacccatttt

SEQ ID NO: 62330 - DNA, 5785 bp, Homo sapiens
atctctatccttcttctggtccttcctagaaaatcaggtggagatgatagtggcttgcatgatggtggtagagctggaggtgcagggcaaaggtcagattctgaatatattttgaaagtaaaggcaacaagatttcctgacagattgattatggtgtgtcaaagaaagagaggaatgcaggatgattccagtgtttttgttgacaactataagtctggagctgccaactggatgcagaagttcactggagggcccagcctggggaaaggatcaggagcaggttaggcatgttaagcttgagatgtctgttaaacatccagataggaatgtcaaagatgcacttgtgtttaagagtcaggaatgcaagagggaattttaggctagaaacaaaaagttagaaattattcgatacagatggtatttaaagctgtgtgactgactgacatgacagaagtggcgagaatagactgagaagtccaaggaatgagccttggaccactccagtgttaggtaagtagttgaaaaaaagagagagagagaaggcatcaaaggagactgaggaagagtgatcaggaaagcataggaaaatccgagaaacatatggtgtcctggaatctatatgaaaaagatatattcagaaagacagagtgataaatctgtcaaattattgaatttgtcaggtaaaataagaacagagaattgatctttggacttagcaaagcagagattatcagtgacttttataaaaatagtttcggtagtgtggaaagatcaaacttctgtttagagtgggtttcagagagaacaacaggaattgaagaagtaataaactttgccaaccagtttagctccaaaggaaaagagggaaatatgatggtagctggcaggggaagtgtggtcaagagaggttttttgtttgtttttcaagatggaagaaataacagtatgtatgtaagctcacaggagggatccagcaggcatggggaaattgatgatataggacagaaagggaagaatggctccttgtgaaagtgaaaggggatgggatctacaggatgaacatgcaaacaaagactggctgcaaagagaggcatgaatagttcatttacagaaacagcaaaggcagagtgttggtacagatgctggtaagtggaaaaatatcatggtaggaggttatggagttccattctaaacacttcaacttcatcagtgaaataagcacggtaatttagcagaatgtgaagatgtaaaagaacagaatttgagaaaacagacgatatgaaataattattagaaaagcagagactgaagaaactgtcatctccttatgtgctaatgagtttaataatgtcctccagtcaccacaagccttctttcaaactacacaattccaactgcttccgtctcagagtatcttgaaataatgatctgaccgcctgttagaccagtgaagggaaggaatttgggttgatttaagaagagaatcctcatggtcatggtagactgatatggagagaaaacattttgaggaaaaatactcaactaaattcatttctactccagcatgcagtttcaagtcaagttccaccttagctccaggtggcaggcagagcaggatgcagaggcacagcacaagtaagggatccaatgactgagtcaagaattacataacctggccagacagctggtacatgggaaagtgctaagagggcaccaacagcgttcctcctccccaaggagcataatgtgatggttcctgccggccctggctgactctcgccgtccttggagataattgggttcagtgccacctggaccagaactggggatgcggaagcaacctgccagacacgcgcgaggttcgaggctgagatggatcttgaggcggcaaagaacggaacagcctggcgccccacgagcgcggagggcgactttgaactgggcatcagcagcaaacaaaaaaggaaaaaaacgaagacagtgaaaatgattggagtattaacattgtttcgatactccgattggcaggataaattgtttatgtcgctgggtaccatcatggccatagctcacggatcaggtctccccctcatgatgatagtatttggagagatgactgacaaatttgttgatactgcaggaaacttctcctttccagtgaacttttccttgtcgctgctaaatccaggcaaaattctggaagaagaaatgactagatatgcatattactactcaggattgggtgctggagttcttgttgctgcctatatacaagtttcattttggactttggcagctggtcgacagatcaggaaaattaggcagaagttttttcatgctattctacgacaggaaataggatggtttgacatcaatgacaccactgaactcaatacgcggctaacagatgacatctccaaaatcagtgaaggaattggtgacaaggttggaatgttctttcaagcagtagccacgttttttgcaggattcatagtgggattcatcagaggatggaagctcacccttgtgataatggccatcagccctattctaggactctctgcagccgtttgggcaaagatactctcggcatttagtgacaaagaactagctgcttatgcaaaagcaggcgccgtggcagaagaggctctgggggccatcaggactgtgatagctttcgggggccagaacaaagagctggaaaggtatcagaaacatttagaaaatgccaaagagattggaattaaaaaagctatttcagcaaacatttccatgggtattgccttcctgttaatatatgcatcatatgcactggccttctggtatggatccactctagtcatatcaaaagaatatactattggaaatgcaatgacagtttttttttcaatcctaattggagctttcagtgttggccaggctgccccatgtattgatgcttttgccaatgcaagaggagcagcatatgtgatctttgatattattgataataatcctaaaattgacagtttttcagagagaggacacaaaccagacagcatcaaagggaatttggagttcaatgatgttcacttttcttacccttctcgagctaacgtcaagatcttgaagggcctcaacctgaaggtgcagagtgggcagacggtggccctggttggaagtagtggctgtgggaagagcacaacggtccagctgatacagaggctctatgaccctgatgagggcacaattaacattgatgggcaggatattaggaactttaatgtaaactatctgagggaaatcattggtgtggtgagtcaggagccggtgctgttttccaccacaattgctgaaaatatttgttatggccgtggaaatgtaaccatggatgagataaagaaagctgtcaaagaggccaacgcctatgagtttatcatgaaattaccacagaaatttgacaccctggttggagagagaggggcccagctgagtggtgggcagaagcagaggatcgccattgcacgtgccctggttcgcaaccccaagatccttctgctggatgaggccacgtcagcattggacacagaaagtgaagctgaggtacaggcagctctggataaggccagagaaggccggaccaccattgtgatagcacaccgactgtctacggtccgaaatgcagatgtcatcgctgggtttgaggatggagtaattgtggagcaaggaagccacagcgaactgatgaagaaggaaggggtgtacttcaaacttgtcaacatgcagacatcaggaagccagatccagtcagaagaatttgaactaaatgatgaaaaggctgccactagaatggccccaaatggctggaaatctcgcctatttaggcattctactcagaaaaaccttaaaaattcacaaatgtgtcagaagagccttgatgtggaaaccgatggacttgaagcaaatgtgccaccagtgtcctttctgaaggtcctgaaactgaataaaacagaatggccctactttgtcgtgggaacagtatgtgccattgccaatggggggcttcagccggcattttcagtcatattctcagagatcatagcgatttttggaccaggcgatgatgcagtgaagcagcagaagtgcaacatattctctttgattttcttatttctgggaattatttctttttttactttcttccttcagggtttcacgtttgggaaagctggcgagatcctcaccagaagactgcggtcaatggcttttaaagcaatgctaagacaggacatgagctggtttgatgaccataaaaacagtactggtgcactttctacaagacttgccacagatgctgcccaagtccaaggagccacaggaaccaggttggctttaattgcacagaatatagctaaccttggaactggtattatcatatcatttatctacggttggcagttaaccctattgctattagcagttgttccaattattgctgtgtcaggaattgttgaaatgaaattgttggctggaaatgccaaaagagataaaaaagaactggaagctgctggaaagattgcaacagaggcaatagaaaatattaggacagttgtgtctttgacccaggaaagaaaatttgaatcaatgtatgttgaaaaattgtatggaccttacaggaattctgtgcagaaggcacacatctatggaattacttttagtatctcacaagcatttatgtatttttcctatgccggttgttttcgatttggtgcatatctcattgtgaatggacatatgcgcttcagagatgttattctggtgttttctgcaattgtatttggtgcagtggctctaggacatgccagttcatttgctccagactatgctaaagctaagctgtctgcagcccacttattcatgctgtttgaaagacaacctctgattgacagctacagtgaagaggggctgaagcctgataaatttgaaggaaatataacatttaatgaagtcgtgttcaactatcccacccgagcaaacgtgccagtgcttcaggggctgagcctggaggtgaagaaaggccagacactagccctggtgggcagcagtggctgtgggaagagcacggtggtccagctcctggagcggttctacgaccccttggcggggacagtgtttgtggactttggttttcagcttctcgatggtcaagaagcaaagaaactcaatgtccagtggctcagagctcaactcggaatcgtgtctcaggagcctatcctatttgactgcagcattgccgagaatattgcctatggagacaacagccgggttgtatcacaggatgaaattgtgagtgcagccaaagctgccaacatacatcctttcatcgagacgttaccccacaaatatgaaacaagagtgggagataaggggactcagctctcaggaggtcaaaaacagaggattgctattgcccgagccctcatcagacaacctcaaatcctcctgttggatgaagctacatcagctctggatactgaaagtgaaaaggttgtccaagaagccctggacaaagccagagaaggccgcacctgcattgtgattgctcaccgcctgtccaccatccagaatgcagacttaatagtggtgtttcagaatgggagagtcaaggagcatggcacgcatcagcagctgctggcacagaaaggcatctatttttcaatggtcagtgtccaggctgggacacagaacttatgaacttttgctacagtatattttaaaaataaattcaaattattctacccatttt

SEQ ID NO: 62331 - DNA, 5623 bp, Homo sapiens
atctctatccttcttctggtccttcctagaaaatcaggtggagatgatagtggcttgcatgatggtggtagagctggaggtgcagggcaaaggtcagattctgaatatattttgaaagtaaaggcaacaagatttcctgacagattgattatggtgtgtcaaagaaagagaggaatgcaggatgattccagtgtttttgttgacaactataagtctggagctgccaactggatgcagaagttcactggagggcccagcctggggaaaggatcaggagcaggttaggcatgttaagcttgagatgtctgttaaacatccagataggaatgtcaaagatgcacttgtgtttaagagtcaggaatgcaagagggaattttaggctagaaacaaaaagttagaaattattcgatacagatggtatttaaagctgtgtgactgactgacatgacagaagtggcgagaatagactgagaagtccaaggaatgagccttggaccactccagtgttaggtaagtagttgaaaaaaagagagagagagaaggcatcaaaggagactgaggaagagtgatcaggaaagcataggaaaatccgagaaacatatggtgtcctggaatctatatgaaaaagatatattcagaaagacagagtgataaatctgtcaaattattgaatttgtcaggtaaaataagaacagagaattgatctttggacttagcaaagcagagattatcagtgacttttataaaaatagtttcggtagtgtggaaagatcaaacttctgtttagagtgggtttcagagagaacaacaggaattgaagaagtaataaactttgccaaccagtttagctccaaaggaaaagagggaaatatgatggtagctggcaggggaagtgtggtcaagagaggttttttgtttgtttttcaagatggaagaaataacagtatgtatgtaagctcacaggagggatccagcaggcatggggaaattgatgatataggacagaaagggaagaatggctccttgtgaaagtgaaaggggatgggatctacaggatgaacatgcaaacaaagactggctgcaaagagaggcatgaatagttcatttacagaaacagcaaaggcagagtgttggtacagatgctggtaagtggaaaaatatcatggtaggaggttatggagttccattctaaacacttcaacttcatcagtgaaataagcacggtaatttagcagaatgtgaagatgtaaaagaacagaatttgagaaaacagacgatatgaaataattattagaaaagcagagactgaagaaactgtcatctccttatgtgctaatgagtttaataatgtcctccagtcaccacaagccttctttcaaactacacaattccaactgcttccgtctcagagtatcttgaaataatgatctgaccgcctgttagaccagtgaagggaaggaatttgggttgatttaagaagagaatcctcatggtcatggtagactgatatggagagaaaacattttgaggaaaaatactcaactaaattcatttctactccagcatgcagtttcaagtcaagttccaccttagctccaggtggcaggcagagcaggatgcagaggcacagcacaagtaagggatccaatgactgagtcaagaattacataacctggccagacagctggtacatgggaaagtgctaagagggcaccaacagcgttcctcctccccaaggagcataatgtgatggttcctgccggccctggctgactctcgccgtccttggagataattgggttcagtgccacctggaccagaactggggatgcggaagcaacctgccagacacgcgcgaggttcgaggctgagatggatcttgaggcggcaaagaacggaacagcctggcgccccacgagcgcggagggcgactttgaactgggcatcagcagcaaacaaaaaaggaaaaaaacgaagacagtgaaaatgattggagtattaacattgtttcgatactccgattggcaggataaattgtttatgtcgctgggtaccatcatggccatagctcacggatcaggtctccccctcatgatgatagtatttggagagatgactgacaaatttgttgatactgcaggaaacttctcctttccagtgaacttttccttgtcgctgctaaatccaggcaaaattctggaagaagaaatgactagatatgcatattactactcaggattgggtgctggagttcttgttgctgcctatatacaagtttcattttggactttggcagctggtcgacagatcaggaaaattaggcagaagttttttcatgctattctacgacaggaaataggatggtttgacatcaatgacaccactgaactcaatacgcggctaacagatgacatctccaaaatcagtgaaggaattggtgacaaggttggaatgttctttcaagcagtagccacgttttttgcaggattcatagtgggattcatcagaggatggaagctcacccttgtgataatggccatcagccctattctaggactctctgcagccgtttgggcaaagatactctcggcatttagtgacaaagaactagctgcttatgcaaaagcaggcgccgtggcagaagaggctctgggggccatcaggactgtgatagctttcgggggccagaacaaagagctggaaaggtatcagaaacatttagaaaatgccaaagagattggaattaaaaaagctatttcagcaaacatttccatgggtattgccttcctgttaatatatgcatcatatgcactggccttctggtatggatccactctagtcatatcaaaagaatatactattggaaatgcaatgacagtttttttttcaatcctaattggagctttcagtgttggccaggctgccccatgtattgatgcttttgccaatgcaagaggagcagcatatgtgatctttgatattattgataataatcctaaaattgacagtttttcagagagaggacacaaaccagacagcatcaaagggaatttggagttcaatgatgttcacttttcttacccttctcgagctaacgtcaagatcttgaagggcctcaacctgaaggtgcagagtgggcagacggtggccctggttggaagtagtggctgtgggaagagcacaacggtccagctgatacagaggctctatgaccctgatgagggcacaattaacattgatgggcaggatattaggaactttaatgtaaactatctgagggaaatcattggtgtggtgagtcaggagccggtgctgttttccaccacaattgctgaaaatatttgttatggccgtggaaatgtaaccatggatgagataaagaaagctgtcaaagaggccaacgcctatgagtttatcatgaaattaccacagaaatttgacaccctggttggagagagaggggcccagctgagtggtgggcagaagcagaggatcgccattgcacgtgccctggttcgcaaccccaagatccttctgctggatgaggccacgtcagcattggacacagaaagtgaagctgaggtacaggcagctctggataaggccagagaaggccggaccaccattgtgatagcacaccgactgtctacggtccgaaatgcagatgtcatcgctgggtttgaggatggagtaattgtggagcaaggaagccacagcgaactgatgaagaaggaaggggtgtacttcaaacttgtcaacatgcagacatcaggaagccagatccagtcagaagaatttgaactaaatgatgaaaaggctgccactagaatggccccaaatggctggaaatctcgcctatttaggcattctactcagaaaaaccttaaaaattcacaaatgtgtcagaagagccttgatgtggaaaccgatggacttgaagcaaatgtgccaccagtgtcctttctgaaggtcctgaaactgaataaaacagaatggccctactttgtcgtgggaacagtatgtgccattgccaatggggggcttcagccggcattttcagtcatattctcagagatcatagcgatttttggaccaggcgatgatgcagtgaagcagcagaagtgcaacatattctctttgattttcttatttctgggaattatttctttttttactttcttccttcagggtttcacgtttgggaaagctggcgagatcctcaccagaagactgcggtcaatggcttttaaagcaatgctaagacaggacatgagctggtttgatgaccataaaaacagtactggtgcactttctacaagacttgccacagatgctgcccaagtccaaggagccacaggaaccaggttggctttaattgcacagaatatagctaaccttggaactggtattatcatatcatttatctacggttggcagttaaccctattgctattagcagttgttccaattattgctgtgtcaggaattgttgaaatgaaattgttggctggaaatgccaaaagagataaaaaagaactggaagctgctggaaagattgcaacagaggcaatagaaaatattaggacagttgtgtctttgacccaggaaagaaaatttgaatcaatgtatgttgaaaaattgtatggaccttacagggtgttttctgcaattgtatttggtgcagtggctctaggacatgccagttcatttgctccagactatgctaaagctaagctgtctgcagcccacttattcatgctgtttgaaagacaacctctgattgacagctacagtgaagaggggctgaagcctgataaatttgaaggaaatataacatttaatgaagtcgtgttcaactatcccacccgagcaaacgtgccagtgcttcaggggctgagcctggaggtgaagaaaggccagacactagccctggtgggcagcagtggctgtgggaagagcacggtggtccagctcctggagcggttctacgaccccttggcggggacagtgcttctcgatggtcaagaagcaaagaaactcaatgtccagtggctcagagctcaactcggaatcgtgtctcaggagcctatcctatttgactgcagcattgccgagaatattgcctatggagacaacagccgggttgtatcacaggatgaaattgtgagtgcagccaaagctgccaacatacatcctttcatcgagacgttaccccacaaatatgaaacaagagtgggagataaggggactcagctctcaggaggtcaaaaacagaggattgctattgcccgagccctcatcagacaacctcaaatcctcctgttggatgaagctacatcagctctggatactgaaagtgaaaaggttgtccaagaagccctggacaaagccagagaaggccgcacctgcattgtgattgctcaccgcctgtccaccatccagaatgcagacttaatagtggtgtttcagaatgggagagtcaaggagcatggcacgcatcagcagctgctggcacagaaaggcatctatttttcaatggtcagtgtccaggctgggacacagaacttatgaacttttgctacagtatattttaaaaataaattcaaattattctacccatttt

SEQ ID NO: 62332 - DNA, 462 bp, Homo sapiens
tatcttatcatactttatgatacattaaaatagttaagacaaagctccatgttgtctttatgtagttctatagaattcctagcctttttaaatttaagttacttcaagagctgatccatgttttctgtgttagaaatttgacaccctggttggagagagaggggcccagctgagtggtgggcagaagcagaggatcgccattgcacgtgccctggttcgcaaccccaagatccttctgctggatgaggccacgtcagcattggacacagaaagtgaagctgaggtacaggcagctctggataaggtcagtagactctaaaaagctgaaggaccaccacattgaaacctattgaagattcttgccagtgcttccggagtctgggctgagaaacagaaacatagcaaatggagctacctcatggagctgtattgatttctcctttctgtcaggttacattgtct

SEQ ID NO: 62333 - DNA, 774 bp, Homo sapiens
tcagaaagaagaaagtcatactcaaataggtggtaggagcagagacaattcaatacagacagaagtcttagatgagagcagtgagccagggcactggactgggactcaggaggcttcccctagactctggttccaccgatgcagcctcaggcaggacttcacctctctgggcatccgtttcttcatatgttaaacatacggggttttaattagatgatcgctgaagacccctctagccctaaaactctgtgtctcttaagtgctaagagggcaccaacagcgttcctcctccccaaggagcataatgtgatggttcctgccggccctggctgactctcgccgtccttggagataattgggttcagtgccacctggaccagaactggggatgcggaagcaagaggcgagtctattgctctctctcggtcctgggccgccctgtgattgttgggcgtccggaaactgtctcccctatgggtttaaaaacaaaactgagcgcccatggggtgtgacagtcatctgcaggggcttgggtggcccatcaggcgaggctttctcggcacccgaggctccagcctgatctcggtcttatcctgcgaccgggctggttctggcgggtcgccagggtgggcggcggccccagccgggcgccccggcggcaagagcggcaggctgcgcccctggcccgcgcctagcctggggagagagctgggcgggcggcgggagctgctctcgcgggccgcggccctcgccctggctgcaacggtaggcgtt

SEQ ID NO: 62334 - DNA, 436 bp, Homo sapiens
gacaacatagtgagatctcatctctacaaaataataaaaataaaaatcttaaaaaatagcatatgtcatggcatgaacctgtagtcccagctacttgggaggctgaggcaggagggtcttaggagtctgaggctgcagtgagttatgatcacaccactgcactccagcctgggtggcagagcaagaccctgtctcaaaaacaacgacaacaaaaaactgtctgcagacagcaataaattgtccttgctgcacctgtgctgtataagtttggcttattatagtcaatgacccacattcttaagatggatgattttttaaaaagtagagacaggctggcgatcacaccggacagagctaactggtgtgcaaggaaagtgaaaatgggaattgtgttagtagcacaatgcaaactcaacaatttcaagaaaatgcattt

SEQ ID NO: 62335 - DNA, 4010 bp, Homo sapiens
cgtggggggcgggggcgggggcgggggcgaggccgcggcgagcaaagtccaggcccctctgctgcagcgcccgcgcgtccagaggccctgccagacacgcgcgaggttcgaggctgagatggatcttgaggcggcaaagaacggaacagcctggcgccccacgagcgcggagggcgactttgaactgggcatcagcagcaaacaaaaaaggaaaaaaacgaagacagtgaaaatgattggagtattaacattgtttcgatactccgattggcaggataaattgtttatgtcgctgggtaccatcatggccatagctcacggatcaggtctccccctcatgatgatagtatttggagagatgactgacaaatttgttgatactgcaggaaacttctcctttccagtgaacttttccttgtcgctgctaaatccaggcaaaattctggaagaagaaatgactagatatgcatattactactcaggattgggtgctggagttcttgttgctgcctatatacaagtttcattttggactttggcagctggtcgacagatcaggaaaattaggcagaagttttttcatgctattctacgacaggaaataggatggtttgacatcaatgacaccactgaactcaatacgcggctaacagatgacatctccaaaatcagtgaaggaattggtgacaaggttggaatgttctttcaagcagtagccacgttttttgcaggattcatagtgggattcatcagaggatggaagctcacccttgtgataatggccatcagccctattctaggactctctgcagccgtttgggcaaagatactctcggcatttagtgacaaagaactagctgcttatgcaaaagcaggcgccgtggcagaagaggctctgggggccatcaggactgtgatagctttcgggggccagaacaaagagctggaaaggtatcagaaacatttagaaaatgccaaagagattggaattaaaaaagctatttcagcaaacatttccatgggtattgccttcctgttaatatatgcatcatatgcactggccttctggtatggatccactctagtcatatcaaaagaatatactattggaaatgcaatgacagtttttttttcaatcctaattggagctttcagtgttggccaggctgccccatgtattgatgcttttgccaatgcaagaggagcagcatatgtgatctttgatattattgataataatcctaaaattgacagtttttcagagagaggacacaaaccagacagcatcaaagggaatttggagttcaatgatgttcacttttcttacccttctcgagctaacgtcaagatcttgaagggcctcaacctgaaggtgcagagtgggcagacggtggccctggttggaagtagtggctgtgggaagagcacaacggtccagctgatacagaggctctatgaccctgatgagggcacaattaacattgatgggcaggatattaggaactttaatgtaaactatctgagggaaatcattggtgtggtgagtcaggagccggtgctgttttccaccacaattgctgaaaatatttgttatggccgtggaaatgtaaccatggatgagataaagaaagctgtcaaagaggccaacgcctatgagtttatcatgaaattaccacagaaatttgacaccctggttggagagagaggggcccagctgagtggtgggcagaagcagaggatcgccattgcacgtgccctggttcgcaaccccaagatccttctgctggatgaggccacgtcagcattggacacagaaagtgaagctgaggtacaggcagctctggataaggccagagaaggccggaccaccattgtgatagcacaccgactgtctacggtccgaaatgcagatgtcatcgctgggtttgaggatggagtaattgtggagcaaggaagccacagcgaactgatgaagaaggaaggggtgtacttcaaacttgtcaacatgcagacatcaggaagccagatccagtcagaagaatttgaactaaatgatgaaaaggctgccactagaatggccccaaatggctggaaatctcgcctatttaggcattctactcagaaaaaccttaaaaattcacaaatgtgtcagaagagccttgatgtggaaaccgatggacttgaagcaaatgtgccaccagtgtcctttctgaaggtcctgaaactgaataaaacagaatggccctactttgtcgtgggaacagtatgtgccattgccaatggggggcttcagccggcattttcagtcatattctcagagatcatagcgatttttggaccaggcgatgatgcagtgaagcagcagaagtgcaacatattctctttgattttcttatttctgggaattatttctttttttactttcttccttcagggtttcacgtttgggaaagctggcgagatcctcaccagaagactgcggtcaatggcttttaaagcaatgctaagacaggacatgagctggtttgatgaccataaaaacagtactggtgcactttctacaagacttgccacagatgctgcccaagtccaaggagccacaggaaccaggttggctttaattgcacagaatatagctaaccttggaactggtattatcatatcatttatctacggttggcagttaaccctattgctattagcagttgttccaattattgctgtgtcaggaattgttgaaatgaaattgttggctggaaatgccaaaagagataaaaaagaactggaagctgctggaaagattgcaacagaggcaatagaaaatattaggacagttgtgtctttgacccaggaaagaaaatttgaatcaatgtatgttgaaaaattgtatggaccttacaggaattctgtgcagaaggcacacatctatggaattacttttagtatctcacaagcatttatgtatttttcctatgccggttgttttcgatttggtgcatatctcattgtgaatggacatatgcgcttcagagatgttattctggtgttttctgcaattgtatttggtgcagtggctctaggacatgccagttcatttgctccagactatgctaaagctaagctgtctgcagcccacttattcatgctgtttgaaagacaacctctgattgacagctacagtgaagaggggctgaagcctgataaatttgaaggaaatataacatttaatgaagtcgtgttcaactatcccacccgagcaaacgtgccagtgcttcaggggctgagcctggaggtgaagaaaggccagacactagccctggtgggcagcagtggctgtgggaagagcacggtggtccagctcctggagcggttctacgaccccttggcggggacagtgcttctcgatggtcaagaagcaaagaaactcaatgtccagtggctcagagctcaactcggaatcgtgtctcaggagcctatcctatttgactgcagcattgccgagaatattgcctatggagacaacagccgggttgtatcacaggatgaaattgtgagtgcagccaaagctgccaacatacatcctttcatcgagacgttaccccacaaatatgaaacaagagtgggagataaggggactcagctctcaggaggtcaaaaacagaggattgctattgcccgagccctcatcagacaacctcaaatcctcctgttggatgaagctacatcagctctggatactgaaagtgaaaaggttgtccaagaagccctggacaaagccagagaaggccgcacctgcattgtgattgctcaccgcctgtccaccatccagaatgcagacttaatagtggtgtttcagaatgggagagtcaaggagcatggcacgcatcagcagctgctggcacagaaaggcatctatttttcaatggtcagtgtccaggctgggacacagaacttatgaacttttgctacagtatattttaaaaataaattcaaattattctacccatttt

SEQ ID NO: 62336 - DNA, 5759 bp, Homo sapiens
atctctatccttcttctggtccttcctagaaaatcaggtggagatgatagtggcttgcatgatggtggtagagctggaggtgcagggcaaaggtcagattctgaatatattttgaaagtaaaggcaacaagatttcctgacagattgattatggtgtgtcaaagaaagagaggaatgcaggatgattccagtgtttttgttgacaactataagtctggagctgccaactggatgcagaagttcactggagggcccagcctggggaaaggatcaggagcaggttaggcatgttaagcttgagatgtctgttaaacatccagataggaatgtcaaagatgcacttgtgtttaagagtcaggaatgcaagagggaattttaggctagaaacaaaaagttagaaattattcgatacagatggtatttaaagctgtgtgactgactgacatgacagaagtggcgagaatagactgagaagtccaaggaatgagccttggaccactccagtgttaggtaagtagttgaaaaaaagagagagagagaaggcatcaaaggagactgaggaagagtgatcaggaaagcataggaaaatccgagaaacatatggtgtcctggaatctatatgaaaaagatatattcagaaagacagagtgataaatctgtcaaattattgaatttgtcaggtaaaataagaacagagaattgatctttggacttagcaaagcagagattatcagtgacttttataaaaatagtttcggtagtgtggaaagatcaaacttctgtttagagtgggtttcagagagaacaacaggaattgaagaagtaataaactttgccaaccagtttagctccaaaggaaaagagggaaatatgatggtagctggcaggggaagtgtggtcaagagaggttttttgtttgtttttcaagatggaagaaataacagtatgtatgtaagctcacaggagggatccagcaggcatggggaaattgatgatataggacagaaagggaagaatggctccttgtgaaagtgaaaggggatgggatctacaggatgaacatgcaaacaaagactggctgcaaagagaggcatgaatagttcatttacagaaacagcaaaggcagagtgttggtacagatgctggtaagtggaaaaatatcatggtaggaggttatggagttccattctaaacacttcaacttcatcagtgaaataagcacggtaatttagcagaatgtgaagatgtaaaagaacagaatttgagaaaacagacgatatgaaataattattagaaaagcagagactgaagaaactgtcatctccttatgtgctaatgagtttaataatgtcctccagtcaccacaagccttctttcaaactacacaattccaactgcttccgtctcagagtatcttgaaataatgatctgaccgcctgttagaccagtgaagggaaggaatttgggttgatttaagaagagaatcctcatggtcatggtagactgatatggagagaaaacattttgaggaaaaatactcaactaaattcatttctactccagcatgcagtttcaagtcaagttccaccttagctccaggtggcaggcagagcaggatgcagaggcacagcacaagtaagggatccaatgactgagtcaagaattacataacctggccagacagctggtacatgggaaagtgctaagagggcaccaacagcgttcctcctccccaaggagcataatgtgatggttcctgccggccctggctgactctcgccgtccttggagataattgggttcagtgccacctggaccagaactggggatgcggaagcaagctgagatggatcttgaggcggcaaagaacggaacagcctggcgccccacgagcgcggagggcgactttgaactgggcatcagcagcaaacaaaaaaggaaaaaaacgaagacagtgaaaatgattggagtattaacattgtttcgatactccgattggcaggataaattgtttatgtcgctgggtaccatcatggccatagctcacggatcaggtctccccctcatgatgatagtatttggagagatgactgacaaatttgttgatactgcaggaaacttctcctttccagtgaacttttccttgtcgctgctaaatccaggcaaaattctggaagaagaaatgactagatatgcatattactactcaggattgggtgctggagttcttgttgctgcctatatacaagtttcattttggactttggcagctggtcgacagatcaggaaaattaggcagaagttttttcatgctattctacgacaggaaataggatggtttgacatcaatgacaccactgaactcaatacgcggctaacagatgacatctccaaaatcagtgaaggaattggtgacaaggttggaatgttctttcaagcagtagccacgttttttgcaggattcatagtgggattcatcagaggatggaagctcacccttgtgataatggccatcagccctattctaggactctctgcagccgtttgggcaaagatactctcggcatttagtgacaaagaactagctgcttatgcaaaagcaggcgccgtggcagaagaggctctgggggccatcaggactgtgatagctttcgggggccagaacaaagagctggaaaggtatcagaaacatttagaaaatgccaaagagattggaattaaaaaagctatttcagcaaacatttccatgggtattgccttcctgttaatatatgcatcatatgcactggccttctggtatggatccactctagtcatatcaaaagaatatactattggaaatgcaatgacagtttttttttcaatcctaattggagctttcagtgttggccaggctgccccatgtattgatgcttttgccaatgcaagaggagcagcatatgtgatctttgatattattgataataatcctaaaattgacagtttttcagagagaggacacaaaccagacagcatcaaagggaatttggagttcaatgatgttcacttttcttacccttctcgagctaacgtcaagatcttgaagggcctcaacctgaaggtgcagagtgggcagacggtggccctggttggaagtagtggctgtgggaagagcacaacggtccagctgatacagaggctctatgaccctgatgagggcacaattaacattgatgggcaggatattaggaactttaatgtaaactatctgagggaaatcattggtgtggtgagtcaggagccggtgctgttttccaccacaattgctgaaaatatttgttatggccgtggaaatgtaaccatggatgagataaagaaagctgtcaaagaggccaacgcctatgagtttatcatgaaattaccacagaaatttgacaccctggttggagagagaggggcccagctgagtggtgggcagaagcagaggatcgccattgcacgtgccctggttcgcaaccccaagatccttctgctggatgaggccacgtcagcattggacacagaaagtgaagctgaggtacaggcagctctggataaggccagagaaggccggaccaccattgtgatagcacaccgactgtctacggtccgaaatgcagatgtcatcgctgggtttgaggatggagtaattgtggagcaaggaagccacagcgaactgatgaagaaggaaggggtgtacttcaaacttgtcaacatgcagacatcaggaagccagatccagtcagaagaatttgaactaaatgatgaaaaggctgccactagaatggccccaaatggctggaaatctcgcctatttaggcattctactcagaaaaaccttaaaaattcacaaatgtgtcagaagagccttgatgtggaaaccgatggacttgaagcaaatgtgccaccagtgtcctttctgaaggtcctgaaactgaataaaacagaatggccctactttgtcgtgggaacagtatgtgccattgccaatggggggcttcagccggcattttcagtcatattctcagagatcatagcgatttttggaccaggcgatgatgcagtgaagcagcagaagtgcaacatattctctttgattttcttatttctgggaattatttctttttttactttcttccttcagggtttcacgtttgggaaagctggcgagatcctcaccagaagactgcggtcaatggcttttaaagcaatgctaagacaggacatgagctggtttgatgaccataaaaacagtactggtgcactttctacaagacttgccacagatgctgcccaagtccaaggagccacaggaaccaggttggctttaattgcacagaatatagctaaccttggaactggtattatcatatcatttatctacggttggcagttaaccctattgctattagcagttgttccaattattgctgtgtcaggaattgttgaaatgaaattgttggctggaaatgccaaaagagataaaaaagaactggaagctgctggaaagattgcaacagaggcaatagaaaatattaggacagttgtgtctttgacccaggaaagaaaatttgaatcaatgtatgttgaaaaattgtatggaccttacaggaattctgtgcagaaggcacacatctatggaattacttttagtatctcacaagcatttatgtatttttcctatgccggttgttttcgatttggtgcatatctcattgtgaatggacatatgcgcttcagagatgttattctggtgttttctgcaattgtatttggtgcagtggctctaggacatgccagttcatttgctccagactatgctaaagctaagctgtctgcagcccacttattcatgctgtttgaaagacaacctctgattgacagctacagtgaagaggggctgaagcctgataaatttgaaggaaatataacatttaatgaagtcgtgttcaactatcccacccgagcaaacgtgccagtgcttcaggggctgagcctggaggtgaagaaaggccagacactagccctggtgggcagcagtggctgtgggaagagcacggtggtccagctcctggagcggttctacgaccccttggcggggacagtgtttgtggactttggttttcagcttctcgatggtcaagaagcaaagaaactcaatgtccagtggctcagagctcaactcggaatcgtgtctcaggagcctatcctatttgactgcagcattgccgagaatattgcctatggagacaacagccgggttgtatcacaggatgaaattgtgagtgcagccaaagctgccaacatacatcctttcatcgagacgttaccccacaaatatgaaacaagagtgggagataaggggactcagctctcaggaggtcaaaaacagaggattgctattgcccgagccctcatcagacaacctcaaatcctcctgttggatgaagctacatcagctctggatactgaaagtgaaaaggttgtccaagaagccctggacaaagccagagaaggccgcacctgcattgtgattgctcaccgcctgtccaccatccagaatgcagacttaatagtggtgtttcagaatgggagagtcaaggagcatggcacgcatcagcagctgctggcacagaaaggcatctatttttcaatggtcagtgtccaggctgggacacagaacttatgaacttttgctacagtatattttaaaaataaattcaaattattctacccatttt

SEQ ID NO: 62337 - DNA, 5935 bp, Homo sapiens
atctctatccttcttctggtccttcctagaaaatcaggtggagatgatagtggcttgcatgatggtggtagagctggaggtgcagggcaaaggtcagattctgaatatattttgaaagtaaaggcaacaagatttcctgacagattgattatggtgtgtcaaagaaagagaggaatgcaggatgattccagtgtttttgttgacaactataagtctggagctgccaactggatgcagaagttcactggagggcccagcctggggaaaggatcaggagcaggttaggcatgttaagcttgagatgtctgttaaacatccagataggaatgtcaaagatgcacttgtgtttaagagtcaggaatgcaagagggaattttaggctagaaacaaaaagttagaaattattcgatacagatggtatttaaagctgtgtgactgactgacatgacagaagtggcgagaatagactgagaagtccaaggaatgagccttggaccactccagtgttaggtaagtagttgaaaaaaagagagagagagaaggcatcaaaggagactgaggaagagtgatcaggaaagcataggaaaatccgagaaacatatggtgtcctggaatctatatgaaaaagatatattcagaaagacagagtgataaatctgtcaaattattgaatttgtcaggtaaaataagaacagagaattgatctttggacttagcaaagcagagattatcagtgacttttataaaaatagtttcggtagtgtggaaagatcaaacttctgtttagagtgggtttcagagagaacaacaggaattgaagaagtaataaactttgccaaccagtttagctccaaaggaaaagagggaaatatgatggtagctggcaggggaagtgtggtcaagagaggttttttgtttgtttttcaagatggaagaaataacagtatgtatgtaagctcacaggagggatccagcaggcatggggaaattgatgatataggacagaaagggaagaatggctccttgtgaaagtgaaaggggatgggatctacaggatgaacatgcaaacaaagactggctgcaaagagaggcatgaatagttcatttacagaaacagcaaaggcagagtgttggtacagatgctggtaagtggaaaaatatcatggtaggaggttatggagttccattctaaacacttcaacttcatcagtgaaataagcacggtaatttagcagaatgtgaagatgtaaaagaacagaatttgagaaaacagacgatatgaaataattattagaaaagcagagactgaagaaactgtcatctccttatgtgctaatgagtttaataatgtcctccagtcaccacaagccttctttcaaactacacaattccaactgcttccgtctcagagtatcttgaaataatgatctgaccgcctgttagaccagtgaagggaaggaatttgggttgatttaagaagagaatcctcatggtcatggtagactgatatggagagaaaacattttgaggaaaaatactcaactaaattcatttctactccagcatgcagtttcaagtcaagttccaccttagctccaggtggcaggcagagcaggatgcagaggcacagcacaagtaagggatccaatgactgagtcaagaattacataacctggccagacagctggtacatgggaaagtgctaagagggcaccaacagcgttcctcctccccaaggagcataatgtgatggttcctgccggccctggctgactctcgccgtccttggagataattgggttcagtgccacctggaccagaactggggatgcggaagcaagctgagatggatcttgaggcggcaaagaacggaacagcctggcgccccacgagcgcggagggcgactttgaactgggcatcagcagcaaacaaaaaaggaaaaaaacgaagacagtgaaaatgattggagtattaacattgtttcgatactccgattggcaggataaattgtttatgtcgctgggtaccatcatggccatagctcacggatcaggtctccccctcatgatgatagtatttggagagatgactgacaaatttgttgatactgcaggaaacttctcctttccagtgaacttttccttgtcgctgctaaatccaggcaaaattctggaagaagaaatgactagatatgcatattactactcaggattgggtgctggagttcttgttgctgcctatatacaagtttcattttggactttggcagctggtcgacagatcaggaaaattaggcagaagttttttcatgctattctacgacaggaaataggatggtttgacatcaatgacaccactgaactcaatacgcggctaacagatgacatctccaaaatcagtgaaggaattggtgacaaggttggaatgttctttcaagcagtagccacgttttttgcaggattcatagtgggattcatcagaggatggaagctcacccttgtgataatggccatcagccctattctaggactctctgcagccgtttgggcaaagatactctcggcatttagtgacaaagaactagctgcttatgcaaaagcaggcgccgtggcagaagaggctctgggggccatcaggactgtgatagctttcgggggccagaacaaagagctggaaaggtatcagaaacatttagaaaatgccaaagagattggaattaaaaaagctatttcagcaaacatttccatgggtattgccttcctgttaatatatgcatcatatgcactggccttctggtatggatccactctagtcatatcaaaagaatatactattggaaatgcaatgacagtttttttttcaatcctaattggagctttcagtgttggccaggctgccccatgtattgatgcttttgccaatgcaagaggagcagcatatgtgatctttgatattattgataataatcctaaaattgacagtttttcagagagaggacacaaaccagacagcatcaaagggaatttggagttcaatgatgttcacttttcttacccttctcgagctaacgtcaagatcttgaagggcctcaacctgaaggtgcagagtgggcagacggtggccctggttggaagtagtggctgtgggaagagcacaacggtccagctgatacagaggctctatgaccctgatgagggcacaattaacattgatgggcaggatattaggaactttaatgtaaactatctgagggaaatcattggtgtggtgagtcaggagccggtgctgttttccaccacaattgctgaaaatatttgttatggccgtggaaatgtaaccatggatgagataaagaaagctgtcaaagaggccaacgcctatgagtttatcatgaaattaccacagaaatttgacaccctggttggagagagaggggcccagctgagtggtgggcagaagcagaggatcgccattgcacgtgccctggttcgcaaccccaagatccttctgctggatgaggccacgtcagcattggacacagaaagtgaagctgaggtacaggcagctctggataaggccagagaaggccggaccaccattgtgatagcacaccgactgtctacggtccgaaatgcagatgtcatcgctgggtttgaggatggagtaattgtggagcaaggaagccacagcgaactgatgaagaaggaaggggtgtacttcaaacttgtcaacatgcagacatcaggaagccagatccagtcagaagaatttgaactaaatgatgaaaaggctgccactagaatggccccaaatggctggaaatctcgcctatttaggcattctactcagaaaaaccttaaaaattcacaaatgtgtcagaagagccttgatgtggaaaccgatggacttgaagcaaatgtgccaccagtgtcctttctgaaggtcctgaaactgaataaaacagaatggccctactttgtcgtgggaacagtatgtgccattgccaatggggggcttcagccggcattttcagtcatattctcagagatcatagcgatttttggaccaggcgatgatgcagtgaagcagcagaagtgcaacatattctctttgattttcttatttctgggaattatttctttttttactttcttccttcagggtttcacgtttgggaaagctggcgagatcctcaccagaagactgcggtcaatggcttttaaagcaatgctaagacaggacatgagctggtttgatgaccataaaaacagtactggtgcactttctacaagacttgccacagatgctgcccaagtccaaggagccacaggaaccaggttggctttaattgcacagaatatagctaaccttggaactggtattatcatatcatttatctacggttggcagttaaccctattgctattagcagttgttccaattattgctgtgtcaggaattgttgaaatgaaattgttggctggaaatgccaaaagagataaaaaagaactggaagctgctggaaagattgcaacagaggcaatagaaaatattaggacagttgtgtctttgacccaggaaagaaaatttgaatcaatgtatgttgaaaaattgtatggaccttacaggaattctgtgcagaaggcacacatctatggaattacttttagtatctcacaagcatttatgtatttttcctatgccggttgttttcgatttggtgcatatctcattgtgaatggacatatgcgcttcagagatgttattctggtgttttctgcaattgtatttggtgcagtggctctaggacatgccagttcatttgctccagactatgctaaagctaagctgtctgcagcccacttattcatgctgtttgaaagacaacctctgattgacagctacagtgaagaggggctgaagcctgataaatttgaaggaaatataacatttaatgaagtcgtgttcaactatcccacccgagcaaacgtgccagtgcttcaggggctgagcctggaggtgaagaaaggccagacactagccctggtgggcagcagtggctgtgggaagagcacggtggtccagctcctggagcggttctacgaccccttggcggggacagtgcttctcgatggtcaagaagcaaagaaactcaatgtccagtggctcagagctcaactcggaatcgtgtctcaggagcctatcctatttgactgcagcattgccgagaatattgcctatggagacaacagccgggttgtatcacaggatgaaattgtgagtgcagccaaagctgccaacatacatcctttcatcgagacgttaccccacaaatatgaaacaagagtgggagataaggggactcagctctcaggaggtcaaaaacagaggattgctattgcccgagccctcatcagacaacctcaaatcctcctgttggatgaagctacatcagctctggatactgaaagtgaaaaggttgtccaagaagccctggacaaagccagagaaggccgcacctgcattgtgattgctcaccgcctgtccaccatccagaatgcagacttaatagtggtgtttcagaatgggagagtcaaggagcatggcacgcatcagcagctgctggcacagaaaggcatctatttttcaatgatcaatttagaagacccaatttggggtttattacggcatttgaaatttgagagttagaagtgacacctgtcttgatgaagtattgaaacaacaggctagctctccctaagttattagaaacatccagaaaaagaacaaaattcaaggtaagtacaggtgtagaaatatagaagccacagacatagggaaatggtcttatggtcctgaatgggttgggtagacaggaaagtttgggaataattttcccaagtacaaaagaaaaataaattgttcaatagcctc

SEQ ID NO: 62338 - DNA, 2613 bp, Homo sapiens
atctctatccttcttctggtccttcctagaaaatcaggtggagatgatagtggcttgcatgatggtggtagagctggaggtgcagggcaaaggtcagattctgaatatattttgaaagtaaaggcaacaagatttcctgacagattgattatggtgtgtcaaagaaagagaggaatgcaggatgattccagtgtttttgttgacaactataagtctggagctgccaactggatgcagaagttcactggagggcccagcctggggaaaggatcaggagcaggttaggcatgttaagcttgagatgtctgttaaacatccagataggaatgtcaaagatgcacttgtgtttaagagtcaggaatgcaagagggaattttaggctagaaacaaaaagttagaaattattcgatacagatggtatttaaagctgtgtgactgactgacatgacagaagtggcgagaatagactgagaagtccaaggaatgagccttggaccactccagtgttaggtaagtagttgaaaaaaagagagagagagaaggcatcaaaggagactgaggaagagtgatcaggaaagcataggaaaatccgagaaacatatggtgtcctggaatctatatgaaaaagatatattcagaaagacagagtgataaatctgtcaaattattgaatttgtcaggtaaaataagaacagagaattgatctttggacttagcaaagcagagattatcagtgacttttataaaaatagtttcggtagtgtggaaagatcaaacttctgtttagagtgggtttcagagagaacaacaggaattgaagaagtaataaactttgccaaccagtttagctccaaaggaaaagagggaaatatgatggtagctggcaggggaagtgtggtcaagagaggttttttgtttgtttttcaagatggaagaaataacagtatgtatgtaagctcacaggagggatccagcaggcatggggaaattgatgatataggacagaaagggaagaatggctccttgtgaaagtgaaaggggatgggatctacaggatgaacatgcaaacaaagactggctgcaaagagaggcatgaatagttcatttacagaaacagcaaaggcagagtgttggtacagatgctggtaagtggaaaaatatcatggtaggaggttatggagttccattctaaacacttcaacttcatcagtgaaataagcacggtaatttagcagaatgtgaagatgtaaaagaacagaatttgagaaaacagacgatatgaaataattattagaaaagcagagactgaagaaactgtcatctccttatgtgctaatgagtttaataatgtcctccagtcaccacaagccttctttcaaactacacaattccaactgcttccgtctcagagtatcttgaaataatgatctgaccgcctgttagaccagtgaagggaaggaatttgggttgatttaagaagagaatcctcatggtcatggtagactgatatggagagaaaacattttgaggaaaaatactcaactaaattcatttctactccagcatgcagtttcaagtcaagttccaccttagctccaggtggcaggcagagcaggatgcagaggcacagcacaagtaagggatccaatgactgagtcaagaattacataacctggccagacagctggtacatgggaaagtgctaagagggcaccaacagcgttcctcctccccaaggagcataatgtgatggttcctgccggccctggctgactctcgccgtccttggagataattgggttcagtgccacctggaccagaactggggatgcggaagcaagctgagatggatcttgaggcggcaaagaacggaacagcctggcgccccacgagcgcggagggcgactttgaactgggcatcagcagcaaacaaaaaaggaaaaaaacgaagacagtgaaaatgattggagtattaacattgtttcgatactccgattggcaggataaattgtttatgtcgctgggtaccatcatggccatagctcacggatcaggtctccccctcatgatgatagtatttggagagatgactgacaaatttgttgatactgcaggaaacttctcctttccagtgaacttttccttgtcgctgctaaatccaggcaaaattctggaagaagaaatgactagatatgcatattactactcaggattgggtgctggagttcttgttgctgcctatatacaagtttcattttggactttggcagctggtcgacagatcaggaaaattaggcagaagttttttcatgctattctacgacaggaaataggatggtttgacatcaatgacaccactgaactcaatacgcggctaacagagtaggtacattgttaatgtcacactttcatatagaaattaattactgtgtgaaaatatgtcaaggaaagattttaaatgaaaaatgttactagattgagcatctgatctatattagaaatcgatcatctggcagccatgtctagcagcatctatagcctatgccattgcatgttggctttcccccaaggtgcatagtaggtttatttgaggactgaattcacatcttatac

SEQ ID NO: 62339 - DNA, 4984 bp, Homo sapiens
atctctatccttcttctggtccttcctagaaaatcaggtggagatgatagtggcttgcatgatggtggtagagctggaggtgcagggcaaaggtcagattctgaatatattttgaaagtaaaggcaacaagatttcctgacagattgattatggtgtgtcaaagaaagagaggaatgcaggatgattccagtgtttttgttgacaactataagtctggagctgccaactggatgcagaagttcactggagggcccagcctggggaaaggatcaggagcaggttaggcatgttaagcttgagatgtctgttaaacatccagataggaatgtcaaagatgcacttgtgtttaagagtcaggaatgcaagagggaattttaggctagaaacaaaaagttagaaattattcgatacagatggtatttaaagctgtgtgactgactgacatgacagaagtggcgagaatagactgagaagtccaaggaatgagccttggaccactccagtgttaggtaagtagttgaaaaaaagagagagagagaaggcatcaaaggagactgaggaagagtgatcaggaaagcataggaaaatccgagaaacatatggtgtcctggaatctatatgaaaaagatatattcagaaagacagagtgataaatctgtcaaattattgaatttgtcaggtaaaataagaacagagaattgatctttggacttagcaaagcagagattatcagtgacttttataaaaatagtttcggtagtgtggaaagatcaaacttctgtttagagtgggtttcagagagaacaacaggaattgaagaagtaataaactttgccaaccagtttagctccaaaggaaaagagggaaatatgatggtagctggcaggggaagtgtggtcaagagaggttttttgtttgtttttcaagatggaagaaataacagtatgtatgtaagctcacaggagggatccagcaggcatggggaaattgatgatataggacagaaagggaagaatggctccttgtgaaagtgaaaggggatgggatctacaggatgaacatgcaaacaaagactggctgcaaagagaggcatgaatagttcatttacagaaacagcaaaggcagagtgttggtacagatgctggtaagtggaaaaatatcatggtaggaggttatggagttccattctaaacacttcaacttcatcagtgaaataagcacggtaatttagcagaatgtgaagatgtaaaagaacagaatttgagaaaacagacgatatgaaataattattagaaaagcagagactgaagaaactgtcatctccttatgtgctaatgagtttaataatgtcctccagtcaccacaagccttctttcaaactacacaattccaactgcttccgtctcagagtatcttgaaataatgatctgaccgcctgttagaccagtgaagggaaggaatttgggttgatttaagaagagaatcctcatggtcatggtagactgatatggagagaaaacattttgaggaaaaatactcaactaaattcatttctactccagcatgcagtttcaagtcaagttccaccttagctccaggtggcaggcagagcaggatgcagaggcacagcacaagtaagggatccaatgactgagtcaagaattacataacctggccagacagctggtacatgggaaagtgctaagagggcaccaacagcgttcctcctccccaaggagcataatgtgatggttcctgccggccctggctgactctcgccgtccttggagataattgggttcagtgccacctggaccagaactggggatgcggaagcaagctgagatggatcttgaggcggcaaagaacggaacagcctggcgccccacgagcgcggagggcgactttgaactgggcatcagcagcaaacaaaaaaggaaaaaaacgaagacagtgaaaatgattggagtattaacattgtttcgatactccgattggcaggataaattgtttatgtcgctgggtaccatcatggccatagctcacggatcaggtctccccctcatgatgatagtatttggagagatgactgacaaatttgttgatactgcaggaaacttctcctttccagtgaacttttccttgtcgctgctaaatccaggcaaaattctggaagaagaaatgactagatatgcatattactactcaggattgggtgctggagttcttgttgctgcctatatacaagtttcattttggactttggcagctggtcgacagatcaggaaaattaggcagaagttttttcatgctattctacgacaggaaataggatggtttgacatcaatgacaccactgaactcaatacgcggctaacagatgacatctccaaaatcagtgaaggaattggtgacaaggttggaatgttctttcaagcagtagccacgttttttgcaggattcatagtgggattcatcagaggatggaagctcacccttgtgataatggccatcagccctattctaggactctctgcagccgtttgggcaaagatactctcggcatttagtgacaaagaactagctgcttatgcaaaagcaggcgccgtggcagaagaggctctgggggccatcaggactgtgatagctttcgggggccagaacaaagagctggaaaggtatcagaaacatttagaaaatgccaaagagattggaattaaaaaagctatttcagcaaacatttccatgggtattgccttcctgttaatatatgcatcatatgcactggccttctggtatggatccactctagtcatatcaaaagaatatactattggaaatgcaatgacagtttttttttcaatcctaattggagctttcagtgttggccaggctgccccatgtattgatgcttttgccaatgcaagaggagcagcatatgtgatctttgatattattgataataatcctaaaattgacagtttttcagagagaggacacaaaccagacagcatcaaagggaatttggagttcaatgatgttcacttttcttacccttctcgagctaacgtcaagatcttgaagggcctcaacctgaaggtgcagagtgggcagacggtggccctggttggaagtagtggctgtgggaagagcacaacggtccagctgatacagaggctctatgaccctgatgagggcacaattaacattgatgggcaggatattaggaactttaatgtaaactatctgagggaaatcattggtgtggtgagtcaggagccggtgctgttttccaccacaattgctgaaaatatttgttatggccgtggaaatgtaaccatggatgagataaagaaagctgtcaaagaggccaacgcctatgagtttatcatgaaattaccacagaaatttgacaccctggttggagagagaggggcccagctgagtggtgggcagaagcagaggatcgccattgcacgtgccctggttcgcaaccccaagatccttctgctggatgaggccacgtcagcattggacacagaaagtgaagctgaggtacaggcagctctggataaggccagagaaggccggaccaccattgtgatagcacaccgactgtctacggtccgaaatgcagatgtcatcgctgggtttgaggatggagtaattgtggagcaaggaagccacagcgaactgatgaagaaggaaggggtgtacttcaaacttgtcaacatgcagacatcaggaagccagatccagtcagaagaatttgaactaaatgatgaaaaggctgccactagaatggccccaaatggctggaaatctcgcctatttaggcattctactcagaaaaaccttaaaaattcacaaatgtgtcagaagagccttgatgtggaaaccgatggacttgaagcaaatgtgccaccagtgtcctttctgaaggtcctgaaactgaataaaacagaatggccctactttgtcgtgggaacagtatgtgccattgccaatggggggcttcagccggcattttcagtcatattctcagagatcatagcgatttttggaccaggcgatgatgcagtgaagcagcagaagtgcaacatattctctttgattttcttatttctgggaattatttctttttttactttcttccttcagggtttcacgtttgggaaagctggcgagatcctcaccagaagactgcggtcaatggcttttaaagcaatgctaagacaggacatgagctggtttgatgaccataaaaacagtactggtgcactttctacaagacttgccacagatgctgcccaagtccaaggagccacaggaaccaggttggctttaattgcacagaatatagctaaccttggaactggtattatcatatcatttatctacggttggcagttaaccctattgctattagcagttgttccaattattgctgtgtcaggaattgttgaaatgaaattgttggctggaaatgccaaaagagataaaaaagaactggaagctgctggaaagattgcaacagaggcaatagaaaatattaggacagttgtgtctttgacccaggaaagaaaatttgaatcaatgtatgttgaaaaattgtatggaccttacaggaattctgtgcagaaggcacacatctatggaattacttttagtatctcacaagcatttatgtatttttcctatgccggttgttttcgatttggtgcatatctcattgtgaatggacatatgcgcttcagagatgttattctggtgttttctgcaattgtatttggtgcagtggctctaggacatgccagttcatttgctccagactatgctaaagctaagctgtctgcagcccacttattcatgctgtttgaaagacaacctctgattgacagctacagtgaagaggggctgaagcctgataaatttgaaggaaatatagcatttaatgtatcctcgtctaaggcgacggacatc

SEQ ID NO: 62340 - DNA, 701 bp, Homo sapiens
gaaactgttattgactctaaatgtttttcttgtaaatagaactgtcaactgttaagcaacagttcattcaacatatttataatttggttaacttgcagaaatatgaaacaagagtgggagataaggggactcagctctcaggaggtcaaaaacagaggattgctattgcccgagccctcatcagacaacctcaaatcctcctgttggatgaagctacatcagctctggatactgaaagtgaaaaggttgtccaagaagccctggacaaagccagagaaggccgcacctgcattgtgattgctcaccgcctgtccaccatccagaatgcagacttaatagtggtgtttcagaatgggagagtcaaggagcatggcacgcatcagcagctgctggcacagaaaggcatctatttttcaatgatcaatttagaagacccaatttggggtttattacggcatttgaaatttgagagttagaagtgacacctgtcttgatgaagtattgaaacaacaggctagctctccctaagttattagaaacatccagaaaaagaacaaaattcaaggtaagtacaggtgtagaaatatagaagccacagacatagggaaatggtcttatggtcctgaatgggttgggtagacaggaaagtttgggaataattttcccaagtacaaaagaaaaataaattgttcaatagcctc

SEQ ID NO: 62341 - DNA, 380 bp, Homo sapiens
aagattctaagatactagaaattaaaagttgattagaaaggtaacattttcaaatttacttgaatgttaaaactaatttatacaatttttgggataaggtgtctgtctgatttatcaataggttgtccaagaagccctggacaaagccagagaaggccgcacctgcattgtgattgctcaccgcctgtccaccatccagaatgcagacttaatagtggtgtttcagaatgggagagtcaaggagcatggcacgcatcagcagctgctggcacagaaaggcatctatttttcaatggtcagtgtccaggctgggacacagaacttatgaacttttgctacagtatattttaaaaataaattcaaattattctacccatttt

SEQ ID NO: 62342 - DNA, 494 bp, Homo sapiens
ttatgtatccatgtatctttgtagtaccttcgacagttacttttgtgcttgctatgtttgttgaactgaataattttgacattttgtgaacatcactcttatatttgaaaatataatagttgaatattgtaactaaacatatttatgttcaattgattgtaaaacattttgtaacagttttaaattgaagcaattctattttttacagcaaacaaaaaaggaaaaaaacgaagacagtgaaaatgattggagtattaacattggtaagctgtgaaatgttaaatgtgaataatcctaccttttattcaaatttgaggtattgaatcaattacctttaaagcaaatactttaagattgtctagctaggcgagctgactcatacttgtaatcccagcactttgggagactgaggtgggagggttgcttgagcacaagagtttgagaccagcctggacaacatagtgagatctcatctctacaaaataataaaaata

SEQ ID NO: 62343 - DNA, 750 bp, Homo sapiens
agactgaagaaactgtcatctccttatgtgctaatgagtttaataatgtcctccagtcaccacaagccttctttcaaactacacaattccaactgcttccgtctcagagtatcttgaaataatgatctgaccgcctgttagaccagtgaagggaaggaatttgggttgatttaagaagagaatcctcatggtcatggtagactgatatggagagaaaacattttgaggaaaaatactcaactaaattcatttctactccagcatgcagtttcaagtcaagttccaccttagctccaggtggcaggcagagcaggatgcagaggcacagcacaagtaaggggtgagtgccgaagctgctggctcctgttccagtctttcttccttggcctcgcctgaacttttactataataatagtcaccatttattaggtgtctcctacgtgcaggacactttacacacagtatccctaatcctaataacacccttattttatagatccaatgactgagtcaagaattacataacctggccagacagctggtacatgggaaaggtgagattcacaccagggtccacccagcatctctacttataccatgctctgctttaaggttctctgagaactcagacaagccttgggctaacaattgtgttaacaggacatagcaggtgcaaggacccactggtcatcctgctacctgatcagaaggaaggaaagttgtatttgttgctcacctactatgttttag

SEQ ID NO: 62344 - DNA, 3735 bp, Homo sapiens
atctctatccttcttctggtccttcctagaaaatcaggtggagatgatagtggcttgcatgatggtggtagagctggaggtgcagggcaaaggtcagattctgaatatattttgaaagtaaaggcaacaagatttcctgacagattgattatggtgtgtcaaagaaagagaggaatgcaggatgattccagtgtttttgttgacaactataagtctggagctgccaactggatgcagaagttcactggagggcccagcctggggaaaggatcaggagcaggttaggcatgttaagcttgagatgtctgttaaacatccagataggaatgtcaaagatgcacttgtgtttaagagtcaggaatgcaagagggaattttaggctagaaacaaaaagttagaaattattcgatacagatggtatttaaagctgtgtgactgactgacatgacagaagtggcgagaatagactgagaagtccaaggaatgagccttggaccactccagtgttaggtaagtagttgaaaaaaagagagagagagaaggcatcaaaggagactgaggaagagtgatcaggaaagcataggaaaatccgagaaacatatggtgtcctggaatctatatgaaaaagatatattcagaaagacagagtgataaatctgtcaaattattgaatttgtcaggtaaaataagaacagagaattgatctttggacttagcaaagcagagattatcagtgacttttataaaaatagtttcggtagtgtggaaagatcaaacttctgtttagagtgggtttcagagagaacaacaggaattgaagaagtaataaactttgccaaccagtttagctccaaaggaaaagagggaaatatgatggtagctggcaggggaagtgtggtcaagagaggttttttgtttgtttttcaagatggaagaaataacagtatgtatgtaagctcacaggagggatccagcaggcatggggaaattgatgatataggacagaaagggaagaatggctccttgtgaaagtgaaaggggatgggatctacaggatgaacatgcaaacaaagactggctgcaaagagaggcatgaatagttcatttacagaaacagcaaaggcagagtgttggtacagatgctggtaagtggaaaaatatcatggtaggaggttatggagttccattctaaacacttcaacttcatcagtgaaataagcacggtaatttagcagaatgtgaagatgtaaaagaacagaatttgagaaaacagacgatatgaaataattattagaaaagcagagactgaagaaactgtcatctccttatgtgctaatgagtttaataatgtcctccagtcaccacaagccttctttcaaactacacaattccaactgcttccgtctcagagtatcttgaaataatgatctgaccgcctgttagaccagtgaagggaaggaatttgggttgatttaagaagagaatcctcatggtcatggtagactgatatggagagaaaacattttgaggaaaaatactcaactaaattcatttctactccagcatgcagtttcaagtcaagttccaccttagctccaggtggcaggcagagcaggatgcagaggcacagcacaagtaagggatccaatgactgagtcaagaattacataacctggccagacagctggtacatgggaaagtgctaagagggcaccaacagcgttcctcctccccaaggagcataatgtgatggttcctgccggccctggctgactctcgccgtccttggagataattgggttcagtgccacctggaccagaactggggatgcggaagcaagctgagatggatcttgaggcggcaaagaacggaacagcctggcgccccacgagcgcggagggcgactttgaactgggcatcagcagcaaacaaaaaaggaaaaaaacgaagacagtgaaaatgattggagtattaacattgtttcgatactccgattggcaggataaattgtttatgtcgctgggtaccatcatggccatagctcacggatcaggtctccccctcatgatgatagtatttggagagatgactgacaaatttgttgatactgcaggaaacttctcctttccagtgaacttttccttgtcgctgctaaatccaggcaaaattctggaagaagaaatgactagatatgcatattactactcaggattgggtgctggagttcttgttgctgcctatatacaagtttcattttggactttggcagctggtcgacagatcaggaaaattaggcagaagttttttcatgctattctacgacaggaaataggatggtttgacatcaatgacaccactgaactcaatacgcggctaacagatgacatctccaaaatcagtgaaggaattggtgacaaggttggaatgttctttcaagcagtagccacgttttttgcaggattcatagtgggattcatcagaggatggaagctcacccttgtgataatggccatcagccctattctaggactctctgcagccgtttgggcaaagatactctcggcatttagtgacaaagaactagctgcttatgcaaaagcaggcgccgtggcagaagaggctctgggggccatcaggactgtgatagctttcgggggccagaacaaagagctggaaaggtatcagaaacatttagaaaatgccaaagagattggaattaaaaaagctatttcagcaaacatttccatgggtattgccttcctgttaatatatgcatcatatgcactggccttctggtatggatccactctagtcatatcaaaagaatatactattggaaatgcaatgacagtttttttttcaatcctaattggagctttcagtgttggccaggctgccccatgtattgatgcttttgccaatgcaagaggagcagcatatgtgatctttgatattattgataataatcctaaaattgacagtttttcagagagaggacacaaaccagacagcatcaaagggaatttggagttcaatgatgttcacttttcttacccttctcgagctaacgtcaagatcttgaagggcctcaacctgaaggtgcagagtgggcagacggtggccctggttggaagtagtggctgtgggaagagcacaacggtccagctgatacagaggctctatgaccctgatgagggcacaattaacattgatgggcaggatattaggaactttaatgtaaactatctgagggaaatcattggtgtggtgagtcaggagccggtgctgttttccaccacaattgctgaaaatatttgttatggccgtggaaatgtaaccatggatgagataaagaaagctgtcaaagaggccaacgcctatgagtttatcatgaaattaccacagaaatttgacaccctggttggagagagaggggcccagctgagtggtgggcagaagcagaggatcgccattgcacgtgccctggttcgcaaccccaagatccttctgctggatgaggccacgtcagcattggacacagaaagtgaagctgaggtacaggcagctctggataaggtcagtagactctaaaaagctgaaggaccaccacattgaaacctattgaagattcttgccagtgcttccggagtctgggctgagaaacagaaacatagcaaatggagctacctcatggagctgtattgatttctcctttctgtcaggttacattgtct

SEQ ID NO: 62345 - DNA, 5662 bp, Homo sapiens
atctctatccttcttctggtccttcctagaaaatcaggtggagatgatagtggcttgcatgatggtggtagagctggaggtgcagggcaaaggtcagattctgaatatattttgaaagtaaaggcaacaagatttcctgacagattgattatggtgtgtcaaagaaagagaggaatgcaggatgattccagtgtttttgttgacaactataagtctggagctgccaactggatgcagaagttcactggagggcccagcctggggaaaggatcaggagcaggttaggcatgttaagcttgagatgtctgttaaacatccagataggaatgtcaaagatgcacttgtgtttaagagtcaggaatgcaagagggaattttaggctagaaacaaaaagttagaaattattcgatacagatggtatttaaagctgtgtgactgactgacatgacagaagtggcgagaatagactgagaagtccaaggaatgagccttggaccactccagtgttaggtaagtagttgaaaaaaagagagagagagaaggcatcaaaggagactgaggaagagtgatcaggaaagcataggaaaatccgagaaacatatggtgtcctggaatctatatgaaaaagatatattcagaaagacagagtgataaatctgtcaaattattgaatttgtcaggtaaaataagaacagagaattgatctttggacttagcaaagcagagattatcagtgacttttataaaaatagtttcggtagtgtggaaagatcaaacttctgtttagagtgggtttcagagagaacaacaggaattgaagaagtaataaactttgccaaccagtttagctccaaaggaaaagagggaaatatgatggtagctggcaggggaagtgtggtcaagagaggttttttgtttgtttttcaagatggaagaaataacagtatgtatgtaagctcacaggagggatccagcaggcatggggaaattgatgatataggacagaaagggaagaatggctccttgtgaaagtgaaaggggatgggatctacaggatgaacatgcaaacaaagactggctgcaaagagaggcatgaatagttcatttacagaaacagcaaaggcagagtgttggtacagatgctggtaagtggaaaaatatcatggtaggaggttatggagttccattctaaacacttcaacttcatcagtgaaataagcacggtaatttagcagaatgtgaagatgtaaaagaacagaatttgagaaaacagacgatatgaaataattattagaaaagcagagactgaagaaactgtcatctccttatgtgctaatgagtttaataatgtcctccagtcaccacaagccttctttcaaactacacaattccaactgcttccgtctcagagtatcttgaaataatgatctgaccgcctgttagaccagtgaagggaaggaatttgggttgatttaagaagagaatcctcatggtcatggtagactgatatggagagaaaacattttgaggaaaaatactcaactaaattcatttctactccagcatgcagtttcaagtcaagttccaccttagctccaggtggcaggcagagcaggatgcagaggcacagcacaagtaagggatccaatgactgagtcaagaattacataacctggccagacagctggtacatgggaaagtgctaagagggcaccaacagcgttcctcctccccaaggagcataatgtgatggttcctgccggccctggctgactctcgccgtccttggagataattgggttcagtgccacctggaccagaactggggatgcggaagcaagctgagatggatcttgaggcggcaaagaacggaacagcctggcgccccacgagcgcggagggcgactttgaactgggcatcagcagcaaacaaaaaaggaaaaaaacgaagacagtgaaaatgattggagtattaacattgtttcgatactccgattggcaggataaattgtttatgtcgctgggtaccatcatggccatagctcacggatcaggtctccccctcatgatgatagtatttggagagatgactgacaaatttgttgatactgcaggaaacttctcctttccagtgaacttttccttgtcgctgctaaatccaggcaaaattctggaagaagaaatgactagatatgcatattactactcaggattgggtgctggagttcttgttgctgcctatatacaagtttcattttggactttggcagctggtcgacagatcaggaaaattaggcagaagttttttcatgctattctacgacaggaaataggatggtttgacatcaatgacaccactgaactcaatacgcggctaacagatgacatctccaaaatcagtgaaggaattggtgacaaggttggaatgttctttcaagcagtagccacgttttttgcaggattcatagtgggattcatcagaggatggaagctcacccttgtgataatggccatcagccctattctaggactctctgcagccgtttgggcaaagatactctcggcatttagtgacaaagaactagctgcttatgcaaaagcaggcgccgtggcagaagaggctctgggggccatcaggactgtgatagctttcgggggccagaacaaagagctggaaaggtatcagaaacatttagaaaatgccaaagagattggaattaaaaaagctatttcagcaaacatttccatgggtattgccttcctgttaatatatgcatcatatgcactggccttctggtatggatccactctagtcatatcaaaagaatatactattggaaatgcaatgacagtttttttttcaatcctaattggagctttcagtgttggccaggctgccccatgtattgatgcttttgccaatgcaagaggagcagcatatgtgatctttgatattattgataataatcctaaaattgacagtttttcagagagaggacacaaaccagacagcatcaaagggaatttggagttcaatgatgttcacttttcttacccttctcgagctaacgtcaagatcttgaagggcctcaacctgaaggtgcagagtgggcagacggtggccctggttggaagtagtggctgtgggaagagcacaacggtccagctgatacagaggctctatgaccctgatgagggcacaattaacattgatgggcaggatattaggaactttaatgtaaactatctgagggaaatcattggtgtggtgagtcaggagccggtgctgttttccaccacaattgctgaaaatatttgttatggccgtggaaatgtaaccatggatgagataaagaaagctgtcaaagaggccaacgcctatgagtttatcatgaaattaccacagaaatttgacaccctggttggagagagaggggcccagctgagtggtgggcagaagcagaggatcgccattgcacgtgccctggttcgcaaccccaagatccttctgctggatgaggccacgtcagcattggacacagaaagtgaagctgaggtacaggcagctctggataaggccagagaaggccggaccaccattgtgatagcacaccgactgtctacggtccgaaatgcagatgtcatcgctgggtttgaggatggagtaattgtggagcaaggaagccacagcgaactgatgaagaaggaaggggtgtacttcaaacttgtcaacatgcagacatcaggaagccagatccagtcagaagaatttgaactaaatgatgaaaaggctgccactagaatggccccaaatggctggaaatctcgcctatttaggcattctactcagaaaaaccttaaaaattcacaaatgtgtcagaagagccttgatgtggaaaccgatggacttgaagcaaatgtgccaccagtgtcctttctgaaggtcctgaaactgaataaaacagaatggccctactttgtcgtgggaacagtatgtgccattgccaatggggggcttcagccggcattttcagtcatattctcagagatcatagcgatttttggaccaggcgatgatgcagtgaagcagcagaagtgcaacatattctctttgattttcttatttctgggaattatttctttttttactttcttccttcagggtttcacgtttgggaaagctggcgagatcctcaccagaagactgcggtcaatggcttttaaagcaatgctaagacaggacatgagctggtttgatgaccataaaaacagtactggtgcactttctacaagacttgccacagatgctgcccaagtccaaggagccacaggaaccaggttggctttaattgcacagaatatagctaaccttggaactggtattatcatatcatttatctacggttggcagttaaccctattgctattagcagttgttccaattattgctgtgtcaggaattgttgaaatgaaattgttggctggaaatgccaaaagagataaaaaagaactggaagctgctggaaagattgcaacagaggcaatagaaaatattaggacagttgtgtctttgacccaggaaagaaaatttgaatcaatgtatgttgaaaaattgtatggaccttacaggaattctgtgcagaaggcacacatctatggaattacttttagtatctcacaagcatttatgtatttttcctatgccggttgttttcgatttggtgcatatctcattgtgaatggacatatgcgcttcagagatgttattctggtgttttctgcaattgtatttggtgcagtggctctaggacatgccagttcatttgctccagactatgctaaagctaagctgtctgcagcccacttattcatgctgtttgaaagacaacctctgattgacagctacagtgaagaggggctgaagcctgataaatttgaaggaaatataacatttaatgaagtcgtgttcaactatcccacccgagcaaacgtgccagtgcttcaggggctgagcctggaggtgaagaaaggccagacactagccctggtgggcagcagtggctgtgggaagagcacggtggtccagctcctggagcggttctacgaccccttggcggggacagtgtttgtggactttggttttcagcttctcgatggtcaagaagcaaagaaactcaatgtccagtggctcagagctcaactcggaatcgtgtctcaggagcctatcctatttgactgcagcattgccgagaatattgcctatggagacaacagccgggttgtatcacaggatgaaattgtgagtgcagccaaagctgccaacatacatcctttcatcgagacgttaccccacgtaagttaaagagtagctgaaatcagaagagactactttttatcccccaaacaattaccaaagttatgccaacaaaatcttgtaacaaaatatgttgatttactaacattaacaacttggacaaggcacttcaggataccaagcttccttatttgtaaatgggaatacattatgcctacctcatacaaatgtagtgagaagctcaaaaccaccatacttcaggttacagactggtggttgagggctgcatttagactgcagtcatgtttggtttagccctatggtacttttaaaacaattatagttttt

SEQ ID NO: 62346 - DNA, 2347 bp, Homo sapiens
ggaggtgcggcaggggcacaggtgacgctcctcccgcctgcctagcagagctccaggcgcacatccgcagtcagccacctcgcgcgcgcctccaggagcaaggatggagaggctggtgatcaggatgcccttctgtcatctgtctacctacagcctggtttgggtcatggcagcagtggtgctgtgcacagcacaagtgcaagtggtgacccaggatgaaagagagcagctgtacacacctgcttccttaaaatgctctctgcaaaatgcccaggaagccctcattgtgacatggcagaaaaagaaagctgtaagcccagaaaacatggtcaccttcagcgagaaccatggggtggtgatccagcctgcctataaggacaagataaacattacccagctgggactccaaaactcaaccatcaccttctggaatatcaccctggaggatgaagggtgttacatgtgtctcttcaatacctttggttttgggaagatctcaggaacggcctgcctcaccgtctatgtacagcccatagtatcccttcactacaaattctctgaagaccacctaaatatcacttgctctgccactgcccgcccagcccccatggtcttctggaaggtccctcggtcagggattgaaaatagtacagtgactctgtctcacccaaatgggaccacgtctgttaccagcatcctccatatcaaagaccctaagaatcaggtggggaaggaggtgatctgccaggtgctgcacctggggactgtgaccgactttaagcaaaccgtcaacaaaggctattggttttcagttccgctattgctaagcattgtttccctggtaattcttctcgtcctaatctcaatcttactgtactgggaaacgtcaccggaatcaggaccgagagccctaaataagtcacacagcaccctgaaagtgattccctggtctacttgaatttgacacaagagaaaagcaggaggaaaaggggccattctccaaaggacctgaaagagcaaaagaggtgggagcgaaagccttaaggatcccacgactttttactgccatctgagctactcagtgtttgaatcccaagaggaagtcagtttacctctcaggtctgttgtaggacttgattttgtaaagcaatgccatgttatgtggttgaaagggcactggacttagttagtatcaggagcactgagctcacagactgacttgggctcctactggtggggacctctgttagtcactttacctcatccaaagtataaaggaattggaccaaataatttaccacatagctctaaaacttaatttaaaatgtaattccagaaaaaaaaagggaataagcaaagggggaagaattgaaagagagagagaagaaagaatacagagagcttaccttttgcctttctgttgatgttacatctcttcttcctatgttcttaggtctatgagtctgtttccccatcatttggtatctagtccagttcctgcttactgctttgctaatagctggccttgctagaatccttggtttcactgctgttcttcatgtgcttctatgagatttactccaacacaaataggactgaatttattgtgaagtaacattggcaatcttaacttattcatttaacttatttttatagctagataaatattgttagtcttagacaatagctcacattttttgagaagcatgccctccctgtccatttgtcttataacatgacccagccctattttacgtcattctaaattcagcctcatataatgaaaatacattatgaaaacagatgtttaggagatttcctgtatagcagtcagccaattcatatgctttgtctctgctggcttctttttccatgcgttaacttttcccaatagcagaggaggcaaatatgagcatacaatccctttgttctaaagatattgttccagctagtggaatgatgttgaatctttaataaccataattagttgctttttcagtatcttctgctttgtctgtgtctatccagtggcctaggaattaaagtgtaagttgttttcgctgttaaattggatatttatatatatatatatagcaagattttcatgtgttatttaattctgtattgtttcttatatttgtagtaaaatattgaacaattaaaagtgttgactccaaatatttggcttatgatattctcttggggaaatgtgggaaatgaatgataatccttgtcttttcccatcatatgtaaaaaccctcccctcctctctatctttcccctcctaaaagatgagctgggctgggcgcggtggctcaagcctgcaatcccagtactttgggaggcc

SEQ ID NO: 62347 - DNA, 2094 bp, Homo sapiens
ggaggtgcggcaggggcacaggtgacgctcctcccgcctgcctagcagagctccaggcgcacatccgcagtcagccacctcgcgcgcgcctccaggagcaaggatggagaggctgtgcaagtggtgacccaggatgaaagagagcagctgtacacacctgcttccttaaaatgctctctgcaaaatgcccaggaagccctcattgtgacatggcagaaaaagaaagctgtaagcccagaaaacatggtcaccttcagcgagaaccatggggtggtgatccagcctgcctataaggacaagataaacattacccagctgggactccaaaactcaaccatcaccttctggaatatcaccctggaggatgaagggtgttacatgtgtctcttcaatacctttggttttgggaagatctcaggaacggcctgcctcaccgtctatgtacagcccatagtatcccttcactacaaattctctgaagaccacctaaatatcacttgctctgccactgcccgcccagcccccatggtcttctggaaggtccctcggtcagggattgaaaatagtacagtgactctgtctcacccaaatgggaccacgtctgttaccagcatcctccatatcaaagaccctaagaatcaggtggggaaggaggtgatctgccaggtgctgcacctggggactgtgaccgactttaagcaaaccgtcaacaaaggctattggttttcagttccgctattgctaagcattgtttccctggtaattcttctcgtcctaatctcaatcttactgtactgggaaacgtcaccggaatcaggaccgagagccctaaataagtcacacagcaccctgaaagtgattccctggtctacttgaatttgacacaagagaaaagcaggaggaaaaggggccattctccaaaggacctgaaagagcaaaagaggtgggagcgaaagccttaaggatcccacgactttttactgccatctgagctactcagtgtttgaatcccaagaggaagtcagtttacctctcaggtctgttgtaggacttgattttgtaaagcaatgccatgttatgtggttgaaagggcactggacttagttagtatcaggagcactgagctcacagactgacttgggctcctactggtggggacctctgttagtcactttacctcatccaaagtataaaggaattggaccaaataatttaccacatagctctaaaacttaatttaaaatgtaattccagaaaaaaaaagggaataagcaaagggggaagaattgaaagagagagagaagaaagaatacagagagcttaccttttgcctttctgttgatgttacatctcttcttcctatgttcttaggtctatgagtctgtttccccatcatttggtatctagtccagttcctgcttactgctttgctaatagctggccttgctagaatccttggtttcactgctgttcttcatgtgcttctatgagatttactccaacacaaataggactgaatttattgtgaagtaacattggcaatcttaacttattcatttaacttatttttatagctagataaatattgttagtcttagacaatagctcacattttttgagaagcatgccctccctgtccatttgtcttataacatgacccagccctattttacgtcattctaaattcagcctcatataatgaaaatacattatgaaaacagatgtttaggagatttcctgtatagcagtcagccaattcatatgctttgtctctgctggcttctttttccatgcgttaacttttcccaatagcagaggaggcaaatatgagcatacaatccctttgttctaaagatattgttccagctagtggaatgatgttgaatctttaataaccataattagttgctttttcagtatcttctgctttgtctgtgtctatccagtggcctaggaattaaagtgtaagttgttttcgctgttaaattggatatttatatatatatatatagcaagattttcatgtgttatttaattctgtattgtttcttatatttgtagtaaaatattgaacaattaaaagtgttgactcca

SEQ ID NO: 62348 - DNA, 2251 bp, Homo sapiens
ggaggtgcggcaggggcacaggtgacgctcctcccgcctgcctagcagagctccaggcgcacatccgcagtcagccacctcgcgcgcgcctccaggagcaaggatggagaggctgactctgaccaggacaattgggggccctctccttacagctacactcctaggaaagaccaccatcaatgattaccaggtgatcaggatgcccttctgtcatctgtctacctacagcctggtttgggtcatggcagcagtggtgctgtgcacagcacaagtgcaagtggtgacccaggatgaaagagagcagctgtacacacctgcttccttaaaatgctctctgcaaaatgcccaggaagccctcattgtgacatggcagaaaaagaaagctgtaagcccagaaaacatggtcaccttcagcgagaaccatggggtggtgatccagcctgcctataaggacaagataaacattacccagctgggactccaaaactcaaccatcaccttctggaatatcaccctggaggatgaagggtgttacatgtgtctcttcaatacctttggttttgggaagatctcaggaacggcctgcctcaccgtctatgtacagcccatagtatcccttcactacaaattctctgaagaccacctaaatatcacttgctctgccactgcccgcccagcccccatggtcttctggaaggtccctcggtcagggattgaaaatagtacagtgactctgtctcacccaaatgggaccacgtctgttaccagcatcctccatatcaaagaccctaagaatcaggtggggaaggaggtgatctgccaggtgctgcacctggggactgtgaccgactttaagcaaaccgtcaacaaaggctattggttttcagttccgctattgctaagcattgtttccctggtaattcttctcgtcctaatctcaatcttactgtactgggaaacgtcaccggaatcaggaccgagagccctaaataagtcacacagcaccctgaaagtgattccctggtctacttgaatttgacacaagagaaaagcaggaggaaaaggggccattctccaaaggacctgaaagagcaaaagaggtgggagcgaaagccttaaggatcccacgactttttactgccatctgagctactcagtgtttgaatcccaagaggaagtcagtttacctctcaggtctgttgtaggacttgattttgtaaagcaatgccatgttatgtggttgaaagggcactggacttagttagtatcaggagcactgagctcacagactgacttgggctcctactggtggggacctctgttagtcactttacctcatccaaagtataaaggaattggaccaaataatttaccacatagctctaaaacttaatttaaaatgtaattccagaaaaaaaaagggaataagcaaagggggaagaattgaaagagagagagaagaaagaatacagagagcttaccttttgcctttctgttgatgttacatctcttcttcctatgttcttaggtctatgagtctgtttccccatcatttggtatctagtccagttcctgcttactgctttgctaatagctggccttgctagaatccttggtttcactgctgttcttcatgtgcttctatgagatttactccaacacaaataggactgaatttattgtgaagtaacattggcaatcttaacttattcatttaacttatttttatagctagataaatattgttagtcttagacaatagctcacattttttgagaagcatgccctccctgtccatttgtcttataacatgacccagccctattttacgtcattctaaattcagcctcatataatgaaaatacattatgaaaacagatgtttaggagatttcctgtatagcagtcagccaattcatatgctttgtctctgctggcttctttttccatgcgttaacttttcccaatagcagaggaggcaaatatgagcatacaatccctttgttctaaagatattgttccagctagtggaatgatgttgaatctttaataaccataattagttgctttttcagtatcttctgctttgtctgtgtctatccagtggcctaggaattaaagtgtaagttgttttcgctgttaaattggatatttatatatatatatatagcaagattttcatgtgttatttaattctgtattgtttcttatatttgtagtaaaatattgaacaattaaaagtgttgactcca

SEQ ID NO: 62349 - DNA, 2117 bp, Homo sapiens
ggaggtgcggcaggggcacaggtgacgctcctcccgcctgcctagcagagctccaggcgcacatccgcagtcagccacctcgcgcgcgcctccaggagcaaggatggagaggctgtgcaagtggtgacccaggatgaaagagagcagctgtacacacctgcttccttaaaatgctctctgcaaaatgcccaggaagccctcattgtgacatggcagaaaaagaaagctgtaagcccagaaaacatggtcaccttcagcgagaaccatggggtggtgatccagcctgcctataaggacaagataaacattacccagctgggactccaaaactcaaccatcaccttctggaatatcaccctggaggatgaagggtgttacatgtgtctcttcaatacctttggttttgggaagatctcaggaacggcctgcctcaccgtctatgatcatatttattttttgtcccagtacagcccatagtatcccttcactacaaattctctgaagaccacctaaatatcacttgctctgccactgcccgcccagcccccatggtcttctggaaggtccctcggtcagggattgaaaatagtacagtgactctgtctcacccaaatgggaccacgtctgttaccagcatcctccatatcaaagaccctaagaatcaggtggggaaggaggtgatctgccaggtgctgcacctggggactgtgaccgactttaagcaaaccgtcaacaaaggctattggttttcagttccgctattgctaagcattgtttccctggtaattcttctcgtcctaatctcaatcttactgtactgggaaacgtcaccggaatcaggaccgagagccctaaataagtcacacagcaccctgaaagtgattccctggtctacttgaatttgacacaagagaaaagcaggaggaaaaggggccattctccaaaggacctgaaagagcaaaagaggtgggagcgaaagccttaaggatcccacgactttttactgccatctgagctactcagtgtttgaatcccaagaggaagtcagtttacctctcaggtctgttgtaggacttgattttgtaaagcaatgccatgttatgtggttgaaagggcactggacttagttagtatcaggagcactgagctcacagactgacttgggctcctactggtggggacctctgttagtcactttacctcatccaaagtataaaggaattggaccaaataatttaccacatagctctaaaacttaatttaaaatgtaattccagaaaaaaaaagggaataagcaaagggggaagaattgaaagagagagagaagaaagaatacagagagcttaccttttgcctttctgttgatgttacatctcttcttcctatgttcttaggtctatgagtctgtttccccatcatttggtatctagtccagttcctgcttactgctttgctaatagctggccttgctagaatccttggtttcactgctgttcttcatgtgcttctatgagatttactccaacacaaataggactgaatttattgtgaagtaacattggcaatcttaacttattcatttaacttatttttatagctagataaatattgttagtcttagacaatagctcacattttttgagaagcatgccctccctgtccatttgtcttataacatgacccagccctattttacgtcattctaaattcagcctcatataatgaaaatacattatgaaaacagatgtttaggagatttcctgtatagcagtcagccaattcatatgctttgtctctgctggcttctttttccatgcgttaacttttcccaatagcagaggaggcaaatatgagcatacaatccctttgttctaaagatattgttccagctagtggaatgatgttgaatctttaataaccataattagttgctttttcagtatcttctgctttgtctgtgtctatccagtggcctaggaattaaagtgtaagttgttttcgctgttaaattggatatttatatatatatatatagcaagattttcatgtgttatttaattctgtattgtttcttatatttgtagtaaaatattgaacaattaaaagtgttgactcca

SEQ ID NO: 62350 - DNA, 1460 bp, Homo sapiens
gttcttgtaaagagtcatagtcccctcacaccatactgggtcagaaatgtctacttctttatctttgccaatgaatatacactagaataactctgtgtttcttaatctctctattatttatcttcttaaaatgtattatgatagaatttacaagtgtccaaagttaataccttgttttccttttatccagagccctaaataagtcacacagcaccctgaaagtgattccctggtctacttgaatttgacacaagagaaaagcaggaggaaaaggggccattctccaaaggacctgaaagagcaaaagaggtgggagcgaaagccttaaggatcccacgactttttactgccatctgagctactcagtgtttgaatcccaagaggaagtcagtttacctctcaggtctgttgtaggacttgattttgtaaagcaatgccatgttatgtggttgaaagggcactggacttagttagtatcaggagcactgagctcacagactgacttgggctcctactggtggggacctctgttagtcactttacctcatccaaagtataaaggaattggaccaaataatttaccacatagctctaaaacttaatttaaaatgtaattccagaaaaaaaaagggaataagcaaagggggaagaattgaaagagagagagaagaaagaatacagagagcttaccttttgcctttctgttgatgttacatctcttcttcctatgttcttaggtctatgagtctgtttccccatcatttggtatctagtccagttcctgcttactgctttgctaatagctggccttgctagaatccttggtttcactgctgttcttcatgtgcttctatgagatttactccaacacaaataggactgaatttattgtgaagtaacattggcaatcttaacttattcatttaacttatttttatagctagataaatattgttagtcttagacaatagctcacattttttgagaagcatgccctccctgtccatttgtcttataacatgacccagccctattttacgtcattctaaattcagcctcatataatgaaaatacattatgaaaacagatgtttaggagatttcctgtatagcagtcagccaattcatatgctttgtctctgctggcttctttttccatgcgttaacttttcccaatagcagaggaggcaaatatgagcatacaatccctttgttctaaagatattgttccagctagtggaatgatgttgaatctttaataaccataattagttgctttttcagtatcttctgctttgtctgtgtctatccagtggcctaggaattaaagtgtaagttgttttcgctgttaaattggatatttatatatatatatatagcaagattttcatgtgttatttaattctgtattgtttcttatatttgtagtaaaatattgaacaattaaaagtgttgactcca

SEQ ID NO: 62351 - DNA, 1242 bp, Homo sapiens
  misc_feature (28)..(28): n is a, c, g, or t
cagccagtgcctcgtctgccgaacgggnttctgcgtagaaaagcaggaggaaaaggggccattctccaaaggacctgaaagagcaaaagaggtgggagcgaaagccttaaggatcccacgactttttactgccatctgagctactcagtgtttgaatcccaagaggaagtcagtttacctctcaggtctgttgtaggacttgattttgtaaagcaatgccatgttatgtggttgaaagggcactggacttagttagtatcaggagcactgagctcacagactgacttgggctcctactggtggggacctctgttagtcactttacctcatccaaagtataaaggaattggaccaaataatttaccacatagctctaaaacttaatttaaaatgtaattccagaaaaaaaaagggaataagcaaagggggaagaattgaaagagagagagaagaaagaatacagagagcttaccttttgcctttctgttgatgttacatctcttcttcctatgttcttaggtctatgagtctgtttccccatcatttggtatctagtccagttcctgcttactgctttgctaatagctggccttgctagaatccttggtttcactgctgttcttcatgtgcttctatgagatttactccaacacaaataggactgaatttattgtgaagtaacattggcaatcttaacttattcatttaacttatttttatagctagataaatattgttagtcttagacaatagctcacattttttgagaagcatgccctccctgtccatttgtcttataacatgacccagccctattttacgtcattctaaattcagcctcatataatgaaaatacattatgaaaacagatgtttaggagatttcctgtatagcagtcagccaattcatatgctttgtctctgctggcttctttttccatgcgttaacttttcccaatagcagaggaggcaaatatgagcatacaatccctttgttctaaagatattgttccagctagtggaatgatgttgaatctttaataaccataattagttgctttttcagtatcttctgctttgtctgtgtctatccagtggcctaggaattaaagtgtaagttgttttcgctgttaaattggatatttatatatatatatatagcaagattttcatgtgttatttaattctgtattgtttcttatatttgtagtaaaatattgaacaattaaaagtgttgactcca

SEQ ID NO: 62352 - DNA, 2176 bp, Homo sapiens
ggaggtgcggcaggggcacaggtgacgctcctcccgcctgcctagcagagctccaggcgcacatccgcagtcagccacctcgcgcgcgcctccaggagcaaggatggagaggctggtgatcaggatgcccttctgtcatctgtctacctacagcctggtttgggtcatggcagcagtggtgctgtgcacagcacaagtgcaagtggtgacccaggatgaaagagagcagctgtacacacctgcttccttaaaatgctctctgcaaaatgcccaggaagccctcattgtgacatggcagaaaaagaaagctgtaagcccagaaaacatggtcaccttcagcgagaaccatggggtggtgatccagcctgcctataaggacaagataaacattacccagctgggactccaaaactcaaccatcaccttctggaatatcaccctggaggatgaagggtgttacatgtgtctcttcaatacctttggttttgggaagatctcaggaacggcctgcctcaccgtctatgtacagcccatagtatcccttcactacaaattctctgaagaccacctaaatatcacttgctctgccactgcccgcccagcccccatggtcttctggaaggtccctcggtcagggattgaaaatagtacagtgactctgtctcacccaaatgggaccacgtctgttaccagcatcctccatatcaaagaccctaagaatcaggtggggaaggaggtgatctgccaggtgctgcacctggggactgtgaccgactttaagcaaaccgtcaacaaaggctattggttttcagttccgctattgctaagcattgtttccctggtaattcttctcgtcctaatctcaatcttactgtactgggaaacgtcaccggaatcaggaccgagagccctaaataagtcacacagcaccctgaaagtgattccctggtctacttgaatttgacacaagagaaaagcaggaggaaaaggggccattctccaaaggacctgaaagagcaaaagaggtgggagcgaaagccttaaggatcccacgactttttactgccatctgagctactcagtgtttgaatcccaagaggaagtcagtttacctctcaggtctgttgtaggacttgattttgtaaagcaatgccatgttatgtggttgaaagggcactggacttagttagtatcaggagcactgagctcacagactgacttgggctcctactggtggggacctctgttagtcactttacctcatccaaagtataaaggaattggaccaaataatttaccacatagctctaaaacttaatttaaaatgtaattccagaaaaaaaaagggaataagcaaagggggaagaattgaaagagagagagaagaaagaatacagagagcttaccttttgcctttctgttgatgttacatctcttcttcctatgttcttaggtctatgagtctgtttccccatcatttggtatctagtccagttcctgcttactgctttgctaatagctggccttgctagaatccttggtttcactgctgttcttcatgtgcttctatgagatttactccaacacaaataggactgaatttattgtgaagtaacattggcaatcttaacttattcatttaacttatttttatagctagataaatattgttagtcttagacaatagctcacattttttgagaagcatgccctccctgtccatttgtcttataacatgacccagccctattttacgtcattctaaattcagcctcatataatgaaaatacattatgaaaacagatgtttaggagatttcctgtatagcagtcagccaattcatatgctttgtctctgctggcttctttttccatgcgttaacttttcccaatagcagaggaggcaaatatgagcatacaatccctttgttctaaagatattgttccagctagtggaatgatgttgaatctttaataaccataattagttgctttttcagtatcttctgctttgtctgtgtctatccagtggcctaggaattaaagtgtaagttgttttcgctgttaaattggatatttatatatatatatatagcaagattttcatgtgttatttaattctgtattgtttcttatatttgtagtaaaatattgaacaattaaaagtgttgactcca

SEQ ID NO: 62353 - DNA, 2176 bp, Homo sapiens
  misc_feature (1572)..(1572): n is a, c, g, or t
  misc_feature (1598)..(1598): n is a, c, g, or t
  misc_feature (1609)..(1610): n is a, c, g, or t
  misc_feature (1619)..(1619): n is a, c, g, or t
  misc_feature (1654)..(1654): n is a, c, g, or t
  misc_feature (1662)..(1662): n is a, c, g, or t
  misc_feature (1673)..(1673): n is a, c, g, or t
  misc_feature (1679)..(1679): n is a, c, g, or t
  misc_feature (1700)..(1700): n is a, c, g, or t
  misc_feature (1702)..(1702): n is a, c, g, or t
  misc_feature (1722)..(1722): n is a, c, g, or t
  misc_feature (1736)..(1736): n is a, c, g, or t
  misc_feature (1738)..(1739): n is a, c, g, or t
  misc_feature (1743)..(1743): n is a, c, g, or t
  misc_feature (1756)..(1756): n is a, c, g, or t
  misc_feature (1771)..(1771): n is a, c, g, or t
ggaggtgcggcaggggcacaggtgacgctcctcccgcctgcctagcagagctccaggcgcacatccgcagtcagccacctcgcgcgcgcctccaggagcaaggatggagaggctggtgatcaggatgcccttctgtcatctgtctacctacagcctggtttgggtcatggcagcagtggtgctgtgcacagcacaagtgcaagtggtgacccaggatgaaagagagcagctgtacacacctgcttccttaaaatgctctctgcaaaatgcccaggaagccctcattgtgacatggcagaaaaagaaagctgtaagcccagaaaacatggtcaccttcagcgagaaccatggggtggtgatccagcctgcctataaggacaagataaacattacccagctgggactccaaaactcaaccatcaccttctggaatatcaccctggaggatgaagggtgttacatgtgtctcttcaatacctttggttttgggaagatctcaggaacggcctgcctcaccgtctatgtacagcccatagtatcccttcactacaaattctctgaagaccacctaaatatcacttgctctgccactgcccgcccagcccccatggtcttctggaaggtccctcggtcagggattgaaaatagtacagtgactctgtctcacccaaatgggaccacgtctgttaccagcatcctccatatcaaagaccctaagaatcaggtggggaaggaggtgatctgccaggtgctgcacctggggactgtgaccgactttaagcaaaccgtcaacaaaggctattggttttcagttccgctattgctaagcattgtttccctggtaattcttctcgtcctaatctcaatcttactgtactgggaaacgtcaccggaatcaggaccgagagccctaaataagtcacacagcaccctgaaagtgattccctggtctacttgaatttgacacaagagaaaagcaggaggaaaaggggccattctccaaaggacctgaaagagcaaaagaggtgggagcgaaagccttaaggatcccacgactttttactgccatctgagctactcagtgtttgaatcccaagaggaagtcagtttacctctcaggtctgttgtaggacttgattttgtaaagcaatgccatgttatgtggttgaaagggcactggacttagttagtatcaggagcactgagctcacagactgacttgggctcctactggtggggacctctgttagtcactttacctcatccaaagtataaaggaattggaccaaataatttaccacatagctctaaaacttaatttaaaatgtaattccagaaaaaaaaagggaataagcaaagggggaagaattgaaagagagagagaagaaagaatacagagagcttaccttttgcctttctgttgatgttacatctcttcttcctatgttcttaggtctatgagtctgtttccccatcatttggtatctagtccagttcctgcttactgctttgctaatagctggccttgctagaacccccggcccaccgccgccccccatgcgcccccacganacccactcccacacaaacagcaccgnacccaccgcgnngccacaccngcaccccccacccacccaccccacccacccccacngccagacnaacaccgccanccccanacaaccgcccacacccccccnanacgcacgccccccccgcccnccccccccaccacncnncccngcccccccccacnccaccccaaacccancctcatataatgaaaatacattatgaaaacagatgtttaggagatttcctgtatagcagtcagccaattcatatgctttgtctctgctggcttctttttccatgcgttaacttttcccaatagcagaggaggcaaatatgagcatacaatccctttgttctaaagatattgttccagctagtggaatgatgttgaatctttaataaccataattagttgctttttcagtatcttctgctttgtctgtgtctatccagtggcctaggaattaaagtgtaagttgttttcgctgttaaattggatatttatatatatatatatagcaagattttcatgtgttatttaattctgtattgtttcttatatttgtagtaaaatattgaacaattaaaagtgttgactcca

SEQ ID NO: 62354 - DNA, 1863 bp, Homo sapiens
ggaggtgcggcaggggcacaggtgacgctcctcccgcctgcctagcagagctccaggcgcacatccgcagtcagccacctcgcgcgcgcctccaggagcaaggatggagaggctggtgatcaggatgcccttctgtcatctgtctacctacagcctggtttgggtcatggcagcagtggtgctgtgcacagcacaagtgcaagtggtgacccaggatgaaagagagcagctgtacacacctgcttccttaaaatgctctctgcaaaatgcccaggaagccctcattgtgacatggcagaaaaagaaagctgtaagcccagaaaacatggtcaccttcagcgagaaccatggggtggtgatccagcctgcctataaggacaagataaacattacccagctgggactccaaaactcaaccatcaccttctggaatatcaccctggaggatgaagggtgttacatgtgtctcttcaatacctttggttttgggaagatctcaggaacggcctgcctcaccgtctatgtacagcccatagtatcccttcactacaaattctctgaagaccacctaaatatcacttgctctgccactgcccgcccagcccccatggtcttctggaaggtccctcggtcagggattgaaaatagtacagtgactctgtctcacccaaatgggaccacgtctgttaccagcatcctccatatcaaagaccctaagaatcaggtggggaaggaggtgatctgccaggtgctgcacctggggactgtgaccgactttaagcaaaccgtcaacaaaggctattggttttcagttccgctattgctaagcattgtttccctggtaattcttctcgtcctaatctcaatcttactgtactgggaaacgtcaccggaatcaggaccgagagccctaaataagtcacacagcaccctgaaagtgattccctggtctacttgaatttgacacaagagaaaagcaggaggaaaaggggccattctccaaaggacctgaaagagcaaaagaggtgggagcgaaagccttaaggatcccacgactttttactgccatctgagctactcagtgtttgaatcccaagaggaagtcagtttacctctcaggtctgttgtaggacttgattttgtaaagcaatgccatgttatgtggttgaaagggcactggacttagttagtatcaggagcactgagctcacagactgacttgggctcctactggtggggacctctgttagtcactttacctcatccaaagtataaaggaattggaccaaataatttaccacatagctctaaaacttaatttaaaatgtaattccagaaaaaaaaagggaataagcaaagggggaagaattgaaagagagagagaagaaagaatacagagagcttaccttttgcctttctgttgatgttacatctcttcttcctatgttcttaggtctatgagtctgtttccccatcatttggtatctagtccagttcctgcttactgctttgctaatagctggccttgctagaatccttggtttcactgctgttcttcatgtgcttctatgagatttactccaacacaaataggactgaatttattgtgaagtaacattggcaatcttaacttattcatttaacttatttttatagctagataaatataattagttgctttttcagtatcttctgctttgtctgtgtctatccagtggcctaggaattaaagtgtaagttgttttcgctgttaaattggatatttatatatatatatatagcaagattttcatgtgttatttaattctgtattgtttcttatatttgtagtaaaatattgaacaattaaaagtgttgactcca

SEQ ID NO: 62355 - DNA, 2034 bp, Homo sapiens
ggaggtgcggcaggggcacaggtgacgctcctcccgcctgcctagcagagctccaggcgcacatccgcagtcagccacctcgcgcgcgcctccaggagcaaggatggagaggctggtgatcaggatgcccttctgtcatctgtctacctacagcctggtttgggtcatggcagcagtggtgctgtgcacagcacaagtgcaagtggtgacccaggatgaaagagagcagctgtacacacctgcttccttaaaatgctctctgcaaaatgcccaggaagccctcattgtgacatggcagaaaaagaaagctgtaagcccagaaaacatggtcaccttcagcgagaaccatggggtggtgatccagcctgcctataaggacaagataaacattacccagctgggactccaaaactcaaccatcaccttctggaatatcaccctggaggatgaagggtgttacatgtgtctcttcaatacctttggttttgggaagatctcaggaacggcctgcctcaccgtctatgtacagcccatagtatcccttcactacaaattctctgaagaccacctaaatatcacttgctctgccactgcccgcccagcccccatggtcttctggaaggtccctcggtcagggattgaaaatagtacagtgactctgtctcacccaaatgggaccacgtctgttaccagcatcctccatatcaaagaccctaagaatcaggtggggaaggaggtgatctgccaggtgctgcacctggggactgtgaccgactttaagcaaaccgtcaacaaaggctattggttttcagttccgctattgctaagcattgtttccctggtaattcttctcgtcctaatctcaatcttactgtactgggaaacgtcaccggaatcaggaccgagagccctaaataagtcacacagcaccctgaaagtgattccctggtctacttgaatttgacacaagagaaaagcaggaggaaaaggggccattctccaaaggacctgaaagagcaaaagaggtgggagcgaaagccttaaggatcccacgactttttactgccatctgagctactcagtgtttgaatcccaagaggaagtcagtttacctctcaggtctgttgtaggacttgattttgtaaagcaatgccatgttatgtggttgaaagggcactggacttagttagtatcaggagcactgagctcacagactgacttgggctcctactggtggggacctctgttagtcactttacctcatccaaagtataaaggaattggaccaaataatttaccacatagctctaaaacttaatttaaaatgtaattccagaaaaaaaaagggaataagcaaagggggaagaattgaaagagagagagaagaaagaatacagagagcttaccttttgcctttctgttgatgttacatctcttcttcctatgttcttaggtctatgagtctgtttccccatcatttggtatctagtccagttcctgcttactgctttgctaatagctggccttgctagaatccttggtttcactgctgttcttcatgtgcttctatgagatttactccaacacaaataggactgaatttattgtgaagtaacattggcaatcttaacttattcatttaacttatttttatagctagataaatataattagttgctttttcagtatcttctgctttgtctgtgtctatccagtggcctaggaattaaagtgtaagttgttttcgctgttaaattggatatttatatatatatatatagcaagattttcatgtgttatttaattctgtattgtttcttatatttgtagtaaaatattgaacaattaaaagtgttgactccaaatatttggcttatgatattctcttggggaaatgtgggaaatgaatgataatccttgtcttttcccatcatatgtaaaaaccctcccctcctctctatctttcccctcctaaaagatgagctgggctgggcgcggtggctcaagcctgcaatcccagtactttgggaggcc

SEQ ID NO: 62356 - DNA, 1064 bp, Homo sapiens
  misc_feature (1001)..(1001): n is a, c, g, or t
tggttcttgttgacattacaagcttttaacacatttttgacctaggagccctgttgctggaagtatagtctccagccagttactctcatgatagtactgctataaaactcattcttgtgtggtgttctgtgctatagagtctgtgtattgctgttcatattcggagttctggttttgtttttcccttaaaacctgttaacagttttttttgggggtggggggattcagaactcttgtttcccattccatagcacctgacattatttcaagttttataatatcttaaggtgtatattttattttttttattggcttagttgttttttgttttgttttgtttgagatggagtttcactgttgcccaggctggggtgcaatggtgtgatcttggctcactgcagcctccacctcccgagttcaaatgattctcctgcctcagcttcctgagtagctgggattacaggtgcatgccaccatgcccggctaatttttatatttttattagagacgggatttcgccatgttaaccaggctggtctcgaactcctgacctcaggtgatctgcccgccttggcctcccaaagtgctgggattacaggcatgagccaccatgcctggccttattggcttagtttttaaattatcctccaaaaattttgggcctttttctgtggggaaacaagtgaagctgctcttcagcatagacactacctttatcccatcattttagtaaaaactaggtttgtttcacttctgaggtgtcttattaatgtacttcatctgagaatttgttgatcttaatgttcgagctatataagaactgccattaaaaaaaatgggataatagatgattttatcagtatacctgtggaatatgtacaaactggatctatagatattttgaactggaccaggtgggtattgaagtaacccatcaaaatatgctctgcagtgattccgcttaatgtttaaattcagtaacgtacttgaaaggcaaatcnggcttgttggggggggtcggggggcagacgttggtgggtgacgggcattttggacttaaattg

SEQ ID NO: 62357 - DNA, 696 bp, Homo sapiens
tggttcttgttgacattacaagcttttaacacatttttgacctaggagccctgttgctggaagtatagtctccagccagttactctcatgatagtactgctataaaactcattcttgtgtggtgttctgtgctatagagtctgtgtattgctgttcatattcggagttctggttttgtttttcccttaaaacctgttaacagttttttttgggggtggggggattcagaactcttgtttcccattccatagcacctgacattatttcaagttttataatatcttaaggtgtatattttattttttttattggcttagttgttttttgttttgttttgtttgagatggagtttcactgttgcccaggctggggtgcaatggtgtgatcttggctcactgcagcctccacctcccgagttcaaatgattctcctgcctcagcttcctgagtagctgggattacaggtgcatgccaccatgcccggctaatttttatatttttattagagacgggatttcgccatgttaaccaggctggtctcgaactcctgacctcaggtgatctgcccgccttggcctcccaaagtgctgggattacaggcatgagccaccatgcctggccatttcccctccttttgaaggatgtgtctgcacgtttcagtatatcactagtgcatcctctttactacaattagact

SEQ ID NO: 62358 - DNA, 687 bp, Homo sapiens
gctcagccgcttggggcccgcacggaccctctacttcagtgtagaatgagccaaggagactcaaacccagcagctattccgcatgcagcagaagatattcaaggagatgaccgatggatgtctcagcacaacagatttgttttggactgtaaagacaaagagcctgatgtactgttcgtgggagactccatggtgcagttaatgcagcaatatgagatatggcgagagcttttttccccacttcatgcactgaattttggaattgggggagatacaacaagacatgttttgtggagactaaagaatggagaactggagaatattaagcctaaggtcattgttgtctgggtaggaacaaataaccacgaaaatacagcagaagaagtagcaggtgggatcgaggccattgtacaacttatcaacacaaggcagccacaggccaaaatcattgtattggtatgtagtctttggtgggtagagagttcgtatctttaggtcagctgaggaatctttttagaaatgtgattgctcatgaatattagagaaccttgaggtggaagcagtttatcatactttcgttgacctcttctttaatgtattttactgtcttactggtttcatcattcccccataccagctgtgggggccatcttttatccacgcatccttgtctagaagtatggaagc

SEQ ID NO: 62359 - DNA, 695 bp, Homo sapiens
  misc_feature (56)..(56): n is a, c, g, or t
  misc_feature (58)..(59): n is a, c, g, or t
cggacgcgtgggtcgacccacgcgtcgaccggaagtggaggagctgctgctggcangnnggggccggaggagggacgcgccggagcgggaccgacgggaccgagcgagcgaccgacgcgccacccgccgacgcctcagccgcttggggcccgcacggaccctctacttcagtgtagaatgagccaaggagactcaaacccagcagctattccgcatgcagcagaagatattcaaggagatgaccgatggatgtctcagagacaggattcatgcacagtggctcatgcatgtaatcccagcactttgggaggcagaggcaggaggattgcaggagtccaggagtttgagaccagcctaggcaacatagtaagagctcatctctacaaaaataaatcaaaattggccgggcatgtgtggctcacacctgtaatcccagcactttggaaggctaaggtgggcagattgcttgagctcaggagttcaagaccagcctgggcaacatggtaaaacctcgtctctacaaaaaaatagaaaaaattagccaggcatggtggcatgcctgtaatcccagctactcaggaggctgaggtgggagaattgcttgaacccaggaggcggaggttaccgtgagacgagattgcgccattgcactccagcctgggcaacagagtgagactctgtctcagaaaaaaaaa

SEQ ID NO: 62360 - DNA, 318 bp, Homo sapiens
tacctgcgcgcctcttctccgaaaggcacatccaggattatgtcatatataataattatcagaatcattctacttggctttaaaacatgttttctccaatttttttaaggttcataatttagccttttgtttttatgttgcttagattctgatgtatactgaatattttattaacatgtagcatcaggttgaacatgcttgtcattgatatatggaagatgctatagttagaagtgaatttgttctgctttcttaatcttttccaagcttagcagtgaaaaacaggttttgccccagtaaagggattttttggagggt

SEQ ID NO: 62361 - DNA, 240 bp, Homo sapiens
agagagagagagagagagagagagagttaaggttcataatttagccttttgtttttatgttgcttagattctgatgtatactgaatattttattaacatgtagcatcaggttgaacatgcttgtcattgatatatggaagatgctatagttagaagtgaatttgttctgctttcttaatcttttccaagcttagcagtgaaaaacaggttttgccccagtaaagggattttttggagggt

SEQ ID NO: 62362 - DNA, 2574 bp, Homo sapiens
tggttcttgttgacattacaagcttttaacacatttttgacctaggagccctgttgctggaagtatagtctccagccagttactctcatgatagtactgctataaaactcattcttgtgtggtgttctgtgctatagagtctgtgtattgctgttcatattcggagttctggttttgtttttcccttaaaacctgttaacagttttttttgggggtggggggattcagaactcttgtttcccattccatagcacctgacattatttcaagttttataatatcttaaggtgtatattttattttttttattggcttagttgttttttgttttgttttgtttgagatggagtttcactgttgcccaggctggggtgcaatggtgtgatcttggctcactgcagcctccacctcccgagttcaaatgattctcctgcctcagcttcctgagtagctgggattacaggtgcatgccaccatgcccggctaatttttatatttttattagagacgggatttcgccatgttaaccaggctggtctcgaactcctgacctcaggtgatctgcccgccttggcctcccaaagtgctgggattacaggcatgagccaccatgcctggccttattggcttagtttttaaattatcctccaaaaattttgggcctttttctgtggggaaacaagtgaagctgctcttcagcatagacactacctttatcccatcattttagtaaaaactaggtttgtttcacttctgaggtgtcttattaatgtacttcatctgagaatttgttgatcttaatgttcgagctatataagaactgccattaaaaaaaatgggataatagatgattttatcagtatacctgtggaatatgtacaaactggatctatagatattttgaactggaccaggtgggtattgaagtaacccatcaaaatatgctctgcagtgattccgcttaatgtttaaattcagtaacgtacttgaaaggcaaatttcagtgcttttgtatgttggaggagggcttactgatgcgtgctaagaccgatttctgattgagggatgaaccttgggctcatttttttcttgtgaagtctctttctagaaaattttttggttttgttctttttaaaaaatacatacttttttgaatgtatcatgtcttcattaacaacagaaaatccacatggtgtttactaaacttgtttacgacattaaaaatttcctttttatttttagtagcccaggttgagtttttcacaagagatttttttcttagctgaggtatagttgtatagcaagaagaattaagccagatttttgtgtgtggaaagacagttttctatccacgtctttttctgtttgtcagaaggtgggagtatggtccaaataaatccattaggttactcctgcagcatgcgcttttagcttctctcttgactgaggatcaaatatccctttgtgagctggccctcagctcctttgctcatgtgtacaaacctcagatgttactacattttatatctaccagagctattcaagcaatagtatttgaaccactagccttttaaataaaattctgccccattactgatgtgcagatattgagttcactttcattttttgccagatttctttgcactactttaggtaaaaatagttaatctatttttctttgacatcctagtttgcgtcagtgacagaacttactgcttagtctttgtactttttaaaaaatctataaatttaatgcactgtccaagtgaaatgtcctagttgtcattgtgattaaggggccaactttccaggcagctagcagagatactattctcttcctctcccagcaaatttgtattccttcgcccacgcattcctgctatactagatggcagccagtgatggaactataaagatgtctgtggtcatatgttgaatgtggcagcttgaagatgtactgccacgggtgatctagggcaggctgtcttccagtccatgtgttctcggtcgccgtagacagcgctctggctaccaccgtgaggctacttgaactgtcaggggcatctgcctaaaccagaatcttttgtcagaaaccttaacccaacaaaacaaatcttgagtagctcatgcccggctcttaggaattttgtctgtttaaaaaaaaaaaaaaaaaaaagtccaacttactttattttatttttttaacctagtcactgtttacaattgtatgctaaagcctgaaatattgtctgtgctgtggtgtatgagcattgccaactttatatttattgcagtgaagaagaaactaaaaatatatggaaatgaggagcatgtccaagctcctaaatccgtgtgggtgcatgtgggagaagtgagttagggcctcttgaaaggaggctttttggagaggggtcccccaggtttcttggtgttcctgcttggggatcactgctgctagctgactggacctccccattggaagtttgtgattttgctttggcaaagtttcattgactagtagaactcattctgttttagtgtatatttcaatataaatgtaaacattttgctcaa

SEQ ID NO: 62363 - DNA, 2623 bp, Homo sapiens
  misc_feature (2601)..(2601): n is a, c, g, or t
tggttcttgttgacattacaagcttttaacacatttttgacctaggagccctgttgctggaagtatagtctccagccagttactctcatgatagtactgctataaaactcattcttgtgtggtgttctgtgctatagagtctgtgtattgctgttcatattcggagttctggttttgtttttcccttaaaacctgttaacagttttttttgggggtggggggattcagaactcttgtttcccattccatagcacctgacattatttcaagttttataatatcttaaggtgtatattttattttttttattggcttagttgttttttgttttgttttgtttgagatggagtttcactgttgcccaggctggggtgcaatggtgtgatcttggctcactgcagcctccacctcccgagttcaaatgattctcctgcctcagcttcctgagtagctgggattacaggtgcatgccaccatgcccggctaatttttatatttttattagagacgggatttcgccatgttaaccaggctggtctcgaactcctgacctcaggtgatctgcccgccttggcctcccaaagtgctgggattacaggcatgagccaccatgcctggccttattggcttagtttttaaattatcctccaaaaattttgggcctttttctgtggggaaacaagtgaagctgctcttcagcatagacactacctttatcccatcattttagtaaaaactaggtttgtttcacttctgaggtgtcttattaatgtacttcatctgagaatttgttgatcttaatgttcgagctatataagaactgccattaaaaaaaatgggataatagatgattttatcagtatacctgtggaatatgtacaaactggatctatagatattttgaactggaccaggtgggtattgaagtaacccatcaaaatatgctctgcagtgattccgcttaatgtttaaattcagtaacgtacttgaaaggcaaatttcagtgcttttgtatgttggaggagggcttactgatgcgtgctaagaccgatttctgattgagggatgaaccttgggctcatttttttcttgtgaagtctctttctagaaaattttttggttttgttctttttaaaaaatacatacttttttgaatgtatcatgtcttcattaacaacagaaaatccacatggtgtttactaaacttgtttacgacattaaaaatttcctttttatttttagtagcccaggttgagtttttcacaagagatttttttcttagctgaggtatagttgtatagcaagaagaattaagccagatttttgtgtgtggaaagacagttttctatccacgtctttttctgtttgtcagaaggtgggagtatggtccaaataaatccattaggttactcctgcagcatgcgcttttagcttctctcttgactgaggatcaaatatccctttgtgagctggccctcagctcctttgctcatgtgtacaaacctcagatgttactacattttatatctaccagagctattcaagcaatagtatttgaaccactagccttttaaataaaattctgccccattactgatgtgcagatattgagttcactttcattttttgccagatttctttgcactactttaggtaaaaatagttaatctatttttctttgacatcctagtttgcgtcagtgacagaacttactgcttagtctttgtactttttaaaaaatctataaatttaatgcactgtccaagtgaaatgtcctagttgtcattgtgattaaggggccaactttccaggcagctagcagagatactattctcttcctctcccagcaaatttgtattccttcgcccacgcattcctgctatactagatggcagccagtgatggaactataaagatgtctgtggtcatatgttgaatgtggcagcttgaagatgtactgccacgggtgatctagggcaggctgtcttccagtccatgtgttctcggtcgccgtagacagcgctctggctaccaccgtgaggctacttgaactgtcaggggcatctgcctaaaccagaatcttttgtcagaaaccttaacccaacaaaacaaatcttgagtagctcatgcccggctcttaggaattttgtctgtttaaaaaaaaaaaaaaaaaaaagtccaacttactttattttatttttttaacctagtcactgtttacaattgtatgctaaagcctgaaatattgtctgtgctgtggtgtatgagcattgccaactttatatttattgcagtgaagaagaaactaaaaatatatggaaatgaggagcatgtccaagctcctaaatccgtgtgggtgcatgtgggagaagtgagttagggcctcttgaaaggaggctttttggagaggggtcccccaggtttcttggtgttcctgcttggggatcactgctgctagctgactggacctccccattggaagtttgtgattttgctttggcaaagtttcattgactagtagaactcattctgttttagtgtatatttcaatataaatgtaaacattttgctcaaaaaaaactcgtgccgaattcttgggcncgaggggccaaattccccatag

SEQ ID NO: 62364 - DNA, 2610 bp, Homo sapiens
  misc_feature (2597)..(2597): n is a, c, g, or t
tggttcttgttgacattacaagcttttaacacatttttgacctaggagccctgttgctggaagtatagtctccagccagttactctcatgatagtactgctataaaactcattcttgtgtggtgttctgtgctatagagtctgtgtattgctgttcatattcggagttctggttttgtttttcccttaaaacctgttaacagttttttttgggggtggggggattcagaactcttgtttcccattccatagcacctgacattatttcaagttttataatatcttaaggtgtatattttattttttttattggcttagttgttttttgttttgttttgtttgagatggagtttcactgttgcccaggctggggtgcaatggtgtgatcttggctcactgcagcctccacctcccgagttcaaatgattctcctgcctcagcttcctgagtagctgggattacaggtgcatgccaccatgcccggctaatttttatatttttattagagacgggatttcgccatgttaaccaggctggtctcgaactcctgacctcaggtgatctgcccgccttggcctcccaaagtgctgggattacaggcatgagccaccatgcctggccttattggcttagtttttaaattatcctccaaaaattttgggcctttttctgtggggaaacaagtgaagctgctcttcagcatagacactacctttatcccatcattttagtaaaaactaggtttgtttcacttctgaggtgtcttattaatgtacttcatctgagaatttgttgatcttaatgttcgagctatataagaactgccattaaaaaaaatgggataatagatgattttatcagtatacctgtggaatatgtacaaactggatctatagatattttgaactggaccaggtgggtattgaagtaacccatcaaaatatgctctgcagtgattccgcttaatgtttaaattcagtaacgtacttgaaaggcaaatttcagtgcttttgtatgttggaggagggcttactgatgcgtgctaagaccgatttctgattgagggatgaaccttgggctcatttttttcttgtgaagtctctttctagaaaattttttggttttgttctttttaaaaaatacatacttttttgaatgtatcatgtcttcattaacaacagaaaatccacatggtgtttactaaacttgtttacgacattaaaaatttcctttttatttttagtagcccaggttgagtttttcacaagagatttttttcttagctgaggtatagttgtatagcaagaagaattaagccagatttttgtgtgtggaaagacagttttctatccacgtctttttctgtttgtcagaaggtgggagtatggtccaaataaatccattaggttactcctgcagcatgcgcttttagcttctctcttgactgaggatcaaatatccctttgtgagctggccctcagctcctttgctcatgtgtacaaacctcagatgttactacattttatatctaccagagctattcaagcaatagtatttgaaccactagccttttaaataaaattctgccccattactgatgtgcagatattgagttcactttcattttttgccagatttctttgcactactttaggtaaaaatagttaatctatttttctttgacatcctagtttgcgtcagtgacagaacttactgcttagtctttgtactttttaaaaaatctataaatttaatgcactgtccaagtgaaatgtcctagttgtcattgtgattaaggggccaactttccaggcagctagcagagatactattctcttcctctcccagcaaatttgtattccttcgcccacgcattcctgctatactagatggcagccagtgatggaactataaagatgtctgtggtcatatgttgaatgtggcagcttgaagatgtactgccacgggtgatctagggcaggctgtcttccagtccatgtgttctcggtcgccgtagacagcgctctggctaccaccgtgaggctacttgaactgtcaggggcatctgcctaaaccagaatcttttgtcagaaaccttaacccaacaaaacaaatcttgagtagctcatgcccggctcttaggaattttgtctgtttaaaaaaaaaaaaaaaaaaaagtccaacttactttattttatttttttaacctagtcactgtttacaattgtatgctaaagcctgaaatattgtctgtgctgtggtgtatgagcattgccaactttatatttattgcagtgaagaagaaactaaaaatatatggaaatgaggagcatgtccaagctcctaaatccgtgtgggtgcatgtgggagaagtgagttagggcctcttgaaaggaggctttttggagaggggtcccccaggtttcttggtgttcctgcttggggatcactgctgctagctgactggacctccccattggaagtttgtgattttgctttggcaaagtttcattgactagtagaactcattctgttttagtgtatatttcaatataaatgtaaacattttgctcaaaaaacaaaaaaaaaaaaaaaaanaacaaaaaaaaaa

SEQ ID NO: 62365 - DNA, 2502 bp, Homo sapiens
  misc_feature (2200)..(2200): n is a, c, g, or t
  misc_feature (2489)..(2489): n is a, c, g, or t
tggttcttgttgacattacaagcttttaacacatttttgacctaggagccctgttgctggaagtatagtctccagccagttactctcatgatagtactgctataaaactcattcttgtgtggtgttctgtgctatagagtctgtgtattgctgttcatattcggagttctggttttgtttttcccttaaaacctgttaacagttttttttgggggtggggggattcagaactcttgtttcccattccatagcacctgacattatttcaagttttataatatcttaaggtgtatattttattttttttattggcttagttgttttttgttttgttttgtttgagatggagtttcactgttgcccaggctggggtgcaatggtgtgatcttggctcactgcagcctccacctcccgagttcaaatgattctcctgcctcagcttcctgagtagctgggattacaggtgcatgccaccatgcccggctaatttttatatttttattagagacgggatttcgccatgttaaccaggctggtctcgaactcctgacctcaggtgatctgcccgccttggcctcccaaagtgctgggattacaggcatgagccaccatgcctggccttattggcttagtttttaaattatcctccaaaaattttgggcctttttctgtggggaaacaagtgaagctgctcttcagcatagacactacctttatcccatcattttagtaaaaactaggtttgtttcacttctgaggtgtcttattaatgtacttcatctgagaatttgttgatcttaatgttcgagctatataagaactgccattaaaaaaaatgggataatagatgattttatcagtatacctgtggaatatgtacaaactggatctatagatattttgaactggaccaggtgggtattgaagtaacccatcaaaatatgctctgcagtgattccgcttaatgtttaaattcagtaacgtacttgaaaggcaaatttcagtgcttttgtatgttggaggagggcttactgatgcgtgctaagaccgatttctgattgagggatgaaccttgggctcatttttttcttgtgaagtctctttctagaaaattttttggttttgttctttttaaaaaatacatacttttttgaatgtatcatgtcttcattaacaacagaaaatccacatggtgtttactaaacttgtttacgacattaaaaatttcctttttatttttagtagcccaggttgagtttttcacaagagatttttttcttagctgaggtatagttgtatagcaagaagaattaagccagatttttgtgtgtggaaagacagttttctatccacgtctttttctgtttgtcagaaggtgggagtatggtccaaataaatccattaggttactcctgcagcatgcgcttttagcttctctcttgactgaggatcaaatatccctttgtgagctggccctcagctcctttgctcatgtgtacaaacctcagatgttactacattttatatctaccagagctattcaagcaatagtatttgaaccactagccttttaaataaaattctgccccattactgatgtgcagatattgagttcactttcattttttgccagatttctttgcactactttaggtaaaaatagttaatctatttttctttgacatcctagtttgcgtcagtgacagaacttactgcttagtctttgtactttttaaaaaatctataaatttaatgcactgtccaagtgaaatgtcctagttgtcattgtgattaaggggccaactttccaggcagctagcagagatactattctcttcctctcccagcaaatttgtattccttcgcccacgcattcctgctatactagatggcagccagtgatggaactataaagatgtctgtggtcatatgttgaatgtggcagcttgaagatgtactgccacgggtgatctagggcaggctgtcttccagtccatgtgttctcggtcgccgtagacagcgctctggctaccaccgtgaggctacttgaactgtcaggggcatctgcctaaaccagaatcttttgtcagaaaccttaacccaacaaaacaaatcttgagtagctcatgcccggctcttaggaattttgtctgtttaaaaaaaaaaaaaaaaaaaagtccaacttactttcttcccacantgcacccacacgggatttaggagctgggacattgctaaatccgtgtgggtgcatgtgggagaagtgagttagggcctcttgaaaggaggctttttggagaggggtcccccaggtttcttggtgttcctgcttggggatcactgctgctagctgactggacctccccattggaagtttgtgattttgctttggcaaagtttcattgactagtagaactcattctgttttagtgtatatttcaatataaatgtaaacattttgctcaaaaaacaaaaaaaaaaaaaaaaanaacaaaaaaaaaa

SEQ ID NO: 62366 - DNA, 2466 bp, Homo sapiens
  misc_feature (2200)..(2200): n is a, c, g, or t
tggttcttgttgacattacaagcttttaacacatttttgacctaggagccctgttgctggaagtatagtctccagccagttactctcatgatagtactgctataaaactcattcttgtgtggtgttctgtgctatagagtctgtgtattgctgttcatattcggagttctggttttgtttttcccttaaaacctgttaacagttttttttgggggtggggggattcagaactcttgtttcccattccatagcacctgacattatttcaagttttataatatcttaaggtgtatattttattttttttattggcttagttgttttttgttttgttttgtttgagatggagtttcactgttgcccaggctggggtgcaatggtgtgatcttggctcactgcagcctccacctcccgagttcaaatgattctcctgcctcagcttcctgagtagctgggattacaggtgcatgccaccatgcccggctaatttttatatttttattagagacgggatttcgccatgttaaccaggctggtctcgaactcctgacctcaggtgatctgcccgccttggcctcccaaagtgctgggattacaggcatgagccaccatgcctggccttattggcttagtttttaaattatcctccaaaaattttgggcctttttctgtggggaaacaagtgaagctgctcttcagcatagacactacctttatcccatcattttagtaaaaactaggtttgtttcacttctgaggtgtcttattaatgtacttcatctgagaatttgttgatcttaatgttcgagctatataagaactgccattaaaaaaaatgggataatagatgattttatcagtatacctgtggaatatgtacaaactggatctatagatattttgaactggaccaggtgggtattgaagtaacccatcaaaatatgctctgcagtgattccgcttaatgtttaaattcagtaacgtacttgaaaggcaaatttcagtgcttttgtatgttggaggagggcttactgatgcgtgctaagaccgatttctgattgagggatgaaccttgggctcatttttttcttgtgaagtctctttctagaaaattttttggttttgttctttttaaaaaatacatacttttttgaatgtatcatgtcttcattaacaacagaaaatccacatggtgtttactaaacttgtttacgacattaaaaatttcctttttatttttagtagcccaggttgagtttttcacaagagatttttttcttagctgaggtatagttgtatagcaagaagaattaagccagatttttgtgtgtggaaagacagttttctatccacgtctttttctgtttgtcagaaggtgggagtatggtccaaataaatccattaggttactcctgcagcatgcgcttttagcttctctcttgactgaggatcaaatatccctttgtgagctggccctcagctcctttgctcatgtgtacaaacctcagatgttactacattttatatctaccagagctattcaagcaatagtatttgaaccactagccttttaaataaaattctgccccattactgatgtgcagatattgagttcactttcattttttgccagatttctttgcactactttaggtaaaaatagttaatctatttttctttgacatcctagtttgcgtcagtgacagaacttactgcttagtctttgtactttttaaaaaatctataaatttaatgcactgtccaagtgaaatgtcctagttgtcattgtgattaaggggccaactttccaggcagctagcagagatactattctcttcctctcccagcaaatttgtattccttcgcccacgcattcctgctatactagatggcagccagtgatggaactataaagatgtctgtggtcatatgttgaatgtggcagcttgaagatgtactgccacgggtgatctagggcaggctgtcttccagtccatgtgttctcggtcgccgtagacagcgctctggctaccaccgtgaggctacttgaactgtcaggggcatctgcctaaaccagaatcttttgtcagaaaccttaacccaacaaaacaaatcttgagtagctcatgcccggctcttaggaattttgtctgtttaaaaaaaaaaaaaaaaaaaagtccaacttactttcttcccacantgcacccacacgggatttaggagctgggacattgctaaatccgtgtgggtgcatgtgggagaagtgagttagggcctcttgaaaggaggctttttggagaggggtcccccaggtttcttggtgttcctgcttggggatcactgctgctagctgactggacctccccattggaagtttgtgattttgctttggcaaagtttcattgactagtagaactcattctgttttagtgtatatttcaatataaatgtaaacattttgctcaa

SEQ ID NO: 62367 - DNA, 2579 bp, Homo sapiens
tggttcttgttgacattacaagcttttaacacatttttgacctaggagccctgttgctggaagtatagtctccagccagttactctcatgatagtactgctataaaactcattcttgtgtggtgttctgtgctatagagtctgtgtattgctgttcatattcggagttctggttttgtttttcccttaaaacctgttaacagttttttttgggggtggggggattcagaactcttgtttcccattccatagcacctgacattatttcaagttttataatatcttaaggtgtatattttattttttttattggcttagttgttttttgttttgttttgtttgagatggagtttcactgttgcccaggctggggtgcaatggtgtgatcttggctcactgcagcctccacctcccgagttcaaatgattctcctgcctcagcttcctgagtagctgggattacaggtgcatgccaccatgcccggctaatttttatatttttattagagacgggatttcgccatgttaaccaggctggtctcgaactcctgacctcaggtgatctgcccgccttggcctcccaaagtgctgggattacaggcatgagccaccatgcctggccttattggcttagtttttaaattatcctccaaaaattttgggcctttttctgtggggaaacaagtgaagctgctcttcagcatagacactacctttatcccatcattttagtaaaaactaggtttgtttcacttctgaggtgtcttattaatgtacttcatctgagaatttgttgatcttaatgttcgagctatataagaactgccattaaaaaaaatgggataatagatgattttatcagtatacctgtggaatatgtacaaactggatctatagatattttgaactggaccaggtgggtattgaagtaacccatcaaaatatgctctgcagtgattccgcttaatgtttaaattcagtaacgtacttgaaaggcaaatttcagtgcttttgtatgttggaggagggcttactgatgcgtgctaagaccgatttctgattgagggatgaaccttgggctcatttttttcttgtgaagtctctttctagaaaattttttggttttgttctttttaaaaaatacatacttttttgaatgtatcatgtcttcattaacaacagaaaatccacatggtgtttactaaacttgtttacgacattaaaaatttcctttttatttttagtagcccaggttgagtttttcacaagagatttttttcttagctgaggtatagttgtatagcaagaagaattaagccagatttttgtgtgtggaaagacagttttctatccacgtctttttctgtttgtcagaaggtgggagtatggtccaaataaatccattaggttactcctgcagcatgcgcttttagcttctctcttgactgaggatcaaatatccctttgtgagctggccctcagctcctttgctcatgtgtacaaacctcagatgttactacattttatatctaccagagctattcaagcaatagtatttgaaccactagccttttaaataaaattctgccccattactgatgtgcagatattgagttcactttcattttttgccagatttctttgcactactttaggtaaaaatagttaatctatttttctttgacatcctagtttgcgtcagtgacagaacttactgcttagtctttgtactttttaaaaaatctataaatttaatgcactgtccaagtgaaatgtcctagttgtcattgtgattaaggggccaactttccaggcagctagcagagatactattctcttcctctcccagcaaatttgtattccttcgcccacgcattcctgctatactagatggcagccagtgatggaactataaagatgtctgtggtcatatgttgaatgtggcagcttgaagatgtactgccacgggtgatctagggcaggctgtcttccagtccatgtgttctcggtcgccgtagacagcgctctggctaccaccgtgaggctacttgaactgtcaggggcatctgcctaaaccagaatcttttgtcagaaaccttaacccaacaaaacaaatcttgagtagctcatgcccggctcttaggaattttgtctgtttaaaaaaaaaaaaaaaaaaaagtccaacttactttattttatttttttaacctagtcactgtttacaattgtatgctaaagcctgaaatattgtctgtgctgtggtgtatgagcattgccaactttatatttattgcagtgaagaagaaactaaaaatatatggaaatgaggagcatgtccaagctccgtagtgagggtacataagagatgatcacgatgacgcccttctttcacacgaccctttgtaataaggtgaacaacagattcaaagagcgatatcgtcgtaggtatttgaacaaactgtcatatgtatgggacctacgctagatttatattctttacactagcattttgcatttaataggttacaatgtctgttttagtgtatctttcaaaataaatgaaaacattttgctcaaaaaa

SEQ ID NO: 62368 - DNA, 2298 bp, Homo sapiens
ggtcagacaggctggtgtgaatcggacgaggctcacactgtaattctagcactttggcaggctgaggcaggaagatccctgttgcccaggctggggtgcaatggtgtgatcttggctcactgcagcctccacctcccgagttcaaatgattctcctgcctcagcttcctgagtagctgggattacaggtgcatgccaccatgcccggctaatttttatatttttattagagacgggatttcgccatgttaaccaggctggtctcgaactcctgacctcaggtgatctgcccgccttggcctcccaaagtgctgggattacaggcatgagccaccatgcctggccttattggcttagtttttaaattatcctccaaaaattttgggcctttttctgtggggaaacaagtgaagctgctcttcagcatagacactacctttatcccatcattttagtaaaaactaggtttgtttcacttctgaggtgtcttattaatgtacttcatctgagaatttgttgatcttaatgttcgagctatataagaactgccattaaaaaaaatgggataatagatgattttatcagtatacctgtggaatatgtacaaactggatctatagatattttgaactggaccaggtgggtattgaagtaacccatcaaaatatgctctgcagtgattccgcttaatgtttaaattcagtaacgtacttgaaaggcaaatttcagtgcttttgtatgttggaggagggcttactgatgcgtgctaagaccgatttctgattgagggatgaaccttgggctcatttttttcttgtgaagtctctttctagaaaattttttggttttgttctttttaaaaaatacatacttttttgaatgtatcatgtcttcattaacaacagaaaatccacatggtgtttactaaacttgtttacgacattaaaaatttcctttttatttttagtagcccaggttgagtttttcacaagagatttttttcttagctgaggtatagttgtatagcaagaagaattaagccagatttttgtgtgtggaaagacagttttctatccacgtctttttctgtttgtcagaaggtgggagtatggtccaaataaatccattaggttactcctgcagcatgcgcttttagcttctctcttgactgaggatcaaatatccctttgtgagctggccctcagctcctttgctcatgtgtacaaacctcagatgttactacattttatatctaccagagctattcaagcaatagtatttgaaccactagccttttaaataaaattctgccccattactgatgtgcagatattgagttcactttcattttttgccagatttctttgcactactttaggtaaaaatagttaatctatttttctttgacatcctagtttgcgtcagtgacagaacttactgcttagtctttgtactttttaaaaaatctataaatttaatgcactgtccaagtgaaatgtcctagttgtcattgtgattaaggggccaactttccaggcagctagcagagatactattctcttcctctcccagcaaatttgtattccttcgcccacgcattcctgctatactagatggcagccagtgatggaactataaagatgtctgtggtcatatgttgaatgtggcagcttgaagatgtactgccacgggtgatctagggcaggctgtcttccagtccatgtgttctcggtcgccgtagacagcgctctggctaccaccgtgaggctacttgaactgtcaggggcatctgcctaaaccagaatcttttgtcagaaaccttaacccaacaaaacaaatcttgagtagctcatgcccggctcttaggaattttgtctgtttaaaaaaaaaaaaaaaaaaaagtccaacttactttattttatttttttaacctagtcactgtttacaattgtatgctaaagcctgaaatattgtctgtgctgtggtgtatgagcattgccaactttatatttattgcagtgaagaagaaactaaaaatatatggaaatgaggagcatgtccaagctcctaaatccgtgtgggtgcatgtgggagaagtgagttagggcctcttgaaaggaggctttttggagaggggtcccccaggtttcttggtgttcctgcttggggatcactgctgctagctgactggacctccccattggaagtttgtgattttgctttggcaaagtttcattgactagtagaactcattctgttttagtgtatatttcaatataaatgtaaacattttgctcaa

SEQ ID NO: 62369 - DNA, 2520 bp, Homo sapiens
tggttcttgttgacattacaagcttttaacacatttttgacctaggagccctgttgctggaagtatagtctccagccagttactctcatgatagtactgctataaaactcattcttgtgtggtgttctgtgctatagagtctgtgtattgctgttcatattcggagttctggttttgtttttcccttaaaacctgttaacagttttttttgggggtggggggattcagaactcttgtttcccattccatagcacctgacattatttcaagttttataatatcttaaggtgtatattttattttttttattggcttagttgttttttgttttgttttgtttgagatggagtttcactgttgcccaggctggggtgcaatggtgtgatcttggctcactgcagcctccacctcccgagttcaaatgattctcctgcctcagcttcctgagtagctgggattacaggtgcatgccaccatgcccggctaatttttatatttttattagagacgggatttcgccatgttaaccaggctggtctcgaactcctgacctcaggtgatctgcccgccttggcctcccaaagtgctgggattacaggcatgagccaccatgcctggccttattggcttagtttttaaattatcctccaaaaattttgggcctttttctgtggggaaacaagtgaagctgctcttcagcatagacactacctttatcccatcattttagtaaaaactaggtttgtttcacttctgaggtgtcttattaatgtacttcatctgagaatttgttgatcttaatgttcgagctatataagaactgccattaaaaaaaatgggataatagatgattttatcagtatacctgtggaatatgtacaaactggatctatagatattttgaactggaccaggtgggtattgaagtaacccatcaaaatatgctctgcagtgattccgcttaatgtttaaattcagtaacgtacttgaaaggcaaatttcagtgcttttgtatgttggaggagggcttactgatgcgtgctaagaccgatttctgattgagggatgaaccttgggctcatttttttcttgtgaagtctctttctagaaaattttttggttttgttctttttaaaaaatacatacttttttgaatgtatcatgtcttcattaacaacagaaaatccacatggtgtttactaaacttgtttacgacattatttcttagctgaggtatagttgtatagcaagaagaattaagccagatttttgtgtgtggaaagacagttttctatccacgtctttttctgtttgtcagaaggtgggagtatggtccaaataaatccattaggttactcctgcagcatgcgcttttagcttctctcttgactgaggatcaaatatccctttgtgagctggccctcagctcctttgctcatgtgtacaaacctcagatgttactacattttatatctaccagagctattcaagcaatagtatttgaaccactagccttttaaataaaattctgccccattactgatgtgcagatattgagttcactttcattttttgccagatttctttgcactactttaggtaaaaatagttaatctatttttctttgacatcctagtttgcgtcagtgacagaacttactgcttagtctttgtactttttaaaaaatctataaatttaatgcactgtccaagtgaaatgtcctagttgtcattgtgattaaggggccaactttccaggcagctagcagagatactattctcttcctctcccagcaaatttgtattccttcgcccacgcattcctgctatactagatggcagccagtgatggaactataaagatgtctgtggtcatatgttgaatgtggcagcttgaagatgtactgccacgggtgatctagggcaggctgtcttccagtccatgtgttctcggtcgccgtagacagcgctctggctaccaccgtgaggctacttgaactgtcaggggcatctgcctaaaccagaatcttttgtcagaaaccttaacccaacaaaacaaatcttgagtagctcatgcccggctcttaggaattttgtctgtttaaaaaaaaaaaaaaaaaaaagtccaacttactttattttatttttttaacctagtcactgtttacaattgtatgctaaagcctgaaatattgtctgtgctgtggtgtatgagcattgccaactttatatttattgcagtgaagaagaaactaaaaatatatggaaatgaggagcatgtccaagctcctaaatccgtgtgggtgcatgtgggagaagtgagttagggcctcttgaaaggaggctttttggagaggggtcccccaggtttcttggtgttcctgcttggggatcactgctgctagctgactggacctccccattggaagtttgtgattttgctttggcaaagtttcattgactagtagaactcattctgttttagtgtatatttcaatataaatgtaaacattttgctcaa

SEQ ID NO: 62370 - DNA, 2538 bp, Homo sapiens
tggttcttgttgacattacaagcttttaacacatttttgacctaggagccctgttgctggaagtatagtctccagccagttactctcatgatagtactgctataaaactcattcttgtgtggtgttctgtgctatagagtctgtgtattgctgttcatattcggagttctggttttgtttttcccttaaaacctgttaacagttttttttgggggtggggggattcagaactcttgtttcccattccatagcacctgacattatttcaagttttataatatcttaaggtgtatattttattttttttattggcttagttgttttttgttttgttttgtttgagatggagtttcactgttgcccaggctggggtgcaatggtgtgatcttggctcactgcagcctccacctcccgagttcaaatgattctcctgcctcagcttcctgagtagctgggattacaggtgcatgccaccatgcccggctaatttttatatttttattagagacgggatttcgccatgttaaccaggctggtctcgaactcctgacctcaggtgatctgcccgccttggcctcccaaagtgctgggattacaggcatgagccaccatgcctggccttattggcttagtttttaaattatcctccaaaaattttgggcctttttctgtggggaaacaagtgaagctgctcttcagcatagacactacctttatcccatcattttagtaaaaactaggtttgtttcacttctgaggtgtcttattaatgtacttcatctgagaatttgttgatcttaatgttcgagctatataagaactgccattaaaaaaaatgggataatagatgattttatcaatattttgaactggaccaggtgggtattgaagtaacccatcaaaatatgctctgcagtgattccgcttaatgtttaaattcagtaacgtacttgaaaggcaaatttcagtgcttttgtatgttggaggagggcttactgatgcgtgctaagaccgatttctgattgagggatgaaccttgggctcatttttttcttgtgaagtctctttctagaaaattttttggttttgttctttttaaaaaatacatacttttttgaatgtatcatgtcttcattaacaacagaaaatccacatggtgtttactaaacttgtttacgacattaaaaatttcctttttatttttagtagcccaggttgagtttttcacaagagatttttttcttagctgaggtatagttgtatagcaagaagaattaagccagatttttgtgtgtggaaagacagttttctatccacgtctttttctgtttgtcagaaggtgggagtatggtccaaataaatccattaggttactcctgcagcatgcgcttttagcttctctcttgactgaggatcaaatatccctttgtgagctggccctcagctcctttgctcatgtgtacaaacctcagatgttactacattttatatctaccagagctattcaagcaatagtatttgaaccactagccttttaaataaaattctgccccattactgatgtgcagatattgagttcactttcattttttgccagatttctttgcactactttaggtaaaaatagttaatctatttttctttgacatcctagtttgcgtcagtgacagaacttactgcttagtctttgtactttttaaaaaatctataaatttaatgcactgtccaagtgaaatgtcctagttgtcattgtgattaaggggccaactttccaggcagctagcagagatactattctcttcctctcccagcaaatttgtattccttcgcccacgcattcctgctatactagatggcagccagtgatggaactataaagatgtctgtggtcatatgttgaatgtggcagcttgaagatgtactgccacgggtgatctagggcaggctgtcttccagtccatgtgttctcggtcgccgtagacagcgctctggctaccaccgtgaggctacttgaactgtcaggggcatctgcctaaaccagaatcttttgtcagaaaccttaacccaacaaaacaaatcttgagtagctcatgcccggctcttaggaattttgtctgtttaaaaaaaaaaaaaaaaaaaagtccaacttactttattttatttttttaacctagtcactgtttacaattgtatgctaaagcctgaaatattgtctgtgctgtggtgtatgagcattgccaactttatatttattgcagtgaagaagaaactaaaaatatatggaaatgaggagcatgtccaagctcctaaatccgtgtgggtgcatgtgggagaagtgagttagggcctcttgaaaggaggctttttggagaggggtcccccaggtttcttggtgttcctgcttggggatcactgctgctagctgactggacctccccattggaagtttgtgattttgctttggcaaagtttcattgactagtagaactcattctgttttagtgtatatttcaatataaatgtaaacattttgctcaa

SEQ ID NO: 62371 - DNA, 2372 bp, Homo sapiens
tggttcttgttgacattacaagcttttaacacatttttgacctaggagccctgttgctggaagtatagtctccagccagttactctcatgatagtactgctataaaactcattcttgtgtggtgttctgtgctatagagtctgtgtattgctgttcatattcggagttctggttttgtttttcccttaaaacctgttaacagttttttttgggggtggggggattcagaactcttgtttcccattccatagcacctgacattatttcaagttttataatatcttaaggtgtatattttattttttttattggcttagttgttttttgttttgttttgtttgagatggagtttcactgttgcccaggctggggtgcaatggtgtgatcttggctcactgcagcctccacctcccgagttcaaatgattctcctgcctcagcttcctgagtagctgggattacaggtgcatgccaccatgcccggctaatttttatatttttattagagacgggatttcgccatgttaaccaggctggtctcgaactcctgacctcaggtgatctgcccgccttggcctcccaaagtgctgggattacaggcatgagccaccatgcctggccttattggcttagtttttaaattatcctccaaaaattttgggcctttttctgtggggaaacaagtgaagctgctcttcagcatagacactacctttatcccatcattttagtaaaaactaggtttgtttcacttctgaggtgtcttattaatgtacttcatctgagaatttgttgatcttcagtgcttttgtatgttggaggagggcttactgatgcgtgctaagaccgatttctgattgagggatgaaccttgggctcatttttttcttgtgaagtctctttctagaaaattttttggttttgttctttttaaaaaatacatacttttttgaatgtatcatgtcttcattaacaacagaaaatccacatggtgtttactaaacttgtttacgacattaaaaatttcctttttatttttagtagcccaggttgagtttttcacaagagatttttttcttagctgaggtatagttgtatagcaagaagaattaagccagatttttgtgtgtggaaagacagttttctatccacgtctttttctgtttgtcagaaggtgggagtatggtccaaataaatccattaggttactcctgcagcatgcgcttttagcttctctcttgactgaggatcaaatatccctttgtgagctggccctcagctcctttgctcatgtgtacaaacctcagatgttactacattttatatctaccagagctattcaagcaatagtatttgaaccactagccttttaaataaaattctgccccattactgatgtgcagatattgagttcactttcattttttgccagatttctttgcactactttaggtaaaaatagttaatctatttttctttgacatcctagtttgcgtcagtgacagaacttactgcttagtctttgtactttttaaaaaatctataaatttaatgcactgtccaagtgaaatgtcctagttgtcattgtgattaaggggccaactttccaggcagctagcagagatactattctcttcctctcccagcaaatttgtattccttcgcccacgcattcctgctatactagatggcagccagtgatggaactataaagatgtctgtggtcatatgttgaatgtggcagcttgaagatgtactgccacgggtgatctagggcaggctgtcttccagtccatgtgttctcggtcgccgtagacagcgctctggctaccaccgtgaggctacttgaactgtcaggggcatctgcctaaaccagaatcttttgtcagaaaccttaacccaacaaaacaaatcttgagtagctcatgcccggctcttaggaattttgtctgtttaaaaaaaaaaaaaaaaaaaagtccaacttactttattttatttttttaacctagtcactgtttacaattgtatgctaaagcctgaaatattgtctgtgctgtggtgtatgagcattgccaactttatatttattgcagtgaagaagaaactaaaaatatatggaaatgaggagcatgtccaagctcctaaatccgtgtgggtgcatgtgggagaagtgagttagggcctcttgaaaggaggctttttggagaggggtcccccaggtttcttggtgttcctgcttggggatcactgctgctagctgactggacctccccattggaagtttgtgattttgctttggcaaagtttcattgactagtagaactcattctgttttagtgtatatttcaatataaatgtaaacattttgctcaa

SEQ ID NO: 62372 - DNA, 2169 bp, Homo sapiens
tggttcttgttgacattacaagcttttaacacatttttgacctaggagccctgttgctggaagtatagtctccagccagttactctcatgatagtactgctataaaactcattcttgtgtggtgttctgtgctatagagtctgtgtattgctgttcatattcggagttctggttttgtttttcccttaaaacctgttaacagttttttttgggggtggggggattcagaactcttgtttcccattccatagcacctgacattatttcaagttttataatatcttaaggtgtatattttattttttttattggcttagttgttttttgttttgttttgtttgagatggagtttcactgttgcccaggctggggtgcaatggtgtgatcttggctcactgcagcctccacctcccgagttcaaatgattctcctgcctcagcttcctgagtagctgggattacaggtgcatgccaccatgcccggctaatttttatatttttattagagacgggatttcgccatgttaaccaggctggtctcgaactcctgacctcaggtgatctgcccgccttggcctcccaaagtgctgggattacaggcatgagccaccatgcctggccttattggcttagtttttaaattatcctccaaaaattttgggcctttttctgtggggaaacaagtgaagctgctcttcagcatagacactacctttatcccatcattttagtaaaaactaggtttgtttcacttctgaggtgtcttattaatgtacttcatctgagaatttgttgatcttaatgttcgagctatataagaactgccattaaaaaaaatgggataatagatgattttatcagtatacctgtggaatatgtacaaactggatctatagatattttgaactggaccaggtgggtattgaagtaacccatcaaaatatgctctgcagtgattccgcttaatgtttaaattcagtaacgtacttgaaaggcaaatttcagtgcttttgtatgttggaggagggcttactgatgcgtgctaagaccgatttctgattgagggatgaaccttgggctcatttttttcttgtgaagtctctttctagaaaattttttggttttgttctttttaaaaaatacatacttttttgaatgtatcatgtcttcattaacaacagaaaatccacatggtgtttactaaacttgtttacgacattaaaaatttcctttttatttttagtagcccaggttgagtttttcacaagagatttttttcttagctgaggtatagttgtatagcaagaagaattaagccagatttttgtgtgtggaaagacagttttctatccacgtctttttctgtttgtcagaaggtgggagtatggtccaaataaatccattaggttactcctgcagcatgcgcttttagcttctctcttgactgaggatcaaatatccctttgtgagctggccctcagctcctttgctcatgtgtacaaacctcagatgttactacattttatatctaccagagctattcaagcaatagtatttgaaccactagccttttaaataaaattctgccccattactgatgtgcagatattgagttcactttcattttttgccagatttctttgcactactttaggtaaaaatagttaatctatttttctttgacatcctagtttgcgtcagtgacagaacttactgcttagtctttgtactttttaaaaaatctataaatttaatgcactgtccaagtgaaatgtcctagttgtcattgtgattaaggggccaactttccaggcagctagcagagatactattctcttcctctcccagcaaatttgtattccttcgcccacgcattcctgctatactagatggcagccagtgatggaactataaagatgtctgtggtcatatgttgaatgtggcagcttgaagatgtactgccacgggtgatctagggcaggctgtcttccagtccatgtgttctcggtcgccgtagacagcgctctggctaccaccgtgaggctacttgaactgtcaggggcatctgcctaaaccagaatcttttgtcagaaaccttaacccaacaaaacaaatcttgagtagctcatgcccggctcttaggaatttgggcgtacaggcgccaacaggg

SEQ ID NO: 62373 - DNA, 1358 bp, Homo sapiens
cggacgcgtgggtcgacccacgcgtcgaccccaggttgagtttttcacaagagatttttttcttagctgaggtatagttgtatagcaagaagaattaagccagatttttgtgtgtggaaagacagttttctatccacgtctttttctgtttgtcagaaggtgggagtatggtccaaataaatccattaggttactcctgcagcatgcgcttttagcttctctcttgactgaggatcaaatatccctttgtgagctggccctcagctcctttgctcatgtgtacaaacctcagatgttactacattttatatctaccagagctattcaagcaatagtatttgaaccactagccttttaaataaaattctgccccattactgatgtgcagatattgagttcactttcattttttgccagatttctttgcactactttaggtaaaaatagttaatctatttttctttgacatcctagtttgcgtcagtgacagaacttactgcttagtctttgtactttttaaaaaatctataaatttaatgcactgtccaagtgaaatgtcctagttgtcattgtgattaaggggccaactttccaggcagctagcagagatactattctcttcctctcccagcaaatttgtattccttcgcccacgcattcctgctatactagatggcagccagtgatggaactataaagatgtctgtggtcatatgttgaatgtggcagcttgaagatgtactgccacgggtgatctagggcaggctgtcttccagtccatgtgttctcggtcgccgtagacagcgctctggctaccaccgtgaggctacttgaactgtcaggggcatctgcctaaaccagaatcttttgtcagaaaccttaacccaacaaaacaaatcttgagtagctcatgcccggctcttaggaattttgtctgtttaaaaaaaaaaaaaaaaaaaagtccaacttactttattttatttttttaacctagtcactgtttacaattgtatgctaaagcctgaaatattgtctgtgctgtggtgtatgagcattgccaactttatatttattgcagtgaagaagaaactaaaaatatatggaaatgaggagcatgtccaagctcctaaatccgtgtgggtgcatgtgggagaagtgagttagggcctcttgaaaggaggctttttggagaggggtcccccaggtttcttggtgttcctgcttggggatcactgctgctagctgactggacctccccattggaagtttgtgattttgctttggcaaagtttcattgactagtagaactcattctgttttagtgtatatttcaatataaatgtaaacattttgctcaa

SEQ ID NO: 62374 - DNA, 2098 bp, Homo sapiens
tggttcttgttgacattacaagcttttaacacatttttgacctaggagccctgttgctggaagtatagtctccagccagttactctcatgatagtactgctataaaactcattcttgtgtggtgttctgtgctatagagtctgtgtattgctgttcatattcggagttctggttttgtttttcccttaaaacctgttaacagttttttttgggggtggggggattcagaactcttgtttcccattccatagcacctgacattatttcaagttttataatatcttaaggtgtatattttattttttttattggcttagttgttttttgttttgttttgtttgagatggagtttcactgttgcccaggctggggtgcaatggtgtgatcttggctcactgcagcctccacctcccgagttcaaatgattctcctgcctcagcttcctgagtagctgggattacaggtgcatgccaccatgcccggctaatttttatatttttattagagacgggatttcgccatgttaaccaggctggtctcgaactcctgacctcaggtgatctgcccgccttggcctcccaaagtgctgggattacaggcatgagccaccatgcctggccttattggcttagtttttaaattatcctccaaaaattttgggcctttttctgtggggaaacaagtgaagctgctcttcagcatagacactacctttatcccatcattttagtaaaaactaggtttgtttcacttctgaggtgtcttattaatgtacttcatctgagaatttgttgatcttaatgttcgagctatataagaactgccattaaaaaaaatgggataatagatgattttatcagtatacctgtggaatatgtacaaactggatctatagatattttgaactggaccaggtgggtattgaagtaacccatcaaaatatgctctgcagtgattccgcttaatgtttaaattcagtaacgtacttgaaaggcaaatttcagtgcttttgtatgttggaggagggcttactgatgcgtgctaagaccgatttctgattgagggatgaaccttgggctcatttttttcttgtgaagtctctttctagaaaattttttggttttgttctttttaaaaaatacatacttttttgaatgtatcatgtcttcattaacaacagaaaatccacatggtgtttactaaacttgtttacgacattaaaaatttcctttttatttttagtagcccaggttgagtttttcacaagagatttttttcttagctgaggtatagttgtatagcaagaagaattaagccagatttttgtgtgtggaaagacagttttctatccacgtctttttctgtttgtcagaaggtgggagtatggtccaaataaatccattaggttactcctgcagcatgcgcttttagcttctctcttgactgaggatcaaatatccctttgtgagctggccctcagctcctttgctcatgtgtacaaacctcagatgttactacattttatatctaccagagctattcaagcaatagtatttgaaccactagccttttaaataaaattctgccccattactgatgtgcagatattgagttcactttcattttttgccagatttctttgcactactttaggtaaaaatagttaatctatttttctttgacatcctagtttgcgtcagtgacagaacttactgcttagtctttgtactttttaaaaaatctataaatttaatgcactgtccaagtgaaatgtcctagttgtcattgtgattaaggggccaactttccaggcagctagcagagatactattctcttcctctcccagcaaatttgtattccttcgcccacgcattcctgctatactagatggcagccagtgatggaactataaagatgtctgtggtcatatgttgaatgtggcagcttgaagatgtactgccacgggtgatctagggcaggctgtcttccagtccatgtgttctcggtcgccgtagacagcgctctggctaccaccgtgaggctacttgaactgtcagggtcgacgcggccgcgaatttagtagtagtaggcggccgc

SEQ ID NO: 62375 - DNA, 1938 bp, Homo sapiens
tggttcttgttgacattacaagcttttaacacatttttgacctaggagccctgttgctggaagtatagtctccagccagttactctcatgatagtactgctataaaactcattcttgtgtggtgttctgtgctatagagtctgtgtattgctgttcatattcggagttctggttttgtttttcccttaaaacctgttaacagttttttttgggggtggggggattcagaactcttgtttcccattccatagcacctgacattatttcaagttttataatatcttaaggtgtatattttattttttttattggcttagttgttttttgttttgttttgtttgagatggagtttcactgttgcccaggctggggtgcaatggtgtgatcttggctcactgcagcctccacctcccgagttcaaatgattctcctgcctcagcttcctgagtagctgggattacaggtgcatgccaccatgcccggctaatttttatatttttattagagacgggatttcgccatgttaaccaggctggtctcgaactcctgacctcaggtgatctgcccgccttggcctcccaaagtgctgggattacaggcatgagccaccatgcctggccttattggcttagtttttaaattatcctccaaaaattttgggcctttttctgtggggaaacaagtgaagctgctcttcagcatagacactacctttatcccatcattttagtaaaaactaggtttgtttcacttctgaggtgtcttattaatgtacttcatctgagaatttgttgatcttaatgttcgagctatataagaactgccattaaaaaaaatgggataatagatgattttatcagtatacctgtggaatatgtacaaactggatctatagatattttgaactggaccaggtgggtattgaagtaacccatcaaaatatgctctgcagtgattccgcttaatgtttaaattcagtaacgtacttgaaaggcaaatttcagtgcttttgtatgttggaggagggcttactgatgcgtgctaagaccgatttctgattgagggatgaaccttgggctcatttttttcttgtgaagtctctttctagaaaattttttggttttgttctttttaaaaaatacatacttttttgaatgtatcatgtcttcattaacaacagaaaatccacatggtgtttactaaacttgtttacgacattaaaaatttcctttttatttttagtagcccaggttgagtttttcacaagagatttttttcttagctgaggtatagttgtatagcaagaagaattaagccagatttttgtgtgtggaaagacagttttctatccacgtctttttctgtttgtcagaaggtgggagtatggtccaaataaatccattaggttactcctgcagcatgcgcttttagcttctctcttgactgaggatcaaatatccctttgtgagctggccctcagctcctttgctcatgtgtacaaacctcagatgttactacattttatatctaccagagctattcaagcaatagtatttgaaccactagccttttaaataaaattctgccccattactgatgtgcagatattgagttcactttcattttttgccagatttctttgcactactttaggtaaaaatagttaatctatttttctttgacatcctagtttgcgtcagtgacagaacttactgcttagtctttgtactttttaaaaaatctataaatttaatgcactgtccaagtgaaatgtcctagttgtcattgtgattaaggggccaactttccaggcagctagcagagatactattctcttcctctcccagcaaatttgtattccttcgcccacgcagtccagccgagagctagatggacacacaggggacggcgatttaacaacaggaaacgaggtaaacc

SEQ ID NO: 62376 - DNA, 1102 bp, Homo sapiens
aagcatggtatcaacgcgcagggcccattacggccgatgttactacattttatatctaccagagctattcaagcaatagtatttgaaccactagccttttaaataaaattctgccccattactgatgtgcagatattgagttcactttcattttttgccagatttctttgcactactttaggtaaaaatagttaatctatttttctttgacatcctagtttgcgtcagtgacagaacttactgcttagtctttgtactttttaaaaaatctataaatttaatgcactgtccaagtgaaatgtcctagttgtcattgtgattaaggggccaactttccaggcagctagcagagatactattctcttcctctcccagcaaatttgtattccttcgcccacgcattcctgctatactagatggcagccagtgatggaactataaagatgtctgtggtcatatgttgaatgtggcagcttgaagatgtactgccacgggtgatctagggcaggctgtcttccagtccatgtgttctcggtcgccgtagacagcgctctggctaccaccgtgaggctacttgaactgtcaggggcatctgcctaaaccagaatcttttgtcagaaaccttaacccaacaaaacaaatcttgagtagctcatgcccggctcttaggaattttgtctgtttaaaaaaaaaaaaaaaaaaaagtccaacttactttattttatttttttaacctagtcactgtttacaattgtatgctaaagcctgaaatattgtctgtgctgtggtgtatgagcattgccaactttatatttattgcagtgaagaagaaactaaaaatatatggaaatgaggagcatgtccaagctcctaaatccgtgtgggtgcatgtgggagaagtgagttagggcctcttgaaaggaggctttttggagaggggtcccccaggtttcttggtgttcctgcttggggatcactgctgctagctgactggacctccccattggaagtttgtgattttgctttggcaaagtttcattgactagtagaactcattctgttttagtgtatatttcaatataaatgtaaacattttgctcaa

SEQ ID NO: 62377 - DNA, 1741 bp, Homo sapiens
tggttcttgttgacattacaagcttttaacacatttttgacctaggagccctgttgctggaagtatagtctccagccagttactctcatgatagtactgctataaaactcattcttgtgtggtgttctgtgctatagagtctgtgtattgctgttcatattcggagttctggttttgtttttcccttaaaacctgttaacagttttttttgggggtggggggattcagaactcttgtttcccattccatagcacctgacattatttcaagttttataatatcttaaggtgtatattttattttttttattggcttagttgttttttgttttgttttgtttgagatggagtttcactgttgcccaggctggggtgcaatggtgtgatcttggctcactgcagcctccacctcccgagttcaaatgattctcctgcctcagcttcctgagtagctgggattacaggtgcatgccaccatgcccggctaatttttatatttttattagagacgggatttcgccatgttaaccaggctggtctcgaactcctgacctcaggtgatctgcccgccttggcctcccaaagtgctgggattacaggcatgagccaccatgcctggccttattggcttagtttttaaattatcctccaaaaattttgggcctttttctgtggggaaacaagtgaagctgctcttcagcatagacactacctttatcccatcattttagtaaaaactaggtttgtttcacttctgaggtgtcttattaatgtacttcatctgagaatttgttgatcttaatgttcgagctatataagaactgccattaaaaaaaatgggataatagatgattttatcagtatacctgtggaatatgtacaaactggatctatagatattttgaactggaccaggtgggtattgaagtaacccatcaaaatatgctctgcagtgattccgcttaatgtttaaattcagtaacgtacttgaaaggcaaatttcagtgcttttgtatgttggaggagggcttactgatgcgtgctaagaccgatttctgattgagggatgaaccttgggctcatttttttcttgtgaagtctctttctagaaaattttttggttttgttctttttaaaaaatacatacttttttgaatgtatcatgtcttcattaacaacagaaaatccacatggtgtttactaaacttgtttacgacattaaaaatttcctttttatttttagtagcccaggttgagtttttcacaagagatttttttcttagctgaggtatagttgtatagcaagaagaattaagccagatttttgtgtgtggaaagacagttttctatccacgtctttttctgtttgtcagaaggtgggagtatggtccaaataaatccattaggttactcctgcagcatgcgcttttagcttctctcttgactgaggatcaaatatccctttgtgagctggccctcagctcctttgctcatgtgtacaaacctcagatgttactacattttatatctaccagagctattcaagcaatagtatttgaaccactagccttttaaataaaattctgccccattactgatgtgcagatattgagttcactttcattttttgccagatttctttgcactactttaggtaaaaatagttaatctatttttctttgacatctttgtggagaataagttacaacacaggatggttatgatctagtcgactatgaata

SEQ ID NO: 62378 - DNA, 1058 bp, Homo sapiens
  misc_feature (13)..(13): n is a, c, g, or t
  misc_feature (18)..(18): n is a, c, g, or t
actagtccacggnttggnctggtggttcaacatggtatttgaaccactagccttttaaataaaattctgccccattactgatgtgcagatattgagttcactttcattttttgccagatttctttgcactactttaggtaaaaatagttaatctatttttctttgacatcctagtttgcgtcagtgacagaacttactgcttagtctttgtactttttaaaaaatctataaatttaatgcactgtccaagtgaaatgtcctagttgtcattgtgattaaggggccaactttccaggcagctagcagagatactattctcttcctctcccagcaaatttgtattccttcgcccacgcattcctgctatactagatggcagccagtgatggaactataaagatgtctgtggtcatatgttgaatgtggcagcttgaagatgtactgccacgggtgatctagggcaggctgtcttccagtccatgtgttctcggtcgccgtagacagcgctctggctaccaccgtgaggctacttgaactgtcaggggcatctgcctaaaccagaatcttttgtcagaaaccttaacccaacaaaacaaatcttgagtagctcatgcccggctcttaggaattttgtctgtttaaaaaaaaaaaaaaaaaaaagtccaacttactttattttatttttttaacctagtcactgtttacaattgtatgctaaagcctgaaatattgtctgtgctgtggtgtatgagcattgccaactttatatttattgcagtgaagaagaaactaaaaatatatggaaatgaggagcatgtccaagctcctaaatccgtgtgggtgcatgtgggagaagtgagttagggcctcttgaaaggaggctttttggagaggggtcccccaggtttcttggtgttcctgcttggggatcactgctgctagctgactggacctccccattggaagtttgtgattttgctttggcaaagtttcattgactagtagaactcattctgttttagtgtatatttcaatataaatgtaaacattttgctcaa

SEQ ID NO: 62379 - DNA, 1503 bp, Homo sapiens
  misc_feature (56)..(56): n is a, c, g, or t
  misc_feature (58)..(59): n is a, c, g, or t
cggacgcgtgggtcgacccacgcgtcgaccggaagtggaggagctgctgctggcangnnggggccggaggagggacgcgccggagcgggaccgacgggaccgagcgagcgaccgacgcgccacccgccgacgcctcagccgcttggggcccgcacggaccctctacttcagtgtagaatgagccaaggagactcaaacccagcagctattccgcatgcagcagaagatattcaaggagatgaccgatggatgtctcagcacaacagatttgttttggactgtaaagacaaagagcctgatgtactgttcgtgggagactccatggtgcagttaatgcagcaatatgagatatggcgagagcttttttccccacttcatgcactgaattttggaattgggggagatacaacaagacatgttttgtggagactaaagaatggagaactggagaatattaagcctaaggtcattgttgtctgggtaggaacaaataaccacgaaaatacagcagaagaagtagcaggtgggatcgaggccattgtacaacttatcaacacaaggcagccacaggccaaaatcattgtattgggtttgttacctcgaggtgagaaacccaatcctttgaggcaaaagaacgccaaggtgaaccaactcctcaaggtttcgctgccgaagcttgccaacgtgcagctcctggataccgacgggggttttgtgcactcggacggtgccatctcctgccacgacatgtttgattttctgcatctgacaggagggggctatgcaaagatctgcaaacccctgcatgaactgatcatgcagttgttggaggaaacacctgaggagaaacaaaccaccattgcctgactggctcttatcagtgttaatagcatctcagcttcctcagatcagttctatcactggcactacagaatccttctctttcttaaggcactttgcattgtagaatgttcctggatgttcatatctagtgtttgaaggggaggagggatttaaactggtcctgtacatagaaggtttgtttgacagaggagaaaaattagccaaggaagattgttgtttaaattcatttgaaaccagaaggggactttttagttgtatgtgtaacacattcattgaattattatcactgttttcttgggacaacatcaagcctaaatactgaacaatatgaagattcttttcttggcctttctgtggattatgtcatatataataattatcagaatcattctacttggctttaaaacatgttttctccaatttttttaaggttcataatttagccttttgtttttatgttgcttagattctgatgtatactgaatattttattaacatgtagcatcaggttgaacatgcttgtcattgatatatggaagatgctatagttagaagtgaatttgttctgctttcttaatcttttccaagcttagcagtgaaaaacaggttttgccccagtaaagggattttttggagggt

SEQ ID NO: 62380 - DNA, 967 bp, Homo sapiens
  misc_feature (56)..(56): n is a, c, g, or t
  misc_feature (58)..(59): n is a, c, g, or t
cggacgcgtgggtcgacccacgcgtcgaccggaagtggaggagctgctgctggcangnnggggccggaggagggacgcgccggagcgggaccgacgggaccgagcgagcgaccgacgcgccacccgccgacgcctcagccgcttggggcccgcacggaccctctacttcagtgtagaatgagccaaggagactcaaacccagcagctattccgcatgcagcagaagatattcaaggagatgaccgatggatgtctcagcacaacagatttgttttggactgtaaagacaaagagcctgatgtactgttcgtgggagactccatggtgcagttaatgcagcaatatgagatatggcgagagcttttttccccacttcatgcactgaattttggaattgggggagatacaacaagacatgttttgtggagactaaagaatggagaactggagaatattaagcctaaggtcattgttgtctgggtaggaacaaataaccacgaaaatacagcagaagaagtagcaggtgggatcgaggccattgtacaacttatcaacacaaggcagccacaggccaaaatcattgtattgggtttgttacctcgaggtgagaaacccaatcctttgaggcaaaagaacgccaaggtgaaccaactcctcaaggtttcgctgccgaagcttgccaacgtgcagctcctggataccgacgggggttttgtgcactcggacggtgccatctcctgccacgacatgtttgattttctgcatctgacaggagggggctatgcaaagatctgcaaacccctgcatgaactgatcatgcagttgttggaggaaacacctgaggagaaacaaaccaccattgcctgactggctcttatcagtgttaatagcatctcagcttcctcagatcagcgccattgcactccagcctgggcaacagagtgagactctgtctcagaaaaaaaaa

SEQ ID NO: 62381 - DNA, 1369 bp, Homo sapiens
  misc_feature (56)..(56): n is a, c, g, or t
  misc_feature (58)..(59): n is a, c, g, or t
cggacgcgtgggtcgacccacgcgtcgaccggaagtggaggagctgctgctggcangnnggggccggaggagggacgcgccggagcgggaccgacgggaccgagcgagcgaccgacgcgccacccgccgacgcctcagccgcttggggcccgcacggaccctctacttcagtgtagaatgagccaaggagactcaaacccagcagctattccgcatgcgcttttagcttctctcttgactgaggatcaaatatccctttgtgagctggccctcagctcctttgctcatgtgtacaaacctcagatgttactacattttatatctaccagagctattcaagcaatagtatttgaaccactagccttttaaataaaattctgccccattactgatgtgcagatattgagttcactttcattttttgccagatttctttgcactactttaggtaaaaatagttaatctatttttctttgacatcctagtttgcgtcagtgacagaacttactgcttagtctttgtactttttaaaaaatctataaatttaatgcactgtccaagtgaaatgtcctagttgtcattgtgattaaggggccaactttccaggcagctagcagagatactattctcttcctctcccagcaaatttgtattccttcgcccacgcattcctgctatactagatggcagccagtgatggaactataaagatgtctgtggtcatatgttgaatgtggcagcttgaagatgtactgccacgggtgatctagggcaggctgtcttccagtccatgtgttctcggtcgccgtagacagcgctctggctaccaccgtgaggctacttgaactgtcaggggcatctgcctaaaccagaatcttttgtcagaaaccttaacccaacaaaacaaatcttgagtagctcatgcccggctcttaggaattttgtctgtttaaaaaaaaaaaaaaaaaaaagtccaacttactttattttatttttttaacctagtcactgtttacaattgtatgctaaagcctgaaatattgtctgtgctgtggtgtatgagcattgccaactttatatttattgcagtgaagaagaaactaaaaatatatggaaatgaggagcatgtccaagctcctaaatccgtgtgggtgcatgtgggagaagtgagttagggcctcttgaaaggaggctttttggagaggggtcccccaggtttcttggtgttcctgcttggggatcactgctgctagctgactggacctccccattggaagtttgtgattttgctttggcaaagtttcattgactagtagaactcattctgttttagtgtatatttcaatataaatgtaaacattttgctcaa

SEQ ID NO: 62382 - DNA, 392 bp, Homo sapiens
gaacataaacatggcaacaacagacaccgaggactactagaagggagagcgggcagggcttcaaggtttggaaaactaacctcagcatcacaccaaacctcagcatcacacaatatacctgaaccaaacctcagcatcacacaatatacctgaataacaaacttcgacatggaccccagaatttaaaagctgaaaaaataataataatataaaatttcatactgaactccgttatcagtcctgaggaagacgataacataaaaacaagtagtatcacctttgtgttttctgtttataagctggtatctgcaacagggagatgtaggataaatgggtgtttggagaactgtcaacactgatgtttttatagtcttaggagtactaactctctt

SEQ ID NO: 62383 - DNA, 1958 bp, Homo sapiens
aggcacgagagaaagaaagagaaggaaagaaaataattcatcatgaaattgtatagaatactagcatttatgtcatgacctcgtaggtttagctctttgttagaaaaggaaaccatagaaagagacaagggagaaactgacaaactagggtgtttccgaaaaaaggctctcagtatcgggctcaagggcttgtgcccacatctgagcatgcagggaaatagatgtcccccactggctgcacatgtgagtgactgcggcacaaggctgtgatgtgaagagtcgtgacaccatttcctcacacctccacgcaatgccagatatgattcgacaacattcttcctgtcttataaaaagtgtttatctagcccgttggtttggcagatgaaatcaactaggcttttggcttgcttttactgagcatattcaaaaccatttcaggtcactatagtggtttgctcgggttgccataacaaagtaccacggactgagtggcttaaataacagaaatgtatttcctcacagttctggagatgggagtccaagatcaaggtgctggcagggtcgatcgcattctgaggcctctctccttggcttatagatggcgccttctcccttgtctgcacatggcctttcctccatgcatccgtgtcttaataccatcttcttagagggtcaccaggcattggatcagggccaccctaatggcctcatcttaactacctatatctgcaatgaccctatttctgaacaatttcacattgtgagattctgtgggttagaactggaacatatgaatttggtggtggtatatttttattataagtcaaacccaagtaaagatgtggggtaagattgtgtttaccaagcacaaagaaatggaaatttggggatgtgtaactctggagagcacagatgactaatctatttaatgtagggctccaggggatttgatgaggcctgtgaatcttccacttttattgcctctcttttccaatgacacccataaagaaaaaaaatggaatatccatgaacaggtgcagccaaggaggccaggcccgccatgtgtccactgtatactgtctcctagctcacaggaatgatactgatccactccttgtgctgctctttgtaaagtgatttcacatccattctctggtaatcatcatcacattccctgtgatgaggaattagcaccaattatagaggagaaaactggatctgacatttctcatctcatttgctctatacattaacctcttgcaaaaaatttgtgagtcttgcccaagacccattacaactaattaacggctgaactggtcgtctgatttcaaggccagaattaactttctactgcagctcatggatcagaggttttctttatttaaacaaacaaacaaaaaatcctttgaccgtagcccttgctataacgtttcccactgagttgagggagaaattgaaagtaaacttaggagctttttatagcttgtcaaaccatgcaagagtgggggaagcttatccatctgtggaattgatagaccaggaggaagtaactccggcttagataatgctaccattttgaataaatcaaatggtcttcttttccccttcatggtagttgctgcttaagtttctctaacatgcctgcagtaagtttccattaagaataggaaattaggctcggtacagtggctcacgtctgtagtcttagcactttgggagaccgaggagtgtggatcacttgaggtcaggagttcaagaccagcctggccaacatggtgaaacccccatctctactaaaaatacaaaaattagccaggcatagtggcatgcacctgtaatcccagctactcgagaggctgaggcaggagaatcacttgaaccagggagatggaggttgcagtgagccaagatcatgccactgcactccagcctgggcgatagactgagactctgtctca

SEQ ID NO: 62384 - DNA, 1904 bp, Homo sapiens
aggcacgagagaaagaaagagaaggaaagaaaataattcatcatgaaattgtatagaatactagcatttatgtcatgacctcgtaggtttagctctttgttagaaaaggaaaccatagaaagagacaagggagaaactgacaaactagggtgtttccgaaaaaaggctctcagtatcgggctcaagggcttgtgcccacatctgagcatgcagggaaatagatgtcccccactggctgcacatgtgagtgactgcggcacaaggctgtgatgtgaagagtcgtgacaccatttcctcacacctccacgcaatgccagatatgattcgacaacattcttcctgtcttataaaaagtgtttatctagcccgttggtttggcagatgaaatcaactaggcttttggcttgcttttactgagcatattcacggactgagtggcttaaataacagaaatgtatttcctcacagttctggagatgggagtccaagatcaaggtgctggcagggtcgatcgcattctgaggcctctctccttggcttatagatggcgccttctcccttgtctgcacatggcctttcctccatgcatccgtgtcttaataccatcttcttagagggtcaccaggcattggatcagggccaccctaatggcctcatcttaactacctatatctgcaatgaccctatttctgaacaatttcacattgtgagattctgtgggttagaactggaacatatgaatttggtggtggtatatttttattataagtcaaacccaagtaaagatgtggggtaagattgtgtttaccaagcacaaagaaatggaaatttggggatgtgtaactctggagagcacagatgactaatctatttaatgtagggctccaggggatttgatgaggcctgtgaatcttccacttttattgcctctcttttccaatgacacccataaagaaaaaaaatggaatatccatgaacaggtgcagccaaggaggccaggcccgccatgtgtccactgtatactgtctcctagctcacaggaatgatactgatccactccttgtgctgctctttgtaaagtgatttcacatccattctctggtaatcatcatcacattccctgtgatgaggaattagcaccaattatagaggagaaaactggatctgacatttctcatctcatttgctctatacattaacctcttgcaaaaaatttgtgagtcttgcccaagacccattacaactaattaacggctgaactggtcgtctgatttcaaggccagaattaactttctactgcagctcatggatcagaggttttctttatttaaacaaacaaacaaaaaatcctttgaccgtagcccttgctataacgtttcccactgagttgagggagaaattgaaagtaaacttaggagctttttatagcttgtcaaaccatgcaagagtgggggaagcttatccatctgtggaattgatagaccaggaggaagtaactccggcttagataatgctaccattttgaataaatcaaatggtcttcttttccccttcatggtagttgctgcttaagtttctctaacatgcctgcagtaagtttccattaagaataggaaattaggctcggtacagtggctcacgtctgtagtcttagcactttgggagaccgaggagtgtggatcacttgaggtcaggagttcaagaccagcctggccaacatggtgaaacccccatctctactaaaaatacaaaaattagccaggcatagtggcatgcacctgtaatcccagctactcgagaggctgaggcaggagaatcacttgaaccagggagatggaggttgcagtgagccaagatcatgccactgcactccagcctgggcgatagactgagactctgtctca

SEQ ID NO: 62385 - DNA, 596 bp, Homo sapiens
tgataatatagcttataattagcttatcaattaaatatgcatggctgtatctaaagggcttgaaaactgtttttaaggtttttcttttctatcttgattttatatttaggaaaacccaggtaaactcacaaatagaggaacatttttttaagcaggaaaatatgtaacaatttttgggccaaatgcttaagaagtgagaattttgaaatggaaacaaaagttggaatctgtcttagaagtaatctactccaccccttctctcccagcagtttgagtgctctatttaaagctagaattttgagcatgagaacgccactgtggacaacagagagattttctctctctctcacctcttctctttctctccttctatctccccctccaccaccatctctctcatcttcttccctttgtccccaccccattgcttttttctttctgcttttcctgttccctatccttacgcaggattgttttactgttagccaggttaagtttaagcttcttgaggactttagtactgaaagacaatggctcacttgtaagacctagttgaagagtacagatttagatttgttcagtgtgctgtgatctgt

SEQ ID NO: 62386 - DNA, 591 bp, Homo sapiens
tcattctaatcacccagattttaattaatttatgtaccagcctcatcactaatgtcagtacctacaatctagctgtcttcctgtccattctgtctcttaccaatattatctttccaaaacagtttacttccctgacttaaaacctagatttattcccttttgtttctgtttttgtttttcaggtcttggcccaaacctgttgaagtgttgggcccaaaagagtgttgtcagtcttcttttcccacctgcctctttccattcaccatgcacactacacttctttacaggcattactacaatgctttatggacacactaggcttattcccaacttagatttttactcattgctgactcttctgcctagaatactttattccacgtcctttcccagcaaattcctgtcaccctccaataccagcttaaatttcagcttcatcaggcagaggtgattgctcttcccaatgtttcccctgcatcactttgagtgtctcttcacgtttctccaggaaaatcccttatttagtgttatagtcccagcattcagcatcacaccctgtacatagatgcataggtggtgcttgatgagaga

SEQ ID NO: 62387 - DNA, 460 bp, Homo sapiens
accaattgctttgtattagttcattaccttgctgctgataaagacatacccgagacagggtaatttataaagaaaaagaggtttaatggactcacagttccacgtggctggggaggcctcacactcatggcagaaggtgaaaggcacgtcttacatggcagcaggcaagagagaatgagagccaagtgaatggggaaaccccttataaaaacatcagatctcatgagacttattcagtagcatgagaacagtgtgagggaaacccccacccgcccatgtttccattacctcccaccgggcccctcccatgacacgtgggaattatggcagtacaattcacgatgagatttgggtggggacacagccaaaccatatcatgcttcttttcatttttcccctaaagaaagaatatcgctttctaaaaagatgaaatccctgaaaagatggaatttatttccta

SEQ ID NO: 62388 - DNA, 325 bp, Homo sapiens
cagatggatcagttcatactctggcagttaattttatttcctctaaataaaaatggacaggttaatttattaagcagctgtgttatcaatatggtacgtgtgtgtgcttgtatagatagatgtatatgtacatacataactatacatttttctggacacataatattttaggtgcctattgtatgctagacactgttctaccatcagtaaaaaagcactgccctgttttactgttgattaaaaacaaaattctgaaaatagtgaacaatgaggcttacaacatttgttacaggataagaaatctcaatttagaaaaatgttgtca

SEQ ID NO: 62389 - DNA, 749 bp, Homo sapiens
tgacaatccttttcattcctgttgtttatgatcactaggtcacagggtttgcctttttccaaacctgcatctcaattttcccatcaaaaacatttcccaaatttggataaagaacccatatctagacttgccacatttctgcaccaaaagctcactctcatggttggaacagagccaagcaaagggcacagtaaattgtggtttcttccactcctcatgtgtcttcagatgaaatcattctttccaataatcccagaaattctttctctcctctctcaagcatgtgaaaaggtccagagctctgcagtgtgagctttctactgaaatggcccttggactttgtggttcattcatactcagtggtctagcttgtactacttttgagaatgcaaagcttaactgtggacggattccaatcctggccaggcagggttgctggacactctgagagaagaaagggttaatcccatgaccatcaacttccatgggatttcagccatcctggacaagctaccacaccctcctgccccaggggaggaggaaatgtggaccatcccatcagatattgaccaggtttggctctttaaagagggttacatgcaagaaaataaaattttttaaaaaggtgctgggcaggtgggggactcagatgtaatggaaaagtgtcttttctagaaaagaaaagctaattctaatatgtgtcactaccccacgagacaaatatatacatcttgatttaaaaaaggaaa

SEQ ID NO: 62390 - DNA, 1811 bp, Homo sapiens
agggggcggtggccttgcctctggctctgaggcggcggcgccgggcgctgcgaaggctcggccgctgtagtcagtggtgtggggtgcgcaagggcacggacctcggagctctccccgttcccccgccggccatgaacgccgctcgcaccggctaccgagtcttctcggccaactccacggccgcctgcacggagctggccaagcgcatcacagagcgccttggtgctgaattggggaagtctgttgtatatcaagagaccaatggagaaacaagagttgaaataaaagaatctgttcgtggccaagatattttcattatacagacaatacccagagatgtgaatacagctgtgatggagttgctcatcatggcttacgcactgaagactgcctgtgccaggaacattattggggtcatcccctacttcccctacagcaagcagagcaagatgaggaagaggggttccattgtgtgcaagctgctagcatccatgctggcgaaagcaggtttaactcacattatcactatggatcttcatcaaaaggaaatacaaggctttttcagctttcctgtggacaaccttagagcctcacctttcctgcttcagtatatccaggaagaaattccaaattacagaaatgcagtcattgtagctaagtctcctgatgctgcaaagagggcccagtcctatgcggagagactgcgtctgggtttggccgtcattcacggggaagctcagtgcacggaactggacatggacgatggtcgtcactccccgcctatggtcaaaaatgctactgtgcacccaggcctggagttgccattgatgatggccaaagagaagccaccgataactgtagttggagatgttggaggccgcatcgcaatcatcgtggatgacattattgacgatgtggagagttttgttgctgccgcggagatcctgaaagagagaggcgcctataagatctatgttatggccacccacggcatcctgtctgcagaggcccctcgcctgattgaggagtcctccgtagacgaggtggtggtgacgaatactgtccctcatgaggttcagaagctgcaatgtcccaagataaagactgtggatatcagtttgattctttctgaagccattcggagaatccacaatggagagtccatggcctaccttttccgaaacatcactgtggatgactagctttcacgagggtctcgaccctggacctcctgagggaaacatggaaaaagcagtgccatgagtgatacagtgtttccttgcaagggaggactcgaaacagcctggagttagatatcttcttttgcccggattgatggggaggagggattaaaagagtcaggaagaagacagagctaatggataaatatcataacatggccttacatgtctgctgtcatcagccctgttccttaaaagttctagctgctttcttaaaaataatctgaaaatcttattgatactaaagaggagttaaaggcacataaagtcttaactctataatgttcatttagttgtttcagctccagggaaatggaggtattgatgttgaacctggttagggaagctgagcgcctgtggccctattactatccagttggcctctcccaaatcaacttcaagtcttttatagagaatcgtatttttctttcagaaattgttatgcctacagccattgaaaaatgaagcattcatgttgttacatcttccaaggatgtcagattagaaaatagcatcccacctctgggtatctgagtggctctgaagttgcaaataaaataatttgttgtc

SEQ ID NO: 62391 - DNA, 508 bp, Homo sapiens
ggcctgatcgctttagacagctacttcataaacagccccacaagaaaagaaaaatcgcgatcccgatataaacctgattgcatttagacatacatggccttacatgtctgctgtcatcagccctgttccttaaaagttctagctgctttcttaaaaataatctgaaaatcttattgatactaaagaggagttaaaggcacataaagtcttaactctataatgttcatttagttgtttcagctccagggaaatggaggtattgatgttgaacctggttagggaagctgagcgcctgtggccctattactatccagttggcctctcccaaatcaacttcaagtcttttatagagaatcgtatttttctttcagaaattgttatgcctacagccattgaaaaatgaagcattcatgttgttacatcttccaaggatgtcagattagaaaatagcatcccacctctgggtatctgagtggctctgaagttgcaaataaaataatttgttgtc

SEQ ID NO: 62392 - DNA, 2800 bp, Homo sapiens
agggggcggtggccttgcctctggctctgaggcggcggcgccgggcgctgcgaaggctcggccgctgtagtcagtggtgtggggtgcgcaagggcacggacctcggagctctccccgcttgcgccgagtttctcagcgccttccccacccaaaccggggtctcgcagtcggaagcactcagagtgcagccccgcgcggggccggtcgtaaccgcgccgcgggccggacgatgcccaagaagctgctgctgttgcccccgccctccgcgtcctcggctttccgcgtcccgcgcgcccgccccgttcccccgccggccatgaacgccgctcgcaccggctaccgagtcttctcggccaactccacggccgcctgcacggagctggccaagcgcatcacagagcgccttggtgctgaattggggaagtctgttgtatatcaagagaccaatggagaaacaagagttgaaataaaagaatctgttcgtggccaagatattttcattatacagacaatacccagagatgtgaatacagctgtgatggagttgctcatcatggcttacgcactgaagactgcctgtgccaggaacattattggggtcatcccctacttcccctacagcaagcagagcaagatgaggaagaggggttccattgtgtgcaagctgctagcatccatgctggcgaaagcaggtttaactcacattatcactatggatcttcatcaaaaggaaatacaaggctttttcagctttcctgtggacaaccttagagcctcacctttcctgcttcagtatatccaggaagaaattccaaattacagaaatgcagtcattgtagctaagtctcctgatgctgcaaagagggcccagtcctatgcggagagactgcgtctgggtttggccgtcattcacggggaagctcagtgcacggaactggacatggacgatggtcgtcactccccgcctatggtcaaaaatgctactgtgcacccaggcctggagttgccattgatgatggccaaagagaagccaccgataactgtagttggagatgttggaggccgcatcgcaatcatcgtggtatggttatatgtcatccatgtgcagaggtggcactcctggctcttggtcagtaggttgtccactctgggactgtatttctaggaacgatgatccgaatggatccatgtatcctttctcacccaaactcccttgtgccaagtggcagaaacctgtatccaggtgaacatacattaaagtataacctacagataggaaatgagcacagtactcccgtgagaaaattcagcaccttcaccttcatcatgtggattctaggttctttaaaccagctcacctaatcatgcttgagcgttagggccgaaagatgaactgaagatgagctgttccgttttcacaagtaagaatgggtgtccccgtgcagactcgttctgcatgttgacatactttttttcccagctctaaatatctgctggctagtgggtcatgagtcctttgcagtagcacactttatttcagttttcttctcatgtcacagtctatttgaaaaaaaaataaatggaacgctggctatgtgggattcaccagaaacgtgagacaggaaaatgagtgttggcaatcctcagctccagccgtaatgtcacaggtgcttgactgcgcccgcctctgacagacacacaaggtactgtcaggtgcttctgttgccatttctggatgctcgttctttgacccaggcacacagctctgattttccatcagaaatcctctgaaactgagtgcagaagagagtagagtggtgtgtgcattgacagtatgggctagagggtgtttctttcctaccaactcactctgttctcctcccaggatgacattattgacgatgtggagagttttgttgctgccgcggagatcctgaaagagagaggcgcctataagatctatgttatggccacccacggcatcctgtctgcagaggcccctcgcctgattgaggagtcctccgtagacgaggtggtggtgacgaatactgtccctcatgaggttcagaagctgcaatgtcccaagataaagactgtggatatcagtttgattctttctgaagccattcggagaatccacaatggagagtccatggcctaccttttccgaaacatcactgtggatgactagctttcacgagggtctcgaccctggacctcctgagggaaacatggaaaaagcagtgccatgagtgatacagtgtttccttgcaagggaggactcgaaacagcctggagttagatatcttcttttgcccggattgatggggaggagggattaaaagagtcaggaagaagacagagctaatggataaatatcataacatggccttacatgtctgctgtcatcagccctgttccttaaaagttctagctgctttcttaaaaataatctgaaaatcttattgatactaaagaggagttaaaggcacataaagtcttaactctataatgttcatttagttgtttcagctccagggaaatggaggtattgatgttgaacctggttagggaagctgagcgcctgtggccctattactatccagttggcctctcccaaatcaacttcaagtcttttatagagaatcgtatttttctttcagaaattgttatgcctacagccattgaaaaatgaagcattcatgttgttacatcttccaaggatgtcagattagaaaatagcatcccacctctgggtatctgagtggctctgaagttgcaaataaaataatttgttgtc

SEQ ID NO: 62393 - DNA, 1683 bp, Homo sapiens
atgcagagctagatcgtatacctcctcggaggcggacatgttgggtcctggccaaaaagttggaaacacctggggccactaccgaggcgccttggtgctgaattggggaagtctgttgtatatcaagagaccaatggagaaacaagagttgaaataaaagaatctgttcgtggccaagatattttcattatacagacaatacccagagatgtgaatacagctgtgatggagttgctcatcatggcttacgcactgaagactgcctgtgccaggaacattattggggtcatcccctacttcccctacagcaagcagagcaagatgaggaagaggggttccattgtgtgcaagctgctagcatccatgctggcgaaagcaggtttaactcacattatcactatggatcttcatcaaaaggaaatacaaggctttttcagctttcctgtggacaaccttagagcctcacctttcctgcttcagtatatccaggaagaaattccaaattacagaaatgcagtcattgtagctaagtctcctgatgctgcaaagagggcccagtcctatgcggagagactgcgtctgggtttggccgtcattcacggggaagctcagtgcacggaactggacatggacgatggtcgtcactccccgcctatggtcaaaaatgctactgtgcacccaggcctggagttgccattgatgatggccaaagagaagccaccgataactgtagttggagatgttggaggccgcatcgcaatcatcgtggatgacattattgacgatgtggagagttttgttgctgccgcggagatcctgaaagagagaggcgcctataagatctatgttatggccacccacggcatcctgtctgcagaggcccctcgcctgattgaggagtcctccgtagacgaggtggtggtgacgaatactgtccctcatgaggttcagaagctgcaatgtcccaagataaagactgtggatatcagtttgattctttctgaagccattcggagaatccacaatggagagtccatggcctaccttttccgaaacatcactgtggatgactagctttcacgagggtctcgaccctggacctcctgagggaaacatggaaaaagcagtgccatgagtgatacagtgtttccttgcaagggaggactcgaaacagcctggagttagatatcttcttttgcccggattgatggggaggagggattaaaagagtcaggaagaagacagagctaatggataaatatcataacatggccttacatgtctgctgtcatcagccctgttccttaaaagttctagctgctttcttaaaaataatctgaaaatcttattgatactaaagaggagttaaaggcacataaagtcttaactctataatgttcatttagttgtttcagctccagggaaatggaggtattgatgttgaacctggttagggaagctgagcgcctgtggccctattactatccagttggcctctcccaaatcaacttcaagtcttttatagagaatcgtatttttctttcagaaattgttatgcctacagccattgaaaaatgaagcattcatgttgttacatcttccaaggatgtcagattagaaaatagcatcccacctctgggtatctgagtggctctgaagttgcaaataaaataatttgttgtc

SEQ ID NO: 62394 - DNA, 1990 bp, Homo sapiens
ggaataggggccaggctgctgcaggctcagggcagctcaacttccaaatcctgtagcttcagacttgtggtccttcacgacatgctgagtcacaatctactgctccctcaagcccaatgtcaccacaagcagagtctctaaaggacattctcagaagatggtactgtcaatgtgagaggcacctctcctcccctcgagttctggtgcagctgataactagagatctcaaatgcttccctgggctttactttctacttcaacaagtactgattgcgggcctctggagcccacacactgccctatacactgggtaacacggagcactcaggaatacacgatcttggcggggcgtgatggctgaggcctgtaatgtcggcattttgaatgactgaggcgccttggtgctgaattggggaagtctgttgtatatcaagagaccaatggagaaacaagagttgaaataaaagaatctgttcgtggccaagatattttcattatacagacaatacccagagatgtgaatacagctgtgatggagttgctcatcatggcttacgcactgaagactgcctgtgccaggaacattattggggtcatcccctacttcccctacagcaagcagagcaagatgaggaagaggggttccattgtgtgcaagctgctagcatccatgctggcgaaagcaggtttaactcacattatcactatggatcttcatcaaaaggaaatacaaggctttttcagctttcctgtggacaaccttagagcctcacctttcctgcttcagtatatccaggaagaaattccaaattacagaaatgcagtcattgtagctaagtctcctgatgctgcaaagagggcccagtcctatgcggagagactgcgtctgggtttggccgtcattcacggggaagctcagtgcacggaactggacatggacgatggtcgtcactccccgcctatggtcaaaaatgctactgtgcacccaggcctggagttgccattgatgatggccaaagagaagccaccgataactgtagttggagatgttggaggccgcatcgcaatcatcgtggatgacattattgacgatgtggagagttttgttgctgccgcggagatcctgaaagagagaggcgcctataagatctatgttatggccacccacggcatcctgtctgcagaggcccctcgcctgattgaggagtcctccgtagacgaggtggtggtgacgaatactgtccctcatgaggttcagaagctgcaatgtcccaagataaagactgtggatatcagtttgattctttctgaagccattcggagaatccacaatggagagtccatggcctaccttttccgaaacatcactgtggatgactagctttcacgagggtctcgaccctggacctcctgagggaaacatggaaaaagcagtgccatgagtgatacagtgtttccttgcaagggaggactcgaaacagcctggagttagatatcttcttttgcccggattgatggggaggagggattaaaagagtcaggaagaagacagagctaatggataaatatcataacatggccttacatgtctgctgtcatcagccctgttccttaaaagttctagctgctttcttaaaaataatctgaaaatcttattgatactaaagaggagttaaaggcacataaagtcttaactctataatgttcatttagttgtttcagctccagggaaatggaggtattgatgttgaacctggttagggaagctgagcgcctgtggccctattactatccagttggcctctcccaaatcaacttcaagtcttttatagagaatcgtatttttctttcagaaattgttatgcctacagccattgaaaaatgaagcattcatgttgttacatcttccaaggatgtcagattagaaaatagcatcccacctctgggtatctgagtggctctgaagttgcaaataaaataatttgttgtc

SEQ ID NO: 62395 - DNA, 1607 bp, Homo sapiens
ggacgcgtgggtcgacccacgcgtccgggggaaggtctgttgtatatcaagagaccaatggagaaacaagagttgaaataaaagaatctgttcgtggccaagatattttcattatacagacaatacccagagatgtgaatacagctgtgatggagttgctcatcatggcttacgcactgaagactgcctgtgccaggaacattattggggtcatcccctacttcccctacagcaagcagagcaagatgaggaagaggggttccattgtgtgcaagctgctagcatccatgctggcgaaagcaggtttaactcacattatcactatggatcttcatcaaaaggaaatacaaggctttttcagctttcctgtggacaaccttagagcctcacctttcctgcttcagtatatccaggaagaaattccaaattacagaaatgcagtcattgtagctaagtctcctgatgctgcaaagagggcccagtcctatgcggagagactgcgtctgggtttggccgtcattcacggggaagctcagtgcacggaactggacatggacgatggtcgtcactccccgcctatggtcaaaaatgctactgtgcacccaggcctggagttgccattgatgatggccaaagagaagccaccgataactgtagttggagatgttggaggccgcatcgcaatcatcgtggatgacattattgacgatgtggagagttttgttgctgccgcggagatcctgaaagagagaggcgcctataagatctatgttatggccacccacggcatcctgtctgcagaggcccctcgcctgattgaggagtcctccgtagacgaggtggtggtgacgaatactgtccctcatgaggttcagaagctgcaatgtcccaagataaagactgtggatatcagtttgattctttctgaagccattcggagaatccacaatggagagtccatggcctaccttttccgaaacatcactgtggatgactagctttcacgagggtctcgaccctggacctcctgagggaaacatggaaaaagcagtgccatgagtgatacagtgtttccttgcaagggaggactcgaaacagcctggagttagatatcttcttttgcccggattgatggggaggagggattaaaagagtcaggaagaagacagagctaatggataaatatcataacatggccttacatgtctgctgtcatcagccctgttccttaaaagttctagctgctttcttaaaaataatctgaaaatcttattgatactaaagaggagttaaaggcacataaagtcttaactctataatgttcatttagttgtttcagctccagggaaatggaggtattgatgttgaacctggttagggaagctgagcgcctgtggccctattactatccagttggcctctcccaaatcaacttcaagtcttttatagagaatcgtatttttctttcagaaattgttatgcctacagccattgaaaaatgaagcattcatgttgttacatcttccaaggatgtcagattagaaaatagcatcccacctctgggtatctgagtggctctgaagttgcaaataaaataatttgttgtc

SEQ ID NO: 62396 - DNA, 1941 bp, Homo sapiens
agggggcggtggccttgcctctggctctgaggcggcggcgccgggcgctgcgaaggctcggccgctgtagtcagtggtgtggggtgcgcaagggcacggacctcggagctctccccgcttgcgccgagtttctcagcgccttccccacccaaaccggggtctcgcagtcggaagcactcagagtgcagccccgcgcggggccggtcgtaaccgcgccgcgggccggacgatgcccaagaagctgctgctgttgcccccgccctccgcgtcctcggctttccgcgtcccgcgcgcccgccccgttcccccgccggccatgaacgccgctcgcaccggctaccgagtcttctcggccaactccacggccgcctgcacggagctggccaagcgcatcacagagcgccttggtgctgaattggggaagtctgttgtatatcaagagaccaatggagaaacaagagttgagatgtgaatacagctgtgatggagttgctcatcatggcttacgcactgaagactgcctgtgccaggaacattattggggtcatcccctacttcccctacagcaagcagagcaagatgaggaagaggggttccattgtgtgcaagctgctagcatccatgctggcgaaagcaggtttaactcacattatcactatggatcttcatcaaaaggaaatacaaggctttttcagctttcctgtggacaaccttagagcctcacctttcctgcttcagtatatccaggaagaaattccaaattacagaaatgcagtcattgtagctaagtctcctgatgctgcaaagagggcccagtcctatgcggagagactgcgtctgggtttggccgtcattcacggggaagctcagtgcacggaactggacatggacgatggtcgtcactccccgcctatggtcaaaaatgctactgtgcacccaggcctggagttgccattgatgatggccaaagagaagccaccgataactgtagttggagatgttggaggccgcatcgcaatcatcgtggatgacattattgacgatgtggagagttttgttgctgccgcggagatcctgaaagagagaggcgcctataagatctatgttatggccacccacggcatcctgtctgcagaggcccctcgcctgattgaggagtcctccgtagacgaggtggtggtgacgaatactgtccctcatgaggttcagaagctgcaatgtcccaagataaagactgtggatatcagtttgattctttctgaagccattcggagaatccacaatggagagtccatggcctaccttttccgaaacatcactgtggatgactagctttcacgagggtctcgaccctggacctcctgagggaaacatggaaaaagcagtgccatgagtgatacagtgtttccttgcaagggaggactcgaaacagcctggagttagatatcttcttttgcccggattgatggggaggagggattaaaagagtcaggaagaagacagagctaatggataaatatcataacatggccttacatgtctgctgtcatcagccctgttccttaaaagttctagctgctttcttaaaaataatctgaaaatcttattgatactaaagaggagttaaaggcacataaagtcttaactctataatgttcatttagttgtttcagctccagggaaatggaggtattgatgttgaacctggttagggaagctgagcgcctgtggccctattactatccagttggcctctcccaaatcaacttcaagtcttttatagagaatcgtatttttctttcagaaattgttatgcctacagccattgaaaaatgaagcattcatgttgttacatcttccaaggatgtcagattagaaaatagcatcccacctctgggtatctgagtggctctgaagttgcaaataaaataatttgttgtc

SEQ ID NO: 62397 - DNA, 2487 bp, Homo sapiens
atgcagagctagatcgtatacctcctcggaggcggacatgttgggtcctggccaaaaagttggaaacacctggggccactaccgaggcgccttggtgctgaattggggaagtctgttgtatatcaagagaccaatggagaaacaagagttgaaataaaagaatctgttcgtggccaagatattttcattatacagacaatacccagagatgtgaatacagctgtgatggagttgctcatcatggcttacgcactgaagactgcctgtgccaggaacattattggggtcatcccctacttcccctacagcaagcagagcaagatgaggaagaggggttccattgtgtgcaagctgctagcatccatgctggcgaaagcaggtttaactcacattatcactatggatcttcatcaaaaggaaatacaaggctttttcagctttcctgtggacaaccttagagcctcacctttcctgcttcagtatatccaggaagaaattccaaattacagaaatgcagtcattgtagctaagtctcctgatgctgcaaagagggcccagtcctatgcggagagactgcgtctgggtttggccgtcattcacggggaagctcagtgcacggaactggacatggacgatggtcgtcactccccgcctatggtcaaaaatgctactgtgcacccaggcctggagttgccattgatgatggccaaagagaagccaccgataactgtagttggagatgttggaggccgcatcgcaatcatcgtggtatggttatatgtcatccatgtgcagaggtggcactcctggctcttggtcagtaggttgtccactctgggactgtatttctaggaacgatgatccgaatggatccatgtatcctttctcacccaaactcccttgtgccaagtggcagaaacctgtatccaggtgaacatacattaaagtataacctacagataggaaatgagcacagtactcccgtgagaaaattcagcaccttcaccttcatcatgtggattctaggttctttaaaccagctcacctaatcatgcttgagcgttagggccgaaagatgaactgaagatgagctgttccgttttcacaagtaagaatgggtgtccccgtgcagactcgttctgcatgttgacatactttttttcccagctctaaatatctgctggctagtgggtcatgagtcctttgcagtagcacactttatttcagttttcttctcatgtcacagtctatttgaaaaaaaaataaatggaacgctggctatgtgggattcaccagaaacgtgagacaggaaaatgagtgttggcaatcctcagctccagccgtaatgtcacaggtgcttgactgcgcccgcctctgacagacacacaaggtactgtcaggtgcttctgttgccatttctggatgctcgttctttgacccaggcacacagctctgattttccatcagaaatcctctgaaactgagtgcagaagagagtagagtggtgtgtgcattgacagtatgggctagagggtgtttctttcctaccaactcactctgttctcctcccaggatgacattattgacgatgtggagagttttgttgctgccgcggagatcctgaaagagagaggcgcctataagatctatgttatggccacccacggcatcctgtctgcagaggcccctcgcctgattgaggagtcctccgtagacgaggtggtggtgacgaatactgtccctcatgaggttcagaagctgcaatgtcccaagataaagactgtggatatcagtttgattctttctgaagccattcggagaatccacaatggagagtccatggcctaccttttccgaaacatcactgtggatgactagctttcacgagggtctcgaccctggacctcctgagggaaacatggaaaaagcagtgccatgagtgatacagtgtttccttgcaagggaggactcgaaacagcctggagttagatatcttcttttgcccggattgatggggaggagggattaaaagagtcaggaagaagacagagctaatggataaatatcataacatggccttacatgtctgctgtcatcagccctgttccttaaaagttctagctgctttcttaaaaataatctgaaaatcttattgatactaaagaggagttaaaggcacataaagtcttaactctataatgttcatttagttgtttcagctccagggaaatggaggtattgatgttgaacctggttagggaagctgagcgcctgtggccctattactatccagttggcctctcccaaatcaacttcaagtcttttatagagaatcgtatttttctttcagaaattgttatgcctacagccattgaaaaatgaagcattcatgttgttacatcttccaaggatgtcagattagaaaatagcatcccacctctgggtatctgagtggctctgaagttgcaaataaaataatttgttgtc

SEQ ID NO: 62398 - DNA, 1603 bp, Homo sapiens
agagatcttatttagtttttctctggtatcagatttcgatattggaaggcacatcaaatgagctctcccttaagtcacaatgcctgaggcagcagacagggtcagctttagtcgtggacgatcatagctttaaaagacactaaaaacagattttttttctacgtatctttagcaatttgcttatgttttctaaaatgaatgttttaagaattatttttaaaaaattcttgacgtaggagtgctttttccagtgatgttaattgataaatattgaaaaatctaaaacttgtgactaaaattctagcatatttgatgactagtttggatcattataagagggaaaacttgaataccagcatccaggtgttattttctgataacttttcagtattttctatttttccttcaaatctagattccaaattacagaaatgcagtcattgtagctaagtctcctgatgctgcaaagagggcccagtcctatgcggagagactgcgtctgggtttggccgtcattcacggggaagctcagtgcacggaactggacatggacgatggtcgtcactccccgcctatggtcaaaaatgctactgtgcacccaggcctggagttgccattgatgatggccaaagagaagccaccgataactgtagttggagatgttggaggccgcatcgcaatcatcgtggatgacattattgacgatgtggagagttttgttgctgccgcggagatcctgaaagagagaggcgcctataagatctatgttatggccacccacggcatcctgtctgcagaggcccctcgcctgattgaggagtcctccgtagacgaggtggtggtgacgaatactgtccctcatgaggttcagaagctgcaatgtcccaagataaagactgtggatatcagtttgattctttctgaagccattcggagaatccacaatggagagtccatggcctaccttttccgaaacatcactgtggatgactagctttcacgagggtctcgaccctggacctcctgagggaaacatggaaaaagcagtgccatgagtgatacagtgtttccttgcaagggaggactcgaaacagcctggagttagatatcttcttttgcccggattgatggggaggagggattaaaagagtcaggaagaagacagagctaatggataaatatcataacatggccttacatgtctgctgtcatcagccctgttccttaaaagttctagctgctttcttaaaaataatctgaaaatcttattgatactaaagaggagttaaaggcacataaagtcttaactctataatgttcatttagttgtttcagctccagggaaatggaggtattgatgttgaacctggttagggaagctgagcgcctgtggccctattactatccagttggcctctcccaaatcaacttcaagtcttttatagagaatcgtatttttctttcagaaattgttatgcctacagccattgaaaaatgaagcattcatgttgttacatcttccaaggatgtcagattagaaaatagcatcccacctctgggtatctgagtggctctgaagttgcaaataaaataatttgttgtc

SEQ ID NO: 62399 - DNA, 2141 bp, Homo sapiens
agggggcggtggccttgcctctggctctgaggcggcggcgccgggcgctgcgaaggctcggccgctgtagtcagtggtgtggggtgcgcaagggcacggacctcggagctctccccgcttgcgccgagtttctcagcgccttccccacccaaaccggggtctcgcagtcggaagcactcagagtgcagccccgcgcggggccggtcgtaaccgcgccgcgggccggacgatgcccaagaagctgctgctgttgcccccgccctccgcgtcctcggctttccgcgtcccgcgcgcccgccccgttcccccgccggccatgaacgccgctcgcaccggctaccgagtcttctcggccaactccacggccgcctgcacggagctggccaagcgcatcacagagcgccttggtgctgaattggggaagtctgttgtatatcaagagaccaatggagaaacaagagttgaaataaaagaatctgttcgtggccaagatattttcattatacagacaatacccagagatgtgaatacagctgtgatggagttgctcatcatggcttacgcactgaagactgcctgtgccaggaacattattggggtcatcccctacttcccctacagcaagcagagcaagatgaggaagaggggttccattgtgtgcaagctgctagcatccatgctggcgaaagcaggtttaactcacattatcactatggatcttcatcaaaaggaaatacaaggctttttcagctttcctgtggacaaccttagagcctcacctttcctgcttcagtatatccaggaagaaattccaaattacagaaatgcagtcattgtagctaagtctcctgatgctgcaaagagggcccagtcctatgcggagagactgcgtctgggtttggccgtcattcacggggaagctcagtgcacggaactggacatggacgatggtcgtcactccccgcctatggtcaaaaatgctactgtgcacccaggcctggagttgccattgatgatggccaaagagaagccaccgataactgtagttggagatgttggaggccgcatcgcaatcatcgtggatgacattattgacgatgtggagagttttgttgctgccgcggagatcctgaaagagagaggcgcctataagatctatgttatggccacccacggcatcctgtctgcagaggcccctcgcctgattgaggagtcctccgtagacgaggtggtggtgacgaatactgtccctcatgaggttcagaagctgcaatgtcccaagataaagactgtggatatcagtttgattctttctgaagccattcggagaatccacaatggagagtccatggcctaccttttccgaaacatcactgtggatgactagctttcacgagggtctcgaccctggacctcctgagggaaacatggaaaaagcagtgccatgagtgatacagtgtttccttgcaagggaggactcgaaacagcctggagttagatatcttcttttgcccggattgatggggaggagggattaaaagagtcaggaagaagacagagctaatggataaatatcataacatggccttacatgtctgctgtcatcagccctgttccttaaaagttctagctgctttcttaaaaataatctgaaaatcttattgatactaaagaggagttaaaggcacataaagtcttaactctataatgttcatttagttgtttcagctccaggtattactatccagttggcctctcccaaatcaacttcaagtcttttatagagaatcgtatttttctttcagaaattgttatgcctacagccattgaaaaatgaagcattcatgttgttacatcttccaaggatgtcagattagaaaatagcatcccacctctgggtatctgagtggctctgaagttgcaaataaaataatttgttgtcaaaaaaaaaaaaaaaaaaaaaaataaaaaattaaaaggaaaataaatccccgccggatccgaccgccactttcaaaaccccccaccgttctagaaccgggggagcttccgtccctgagtagaattcgagggggtaaagaagaggaaggggaaaaatattttgtaccagcccaggggggaaaaagcccccggcttgaaaa

SEQ ID NO: 62400 - DNA, 727 bp, Homo sapiens
agttcgacggagactctccattgtggatatcagtttgattctttctgaagccattcggagaatccacaatggagagtccatggcctaccttttccgaaacatcactgtggatgactagctttcacgagggtctcgaccctggacctcctgagggaaacatggaaaaagcagtgccatgagtgatacagtgtttccttgcaagggaggactcgaaacagcctggagttagatatcttcttttgcccggattgatggggaggagggattaaaagagtcaggaagaagacagagctaatggataaatatcataacatggccttacatgtctgctgtcatcagccctgttccttaaaagttctagctgctttcttaaaaataatctgaaaatcttattgatactaaagaggagttaaaggcacataaagtcttaactctataatgttcatttagttgtttcagctccagggaaatggaggtattgatgttgaacctggttagggaagctgagcgcctgtggccctattactatccagttggcctctcccaaatcaacttcaagtcttttatagagaatcgtatttttctttcagaaattgttatgcctacagccattgaaaaatgaagcattcatgttgttacatcttccaaggatgtcagattagaaaatagcatcccacctctgggtatctgagtggctctgaagttgcaaataaaataatttgttgtc

SEQ ID NO: 62401 - DNA, 1311 bp, Homo sapiens
agggggcggtggccttgcctctggctctgaggcggcggcgccgggcgctgcgaaggctcggccgctgtagtcagtggtgtggggtgcgcaagggcacggacctcggagctctccccgcttgcgccgagtttctcagcgccttccccacccaaaccggggtctcgcagtcggaagcactcagagtgcagccccgcgcggggccggtcgtaaccgcgccgcgggccggacgatgcccaagaagctgctgctgttgcccccgccctccgcgtcctcggctttccgcgtcccgcgcgcccgccccgttcccccgccggccatgaacgccgctcgcaccggctaccgagtcttctcggccaactccacggccgcctgcacggagctggccaagcgcatcacagagcgccttggtgctgaattggggaagtctgttgtatatcaagagaccaatggagaaacaagagttgaaataaaagaatctgttcgtggccaagatattttcattatacagacaatacccagagatgtgaatacagctgtgatggagttgctcatcatggcttacgcactgaagactgcctgtgccaggaacattattggggtcatcccctacttcccctacagcaagcagagcaagatgaggaagaggggttccattgtgtgcaagctgctagcatccatgctggcgaaagcaggtttaactcacattatcactatggatcttcatcaaaaggaaatacaaggctttttcagctttcctgtggacaaccttagagcctcacctttcctgcttcagtatatccaggaagaaattccaaattacagaaatgcagtcattgtagctaagtctcctgatgctgcaaagagggcccagtcctatgcggagagactgcgtctgggtttggccgtcattcacggggaagctcagtgcacggaactggacatggacgatggtcgtcactccccgcctatggtcaaaaatgctactgtgcacccaggcctggagttgccattgatgatggccaaagagaagccaccgataactgtagttggagatgttggaggccgcatcgcaatcatcgtggatgacattattgacgatgtggagagttttgttgctgccgcggagatcctgaaagagagaggcgcctataagatctatgttatggccacccacggcatcctgtctgcagaggcccctcgcctgattgaggagtcctccgtagacgaggtcaggctgcttctaaatcttgagccaagatttactgctgtgttttctgggaataataaaatgattcagtcaatactaaaaag

SEQ ID NO: 62402 - DNA, 677 bp, Homo sapiens
ctatcagctcgcaccctgccatttactccatggcctaccttttccgaaacatcactgtggatgactagctttcacgagggtctcgaccctggacctcctgagggaaacatggaaaaagcagtgccatgagtgatacagtgtttccttgcaagggaggactcgaaacagcctggagttagatatcttcttttgcccggattgatggggaggagggattaaaagagtcaggaagaagacagagctaatggataaatatcataacatggccttacatgtctgctgtcatcagccctgttccttaaaagttctagctgctttcttaaaaataatctgaaaatcttattgatactaaagaggagttaaaggcacataaagtcttaactctataatgttcatttagttgtttcagctccagggaaatggaggtattgatgttgaacctggttagggaagctgagcgcctgtggccctattactatccagttggcctctcccaaatcaacttcaagtcttttatagagaatcgtatttttctttcagaaattgttatgcctacagccattgaaaaatgaagcattcatgttgttacatcttccaaggatgtcagattagaaaatagcatcccacctctgggtatctgagtggctctgaagttgcaaataaaataatttgttgtc

SEQ ID NO: 62403 - DNA, 398 bp, Homo sapiens
agggggcggtggccttgcctctggctctgaggcggcggcgccgggcgctgcgaaggctcggccgctgtagtcagtggtgtggggtgcgcaagggcacggacctcggagctctccccgcttgcgccgagtttctcagcgccttccccacccaaaccggggtctcgcagtcggaagcactcagagtgcagccccgcgcggggccggtcgtaaccgcgccgcgggccggacgatgcccaagaagctgctgctgttgacgatgcccataaaagacctagggtttaaggaattgcgctgacaccagtgtcacattccaggtatacaaatggctaaaccgaaggtcccgagagtgctaatggctcattttaggttcgctgcggactgggggtagtgaatgtaac

SEQ ID NO: 62404 - DNA, 710 bp, Homo sapiens
tacttcccctacagcaagcagagcaagatgaggaagaggggttccattgtgtgcaagctgctagcatccatgctggcgaaagcaggtgagtgtgcgcgggggccctggggttccagcatgatcctttagggctctttcctagttggacttagctcatacctcagatatccaatctgggatctgagtgtttgtttccttttgaacagttttggctaaggatatgtgagctcggttagaaattcttttttttcccttattcgctttgtcctactttagaataccattgctttagtgtcttctcttctctgtcatctgtcacatattttctatttcatcttgtcatcgctaaattcttagctggcagtcttggcattcttatgtgatcttttgatcttcaggtctagatttctatatctgctttgttagctaaattccatttttgttcatagtattcaagctggattttcttttactccctctcccccacccttgcctttctacatagtggctcattttcattgctttattctccttgtgtggcgggggcacgctttctggcctgtaaatcaatgtaatattttacaattgggtttctattcatctgatgtctgttctaaaactttaacgtatatttgggtcctcggaaagaaatgtatggtcctccctcaatgtccttataggattggttccaggaacccatctcccgcttc

SEQ ID NO: 62405 - DNA, 1996 bp, Homo sapiens
agggggcggtggccttgcctctggctctgaggcggcggcgccgggcgctgcgaaggctcggccgctgtagtcagtggtgtggggtgcgcaagggcacggacctcggagctctccccgcttgcgccgagtttctcagcgccttccccacccaaaccggggtctcgcagtcggaagcactcagagtgcagccccgcgcggggccggtcgtaaccgcgccgcgggccggacgatgcccaagaagctgctgctgttgcccccgccctccgcgtcctcggctttccgcgtcccgcgcgcccgccccgttcccccgccggccatgaacgccgctcgcaccggctaccgagtcttctcggccaactccacggccgcctgcacggagctggccaagcgcatcacagagcgccttggtgctgaattggggaagtctgttgtatatcaagagaccaatggagaaacaagagttgaaataaaagaatctgttcgtggccaagatattttcattatacagacaatacccagagatgtgaatacagctgtgatggagttgctcatcatggcttacgcactgaagactgcctgtgccaggaacattattggggtcatcccctacttcccctacagcaagcagagcaagatgaggaagaggggttccattgtgtgcaagctgctagcatccatgctggcgaaagcaggtttaactcacattatcactatggatcttcatcaaaaggaaatacaaggctttttcagctttcctgtggacaaccttagagcctcacctttcctgcttcagtatatccaggaagaaattccaaattacagaaatgcagtcattgtagctaagtctcctgatgctgcaaagagggcccagtcctatgcggagagactgcgtctgggtttggccgtcattcacggggaagctcagtgcacggaactggacatggacgatggtcgtcactccccgcctatggtcaaaaatgctactgtgcacccaggcctggagttgccattgatgatggccaaagagaagccaccgataactgtagttggagatgttggaggccgcatcgcaatcatcgtggatgacattattgacgatgtggagagttttgttgctgccgcggagatcctgaaagagagaggcgcctataagatctatgttatggccacccacggcatcctgtctgcagaggcccctcgcctgattgaggagtcctccgtagacgaggtggtggtgacgaatactgtccctcatgaggttcagaagctgcaatgtcccaagataaagactgtggatatcagtttgattctttctgaagccattcggagaatccacaatggagagtccatggcctaccttttccgaaacatcactgtggatgactagctttcacgagggtctcgaccctggacctcctgagggaaacatggaaaaagcagtgccatgagtgatacagtgtttccttgcaagggaggactcgaaacagcctggagttagatatcttcttttgcccggattgatggggaggagggattaaaagagtcaggaagaagacagagctaatggataaatatcataacatggccttacatgtctgctgtcatcagccctgttccttaaaagttctagctgctttcttaaaaataatctgaaaatcttattgatactaaagaggagttaaaggcacataaagtcttaactctataatgttcatttagttgtttcagctccagggaaatggaggtattgatgttgaacctggttagggaagctgagcgcctgtggccctattactatccagttggcctctcccaaatcaacttcaagtcttttatagagaatcgtatttttctttcagaaattgttatgcctacagccattgaaaaatgaagcattcatgttgttacatcttccaaggatgtcagattagaaaatagcatcccacctctgggtatctgagtggctctgaagttgcaaataaaataatttgttgtc

SEQ ID NO: 62406 - DNA, 2195 bp, Homo sapiens
agggggcggtggccttgcctctggctctgaggcggcggcgccgggcgctgcgaaggctcggccgctgtagtcagtggtgtggggtgcgcaagggcacggacctcggagctctccccgcttgcgccgagtttctcagcgccttccccacccaaaccggggtctcgcagtcggaagcactcagagtgcagccccgcgcggggccggtcgtaaccgcgccgcgggccggacgatgcccaagaagctgctgctgttgcccccgccctccgcgtcctcggctttccgcgtcccgcgcgcccgccccgttcccccgccggccatgaacgccgctcgcaccggctaccgagtcttctcggccaactccacggccgcctgcacggagctggccaagcgcatcacagagcgccttggtgctgaattggggaagtctgttgtatatcaagagaccaatggagaaacaagagttgaaataaaagaatctgttcgtggccaagatattttcattatacagacaatacccagagatgtgaatacagctgtgatggagttgctcatcatggcttacgcactgaagactgcctgtgccaggaacattattggggtcatcccctacttcccctacagcaagcagagcaagatgaggaagaggggttccattgtgtgcaagctgctagcatccatgctggcgaaagcaggtttaactcacattatcactatggatcttcatcaaaaggaaatacaaggctttttcagctttcctgtggacaaccttagagcctcacctttcctgcttcagtatatccaggaagaaattccaaattacagaaatgcagtcattgtagctaagtctcctgatgctgcaaagagggcccagtcctatgcggagagactgcgtctgggtttggccgtcattcacggggaagctcagtgcacggaactggacatggacgatggtcgtcactccccgcctatggtcaaaaatgctactgtgcacccaggcctggagttgccattgatgatggccaaagagaagccaccgataactgtagttggagatgttggaggccgcatcgcaatcatcgtggatgacattattgacgatgtggagagttttgttgctgccgcggagatcctgaaagagagaggcgcctataagatctatgttatggccacccacggcatcctgtctgcagaggcccctcgcctgattgaggagtcctccgtagacgaggtggtggtgacgaatactgtccctcatgaggttcagaagctgcaatgtcccaagataaagactgtggatatcagtttgattctttctgaagccattcggagaatccacaatggagagtccatggcctaccttttccgaaacatcactgtggatgactagctttcacgagggtctcgaccctggacctcctgagggaaacatggaaaaagcagtgccatgagtgatacagtgtttccttgcaagggaggactcgaaacagcctggagttagatatcttcttttgcccggattgatggggaggagggattaaaagagtcaggaagaagacagagctaatggataaatatcataacatggccttacatgtctgctgtcatcagccctgttccttaaaagttctagctgctttcttaaaaataatctgaaaatcttattgatactaaagaggagttaaaggcacataaagtcttaactctataatgttcatttagttgtttcagctccagggaaatggaggtattgatgttgaacctggttagggaagctgagcgcctgtggccctattactatccagttggcctctcccaaatcaacttcaagtcttttatagagaatcgtatttttctttcagaaattgttatgcctacagccattgaaaaatgaagcattcatgttgttacatcttccaaggatgtcagattagaaaatagcatcccacctctgggtatctgagtggctctgaagttgcaaataaaataatttgttgtcaaaaaaaaaaaaaaaaaaaaaaataaaaaattaaaaggaaaataaatccccgccggatccgaccgccactttcaaaaccccccaccgttctagaaccgggggagcttccgtccctgagtagaattcgagggggtaaagaagaggaaggggaaaaatattttgtaccagcccaggggggaaaaagcccccggcttgaaaa

SEQ ID NO: 62407 - DNA, 2577 bp, Homo sapiens
agggggcggtggccttgcctctggctctgaggcggcggcgccgggcgctgcgaaggctcggccgctgtagtcagtggtgtggggtgcgcaagggcacggacctcggagctctccccgcttgcgccgagtttctcagcgccttccccacccaaaccggggtctcgcagtcggaagcactcagagtgcagccccgcgcggggccggtcgtaaccgcgccgcgggccggacgatgcccaagaagctgctgctgttgcccccgccctccgcgtcctcggctttccgcgtcccgcgcgcccgccccgttcccccgccggccatgaacgccgctcgcaccggctaccgagtcttctcggccaactccacggccgcctgcacggagctggccaagcgcatcacagagcgccttggtgctgaattggggaagtctgttgtatatcaagagaccaatggagaaacaagagttgaaataaaagaatctgttcgtggccaagatattttcattatacagacaatacccagagatgtgaatacagctgtgatggagttgctcatcatggcttacgcactgaagactgcctgtgccaggaacattattggggtcatcccctacttcccctacagcaagcagagcaagatgaggaagaggggttccattgtgtgcaagctgctagcatccatgctggcgaaagcaggtttaactcacattatcactatggatcttcatcaaaaggaaatacaaggctttttcagctttcctgtggacaaccttagagcctcacctttcctgcttcagtatatccaggaagaaattccaaattacagaaatgcagtcattgtagctaagtctcctgatgctgcaaagaggtaagtaagctagacatgggtcctgatccctcctgagtgctcccgaagtcagaatgagctgctttggaatccagaggctgtcactcgtggcctttgaaagcccactggctctcatgttaacccctccatcgttgtcatgtcccatgccacacacagctttatctccagcctccagacagcacacatgatcgctgagttgctcagctttcctctgggaaaacaaagttccttcaagttctcagagaaaggaaagcaatgaggctatgagcatttttcaagcaatggtttttttttttgttttttttttgaaatggagtttcattccagcctgggtgacagtgagaccttgtctcaaaaaaaaaaaaaaaatgtctagaatcagatacaatcccaaaccctaactcacgtgccctttgagtcatttacatgctggcctgggcctcacattctcatttatataaataatgcctttgtatgtccctgaaacgttaaatattttcattttatggttaaaaaatgatgccgtagtgatgcgtgggatttcttcctgtcagtttcaccatttccctttgtccttctagggcccagtcctatgcggagagactgcgtctgggtttggccgtcattcacggggaagctcagtgcacggaactggacatggacgatggtcgtcactccccgcctatggtcaaaaatgctactgtgcacccaggcctggagttgccattgatgatggccaaagagaagccaccgataactgtagttggagatgttggaggccgcatcgcaatcatcgtggatgacattattgacgatgtggagagttttgttgctgccgcggagatcctgaaagagagaggcgcctataagatctatgttatggccacccacggcatcctgtctgcagaggcccctcgcctgattgaggagtcctccgtagacgaggtggtggtgacgaatactgtccctcatgaggttcagaagctgcaatgtcccaagataaagactgtggatatcagtttgattctttctgaagccattcggagaatccacaatggagagtccatggcctaccttttccgaaacatcactgtggatgactagctttcacgagggtctcgaccctggacctcctgagggaaacatggaaaaagcagtgccatgagtgatacagtgtttccttgcaagggaggactcgaaacagcctggagttagatatcttcttttgcccggattgatggggaggagggattaaaagagtcaggaagaagacagagctaatggataaatatcataacatggccttacatgtctgctgtcatcagccctgttccttaaaagttctagctgctttcttaaaaataatctgaaaatcttattgatactaaagaggagttaaaggcacataaagtcttaactctataatgttcatttagttgtttcagctccagggaaatggaggtattgatgttgaacctggttagggaagctgagcgcctgtggccctattactatccagttggcctctcccaaatcaacttcaagtcttttatagagaatcgtatttttctttcagaaattgttatgcctacagccattgaaaaatgaagcattcatgttgttacatcttccaaggatgtcagattagaaaatagcatcccacctctgggtatctgagtggctctgaagttgcaaataaaataatttgttgtc

SEQ ID NO: 62408 - DNA, 1942 bp, Homo sapiens
agggggcggtggccttgcctctggctctgaggcggcggcgccgggcgctgcgaaggctcggccgctgtagtcagtggtgtggggtgcgcaagggcacggacctcggagctctccccgcttgcgccgagtttctcagcgccttccccacccaaaccggggtctcgcagtcggaagcactcagagtgcagccccgcgcggggccggtcgtaaccgcgccgcgggccggacgatgcccaagaagctgctgctgttgcccccgccctccgcgtcctcggctttccgcgtcccgcgcgcccgccccgttcccccgccggccatgaacgccgctcgcaccggctaccgagtcttctcggccaactccacggccgcctgcacggagctggccaagcgcatcacagagcgccttggtgctgaattggggaagtctgttgtatatcaagagaccaatggagaaacaagagttgaaataaaagaatctgttcgtggccaagatattttcattatacagacaatacccagagatgtgaatacagctgtgatggagttgctcatcatggcttacgcactgaagactgcctgtgccaggaacattattggggtcatcccctacttcccctacagcaagcagagcaagatgaggaagaggggttccattgtgtgcaagctgctagcatccatgctggcgaaagcaggtttaactcacattatcactatggatcttcatcctttcctgcttcagtatatccaggaagaaattccaaattacagaaatgcagtcattgtagctaagtctcctgatgctgcaaagagggcccagtcctatgcggagagactgcgtctgggtttggccgtcattcacggggaagctcagtgcacggaactggacatggacgatggtcgtcactccccgcctatggtcaaaaatgctactgtgcacccaggcctggagttgccattgatgatggccaaagagaagccaccgataactgtagttggagatgttggaggccgcatcgcaatcatcgtggatgacattattgacgatgtggagagttttgttgctgccgcggagatcctgaaagagagaggcgcctataagatctatgttatggccacccacggcatcctgtctgcagaggcccctcgcctgattgaggagtcctccgtagacgaggtggtggtgacgaatactgtccctcatgaggttcagaagctgcaatgtcccaagataaagactgtggatatcagtttgattctttctgaagccattcggagaatccacaatggagagtccatggcctaccttttccgaaacatcactgtggatgactagctttcacgagggtctcgaccctggacctcctgagggaaacatggaaaaagcagtgccatgagtgatacagtgtttccttgcaagggaggactcgaaacagcctggagttagatatcttcttttgcccggattgatggggaggagggattaaaagagtcaggaagaagacagagctaatggataaatatcataacatggccttacatgtctgctgtcatcagccctgttccttaaaagttctagctgctttcttaaaaataatctgaaaatcttattgatactaaagaggagttaaaggcacataaagtcttaactctataatgttcatttagttgtttcagctccagggaaatggaggtattgatgttgaacctggttagggaagctgagcgcctgtggccctattactatccagttggcctctcccaaatcaacttcaagtcttttatagagaatcgtatttttctttcagaaattgttatgcctacagccattgaaaaatgaagcattcatgttgttacatcttccaaggatgtcagattagaaaatagcatcccacctctgggtatctgagtggctctgaagttgcaaataaaataatttgttgtc

SEQ ID NO: 62409 - DNA, 2142 bp, Homo sapiens
agggggcggtggccttgcctctggctctgaggcggcggcgccgggcgctgcgaaggctcggccgctgtagtcagtggtgtggggtgcgcaagggcacggacctcggagctctccccgcttgcgccgagtttctcagcgccttccccacccaaaccggggtctcgcagtcggaagcactcagagtgcagccccgcgcggggccggtcgtaaccgcgccgcgggccggacgatgcccaagaagctgctgctgttgcccccgccctccgcgtcctcggctttccgcgtcccgcgcgcccgccccgttcccccgccggccatgaacgccgctcgcaccggctaccgagtcttctcggccaactccacggccgcctgcacggagctggccaagcgcatcacagagcgccttggtgctgaattggggaagtctgttgtatatcaagagaccaatggagaaacaagagttgaaataaaagaatctgttcgtggccaagatattttcattatacagacaatacccagagatgtgaatacagctgtgatggagttgctcatcatggcttacgcactgaagactgcctgtgccaggaacattattggggtcatcccctacttcccctacagcaagcagagcaagatgaggaagaggggttccattgtgtgcaagctgctagcatccatgctggcgaaagcaggtttaactcacattatcactatggatcttcatcaaaaggaaatacaaggctttttcagctttcctgtggacaaccttagagcctcacctttcctgcttcagtatatccaggaagaaattccaaattacagaaatgcagtcattgtagctaagtctcctgatgctgcaaagagggcccagtcctatgcggagagactgcgtctgggtttggccgtcattcacggggaagctcagtgcacggaactggacatggacgatggtcgtcactccccgcctatggtcaaaaatgctactgtgcacccaggcctggagttgccattgatgatggccaaagagaagccaccgataactgtagttggagatgttggaggccgcatcgcaatcatcgtggatgacattattgacgatgtggagagttttgttgctgccgcggagatcctgaaagagagaggcgcctataagatctatgttatggccacccacggcatcctgtctgcagaggcccctcgcctgattgaggagtcctccgtagacgaggtggtggtgacgaatactgtccctcatgaggttcagaagctgcaatgtcccaagataaagactgtggatatcagtttgattctttctgaagccattcggagaatccacaatggagagtccatggcctaccttttccgaaacatcactgtggatgactagctttcacgagggtctcgaccctggacctcctgagggaaacatggaaaaagcagtgccatgagtgatacagtgtttccttgcaagggaggactcgaaacagcctggagttagatatcttcttttgcccggattgatggggaggagggattaaaagagtcaggaagaagacagagctaatggataaatatcataacatggccttacatgtctgctgtcatcagccctgttccttaaaagttctagctgctttcttaaaaataatctgaaaatcttattgatactaaagaggagttaaaggcacataaagtcttaactctataatgttcatttagttgtttcagctccagggaaatggaggtattgatgttgaacctggttagggaagctgagcgcctgtggccctattactatccagttggcctctcccaaatcaacttcaagtcttttatagagaatcgtatttttctttcagaaattgttatgcctacagccattgaaaaatgaagcattcatgttgttacatcttccaaggatgtcagattagaaaatagcatcccacctctgggtatctgagtggctctgaagttgcaaataaaataatttgttgtcttgctagtcttttcattagacagcagaagaccatggatacagaacagcagtcaggtctgtggctggacacaaacactttcccaggttccaccctcttcctaagtgttgaagctaaatccttgttgaatactgtattttaaatcttt

SEQ ID NO: 62410 - DNA, 1479 bp, Homo sapiens
gttttgggtaacagatggaaaggcgtgggaggatcacctgagcctcaggaggttgaggctgcagtgagccatgttgacgccactgcactccagcctgggtgacagtgagaccttgtctcaaaaaaaaaaaaaaaatgtctagaatcagatacaatcccaaaccctaactcacgtgccctttgagtcatttacatgctggcctgggcctcacattctcatttatataaataatgcctttgtatgtccctgaaacgttaaatattttcattttatggttaaaaaatgatgccgtagtgatgcgtgggatttcttcctgtcagtttcaccatttccctttgtccttctagggcccagtcctatgcggagagactgcgtctgggtttggccgtcattcacggggaagctcagtgcacggaactggacatggacgatggtcgtcactccccgcctatggtcaaaaatgctactgtgcacccaggcctggagttgccattgatgatggccaaagagaagccaccgataactgtagttggagatgttggaggccgcatcgcaatcatcgtggatgacattattgacgatgtggagagttttgttgctgccgcggagatcctgaaagagagaggcgcctataagatctatgttatggccacccacggcatcctgtctgcagaggcccctcgcctgattgaggagtcctccgtagacgaggtggtggtgacgaatactgtccctcatgaggttcagaagctgcaatgtcccaagataaagactgtggatatcagtttgattctttctgaagccattcggagaatccacaatggagagtccatggcctaccttttccgaaacatcactgtggatgactagctttcacgagggtctcgaccctggacctcctgagggaaacatggaaaaagcagtgccatgagtgatacagtgtttccttgcaagggaggactcgaaacagcctggagttagatatcttcttttgcccggattgatggggaggagggattaaaagagtcaggaagaagacagagctaatggataaatatcataacatggccttacatgtctgctgtcatcagccctgttccttaaaagttctagctgctttcttaaaaataatctgaaaatcttattgatactaaagaggagttaaaggcacataaagtcttaactctataatgttcatttagttgtttcagctccagggaaatggaggtattgatgttgaacctggttagggaagctgagcgcctgtggccctattactatccagttggcctctcccaaatcaacttcaagtcttttatagagaatcgtatttttctttcagaaattgttatgcctacagccattgaaaaatgaagcattcatgttgttacatcttccaaggatgtcagattagaaaatagcatcccacctctgggtatctgagtggctctgaagttgcaaataaaataatttgttgtc

SEQ ID NO: 62411 - DNA, 1866 bp, Homo sapiens
agggggcggtggccttgcctctggctctgaggcggcggcgccgggcgctgcgaaggctcggccgctgtagtcagtggtgtggggtgcgcaagggcacggacctcggagctctccccgcttgcgccgagtttctcagcgccttccccacccaaaccggggtctcgcagtcggaagcactcagagtgcagccccgcgcggggccggtcgtaaccgcgccgcgggccggacgatgcccaagaagctgctgctgttgcccccgccctccgcgtcctcggctttccgcgtcccgcgcgcccgccccgttcccccgccggccatgaacgccgctcgcaccggctaccgagtcttctcggccaactccacggccgcctgcacggagctggccaagcgcatcacagagcgccttggtgctgaattggggaagtctgttgtatatcaagagaccaatggagaaacaagagttgaaataaaagaatctgttcgtggccaagatattttcattatacagacaatacccagagatgtgaatacagctgtgatggagttgctcatcatggcttacgcactgaagactgcctgtgccaggaacattattggggtcatcccctacttcccctacagcaagcagagcaagatgaggaagaggggttccattgtgtgcaagctgctagcatccatgctggcgaaagcaggtttaactcacattatcactatggatcttcatcaaaaggaaatacaaggctttttcagctttcctgtggacaaccttagagcctcacctttcctgcttcagtatatccaggaagaaattccaaattacagaaatgcagtcattgtagctaagtctcctgatgctgcaaagagggcccagtcctatgcggagagactgcgtctgggtttggccgtcattcacggggaagctcagtgcacggaactggacatggacgatggtcgtcactccccgcctatggtcaaaaatgctactgtgcacccaggcctggagttgccattgatgatggccaaagagaagccaccgataactgtagttggagatgttggaggccgcatcgcaatcatcgtggatgacattattgacgatgtggagagttttgttgctgccgcggagatcctgaaagagagaggcgcctataagatctatgttatggccacccacggcatcctgtctgcagaggcccctcgcctgattgaggagtcctccgtagacgaggtggtggtgacgaatactgtccctcatgaggttcagaagctgcaatgtcccaagataaagactgtggatatcagtttgattctttctgaagccattcggagaatccacaatggagagtccatggcctaccttttccgaaacatcactgtggatgactagctttcacgagggtctcgaccctggacctcctgagggaaacatggaaaaagcagtgccatgagtgatacagtgtttccttgcaagggaggactcgaaacagcctggagttagatatcttcttttgcccggattgatggggaggagggattaaaagagtcaggaagaagacagagctaatggataaatatcataacatggccttacatgtctgctgtcatcagccctgttccttaaaagttctagctgctttcttaaaaataatctgaaaatcttattgatactaaagaggagttaaaggcacataaagtcttaactctataatgttcatttagttgtttcagctccagggaaatggaggtattgatgttgaacctggttaggacaagcatgtgtgcttttaggcaaaccacaagtagtaaaagaatcccacctctgattcaagtgtcatattcatgtttgaaaatataaagcatacattg

SEQ ID NO: 62412 - DNA, 2115 bp, Homo sapiens
agggggcggtggccttgcctctggctctgaggcggcggcgccgggcgctgcgaaggctcggccgctgtagtcagtggtgtggggtgcgcaagggcacggacctcggagctctccccgcttgcgccgagtttctcagcgccttccccacccaaaccggggtctcgcagtcggaagcactcagagtgcagccccgcgcggggccggtcgtaaccgcgccgcgggccggacgatgcccaagaagctgctgctgttgcccccgccctccgcgtcctcggctttccgcgtcccgcgcgcccgccccgttcccccgccggccatgaacgccgctcgcaccggctaccgagtcttctcggccaactccacggccgcctgcacggagctggccaagcgcatcacagagcgccttggtgctgaattggggaagtctgttgtatatcaagagaccaatggagaaacaagagttgaaataaaagaatctgttcgtggccaagatattttcattatacagacaatacccagagatgtgaatacagctgtgatggagttgctcatcatggcttacgcactgaagactgcctgtgccaggaacattattggggtcatcccctacttcccctacagcaagcagagcaagatgaggaagaggggttccattgtgtgcaagctgctagcatccatgctggcgaaagcaggtttaactcacattatcactatggatcttcatcaaaaggaaatacaaggctttttcagctttcctgtggacaaccttagagcctcacctttcctgcttcagtatatccaggaagaaattccaaattacagaaatgcagtcattgtagctaagtctcctgatgctgcaaagagggcccagtcctatgcggagagactgcgtctgggtttggccgtcattcacggggaagctcagtgcacggaactggacatggacgatggtcgtcactccccgcctatggtcaaaaatgctactgtgcacccaggcctggagttgccattgatgatggccaaagagaagccaccgataactgtagttggagatgttggaggccgcatcgcaatcatcgtggtatggttatatgtcatccatgtgcagaggtggcactcctggctcttggtcagtaggttgtccactctgggactgtatttctaggaacgatgatccgaatggatccatgtatcctttctcacccaaactcccttgtgccaagtggcagaaacctgtatccaggtgaacatacattaaagtataacctacagataggaaatgagcacagtactcccgtgagaaaattcagcaccttcaccttcatcatgtggattctaggttctttaaaccagctcacctaatcatgcttgagcgttagggccgaaagatgaactgaagatgagctgttccgttttcacaagtaagaatgggtgtccccgtgcagactcgttctgcatgttgacatactttttttcccagctctaaatatctgctggctagtgggtcatgagtcctttgcagtagcacactttatttcagttttcttctcatgtcacagtctatttgaaaaaaaaataaatggaacgctggctatgtgggattcaccagaaacgtgagacaggaaaatgagtgttggcaatcctcagctccagccgtaatgtcacaggtgcttgactgcgcccgcctctgacagacacacaaggtactgtcaggtgcttctgttgccatttctggatgctcgttctttgacccaggcacacagctctgattttccatcagaaatcctctgaaactgagtgcagaagagagtagagtggtgtgtgcattgacagtatgggctagagggtgtttctttcctaccaactcactctgttctcctcccaggatgacattattgacgatgtggagagttttgttgctgccgcggagatcctgaaagagagaggcgcctataagatctatgttatggccacccacggcatcctgtctgcagaggcccctcgcctgattgaggagtcctccgtagacgaggtcaggctgcttctaaatcttgagccaagatttactgctgtgttttctgggaataataaaatgattcagtcaatactaaaaag

SEQ ID NO: 62413 - DNA, 831 bp, Homo sapiens
aaatccggtgacctgagaggatgttgttacatgaacatcttagtaggtgaaatggaaaagagtcaggggagaaagtgagtcatcacagaattcatcaacctccaaggagcttgtgccttctcatcagcaacacattcaccttggaactggggactgagtttcaataaaccaccatctgtctgccaggtcactaatttcagtttttattgtctataagagtttcgtttgtatgtaaaatcaatgatataataaaatatacatatatatccagtctttgtccctagttcctggagcagagcttcaaaaacctgtggaatttcctgaacgttaggagtgtcttttgttaacaagcctcttttaggggccacatatgagtttatgcttgtgaggtgatggggcagggtgtggatagcttcaggatgagggctggtccctagaaaaactaaccacatgatcagacggttggaacttccagctcccccatttgacctctatccaaggaggggagtgggctggagactgagttcaatcctgcagccagtaatttaatcaatcacacatacataatgaaacccaatacaaactgtgaacaccaagggttggggagtccccaaattcatgaacagatgaatgtacagagagggtggtacacctgactccccagggacagaagctcctgcacttgggaccctttcagaccttgtcctgtgcacctcttcaatggctgtccatcaattcctttataataaaatggtaatcataagccataacactttcctgagttctgtgagtcattttagcaaattatcaaacctaaagggaggtcatggg

SEQ ID NO: 62414 - DNA, 290 bp, Homo sapiens
tgaaaaccacctcaaggacacaacaagccatagagggtttctacaacttgtgtttttccagggtatgccctcaagctctggtccaataaacctcaattgattcagacacaaacctcaactgattcagacacttgaatcaggcactcaatttggttaacattttgccaaccatgaagggggtcctcttaatggagtttagaacctttgacctgcagtgcttcttttgttcatgctcagtaccaactatagagctttagttgtgaccagtcatgtgactttctgagaattgg

SEQ ID NO: 62415 - DNA, 458 bp, Homo sapiens
gtttaccttatgttatcagttcctaatatgtgacgtatgggccacagatgctggtgtattatttcacatgcatttatatagattgttttcagggaattcagaaattctgttatctctacactagtgattgtgctttcttgatttttctcttttcattattcttaaatcctccctttttttaatttgcatctcagttcgtttatactcgggaagtgcaagacatggctactagaaagagatgtcaagagaaccggaatccagtaggctacaatttggcaaatcttagcttaaaacttcctaaatgttgaccacagtggatgcaaatggctctgtgcatcgtctgttcaatatggtcaggtgaccacccaggttcacgtggtttgtcaccagggtgacacgagccacacggagtgccctcctcagaggccatgtctcagagacgtttattttgagtggtt

SEQ ID NO: 62416 - DNA, 301 bp, Homo sapiens
gaaaatgaactttgtttgaaaagttagtatgggttagaaatgggaagaaaatctaaaatgtaagagtaaaagcaaggccttcatggcattctcttttaatatgggcttttctgtgttagttaacatctgataatatgaccccccaatctattaatatttattatactcataaaattacagaaaaaacctaagaaagggtatgtattgaagtggaatgaataaatgcaaaaaatgtagtacttataacattttgaagaaaatctttaaaaatttttgtttacacagaaaataatcttagaaa

SEQ ID NO: 62417 - DNA, 271 bp, Homo sapiens
gagccagcataccactgtgtgtataattaatttaaattcaaattaacaaattcaatgcatttatgtattcaagaaacaaatattcatttagtatctacaacgcagaatggttgctgccctcttggaacagggtcccagcagaaaacagaaagcattctgtatgctttctgtttccttaagaaacagaaggaaaattcaatgaagggactatttacaaaggtgtaaacaagtttaaggaaatacaaagagatgctgacacgtctgtgaatat

SEQ ID NO: 62418 - DNA, 275 bp, Homo sapiens
acttttatggctgctttcacttggctccatgttctgctgataattaaacagtttgtgtgtcctgtctttcctcaaaggaacttgtcaacctttggaattttgttcatctcagagggacgtcttaagtactcagctttctgaatgtttaagaaaaaaataatacttttcagaattacctacctctttctcatttttagcctgggatcaatattcccttcacactttttacatccgaagtagaaataaaactcttatctattttttttcagtattgg

SEQ ID NO: 62419 - DNA, 540 bp, Homo sapiens
caaaatttcctgtatcctttcatgggttttcttttgtttgttttggtaagaacatttaacatgagatgtatcttttagttgttgttgtggttgaacttttttagatacatagtctcactctgttacccaggctggagtgcagtggcatgatcacagctcactgcagcctcaaactcctggacccaaatgatcctcccacctcagcctcccaagtagctaggactacagatgtgcactaccatgcctaacttcttaacatattttaaggtgcacaatatcctattgttaaatagttactatgttgtacagcagatctctagaatgtattcatcttgcataacaaactttatacccattgaaaaacaattccttgtagaaatccatttttaaagtgtctttttcaatcctaaacttgctccttttaatgtgagaacaaagcattcagattgatattttctttcattaagaccaaactctccccaaaagcttaatccttgaattgtaatctaaaggtcaaataaattagtttctggtataaac

SEQ ID NO: 62420 - DNA, 356 bp, Homo sapiens
aatgagtgaggcaagacagccctgaggatggggaaggacatgatggacggagaagtcagcccagggcaggggcacagtggctcagcttctgaaaccaaagaatggaaaagagggtctctttcccatggatgaggggcccagcaccatggccagggccacagccacctcgtgccacacagcagccaaaccaggcccccccaccatcacatatccccttccaccaaggtgtccagccagcaccgatgcaaaggagctggtcccaggcctttcccagacccaccgtggtcctgccggcctcccacaggcggcctgtgagcgccaacaaggagatgttctcgttcgtggtggacgacgcc

SEQ ID NO: 62421 - DNA, 907 bp, Homo sapiens
tagactaggtactttatactatacatatattccacttactacatataataattctataaactagaccttgatatggtcattttatagataaaagactgagactctgaaagcgtaaacaatatgctcaaggttgctaagggtttcagacagatttgaaattcaagcccaggtctatctgactccaaaacctgcatacctgagcccagaaacaaacgctaatataatatttagcttactgaaaatgaagcataaaaaatcagtacagaaaagaatattcaattaatggtattgggacaactagctgtcatatctcagggtgggaaacaatcttctaaacacaaaaacaattagagacaccaagagaaaaagaaaaaccaaatattataaaaaatattcaaattctggaaaaaagcaattaatattaaaaagcaaaataacaatcagaaaaacatgtaaaaaattgaaatgaaaagctgatgtgttcaaacaaagagatcataaattcaatatgaaaaaagcaacaaccacaaaaaagggcaaaggacattaatcaaataaaatatacatgggctgggcacggtggctcatgcctgtaatcccagcatttcagaggccgaagagggtggatcacttgaggtcaggagtttgaggccagcctggccaacatggtgaaaccccctgtctctactaaaaatataaaaatgatctgggcgtggtggcacacacctgtagtccccgctcctcaggaagctgaggcaggagaatcgcttgaacccgggaggtagaggttgcagtgagccaagactgcgccactgcactccagcctgggcaacagagcaacacttcatctcaaaaaaattataataataaaataaataaataaaaataaaatgatatatgtattaga

SEQ ID NO: 62422 - DNA, 617 bp, Homo sapiens
tgtctgaaaaagtaatccatggtaaggtaaaatgactaatgaaggtaaataaagtctagggatatttcatttgcagtgctattgttctttgctaattcaaatgaatctctaatatagttcacagaatgataaaacaattgcattataaggttcatctaaagaatgctgttgcttccccagggtgaatgtagtaggtggctggacccggctcataatggcttgggaaagagggctgtgtgtagctcttccaagtccagttcagtgatgccacgcgatagcttaaaatagcccgtggtgggagaatttacaccatcaagattcagaaatgctaaaaatcgctgatttttttcctggacaattggttgataagcatttatcaggacatcactgattgaattaaataatagaatacatttttatattgttgggggagtattgtagtactggtgaagaatcagagtgtcataaaatcccaaagggaaatagctctcccacccatccaaaaacattttatttctacacaaaatttcattttaaaaaagaatcatactgccaaaaaaaatgtttaaaactactactttttaacatctctgaaaagtgattccctatccccattg

SEQ ID NO: 62423 - DNA, 255 bp, Homo sapiens
gaatgaagaactgattttatgtaaaatcagaaccagcaaagctctgcaacctgtgcaatatgcatgttttctaaaatagcctccatctccatgtgagtgagctcagcttcatagctcctcatttcttacaggacaggagctaaactaatatggcgcttagctctaggtctttccttttagcccctgtgtgtattaactttcagctgtgagtcccagctaaatgatacatgtcaatatgtagcaatcagaaaaggt

SEQ ID NO: 62424 - DNA, 206 bp, Homo sapiens
ggtggggaatgtaagagcactctttgtatttattatttctgacgactatgtgtggctacaattatctcaaagtaaaaagtgtttaagatataacaaacaaaaccacaggtcttccctaggcttagaaatacacctttctactggcatcacatctcaagacaactcaggacaatgtgattaagggctggctgcagtgcctcacgcct

SEQ ID NO: 62425 - DNA, 252 bp, Homo sapiens
cttattcaacattttttcaacagctgtagagtatcagatactgtgatatatactggtgatacataaatcaataagcctgcactagcaggactcagagtctggtggaaaaagataaatttatataaatatttataatgtaaataatgaattaaatactacctaaattgaaccatatgtaattataaatatcaaccattttttaccaaaaaatggcaatttgatatggtttaattaatatacttaatgtccttt

SEQ ID NO: 62426 - DNA, 383 bp, Homo sapiens
aaaaagattcccatcaaacattaaagaaaagcccagggctgcatggctttactgctcaattctatcaaccttataaagaagaactagcatcaattcatctcaaactattccaaaaaattaaagaagagagaattcttcctaacttattctacgaggccagcagtactctgatacaaaaccagacaagcacacaacaaaaaaagaacactacagaccaacatctctgagaaatacagacacaaaaatttttaacaaaacactagctaacaaaaatccaacaacacaacaaatatataatacaacatgatcaagtgggatttatcccagggatgcaaggatgggtcaatatatgcaaatcaattaacacgatacatcactttagt

SEQ ID NO: 62427 - DNA, 392 bp, Homo sapiens
ttaaacattgccaacaaatagcaaaaatgggccctgattctatagcaatgaaatgctctttttcttgcacaattttcagtttaatctcctgacttgactttctatttccagcttctctcctctgtctcttgtttctctcctgccacatccatcccactcactgttgtcagaaccttccatcactgtccctgtcacaaccacttttggtggctcccactgcctgtggcttaaggtctaatctccttagttcagccgtcaaggcccggaagagatgagtttcactcatcctacagccattgagcttgtaataaaatacttctttaagaaaactgcaagcagctgagcacccaaaaaattctggtgaggatcaccttatagttcagttaaaaaaa

SEQ ID NO: 62428 - DNA, 482 bp, Homo sapiens
gcgtaaaacatcaatttattggtgaataaatagaatggagcagagatttttgttcttgaggctcttgccctaattaccatcttgtgtaaaagctgttgtgatccacattctcctagaaattcaggatacttcagggtatcgtaaaaccaggacttgaaatgattgacaaaattaagaattcaaagacaggatacccctgatttgattatgtgaatgtatcaaattatcacatataacataaaaaatgtgtacagctattatggctgggctcagtggctcacacctgtaatccaaacactttgagaggccatggtgggaggatcacttgagcccaggagtttgaggctgcagcaagctgtgatcatgtcactgcactccagccttggcgatagtgccaaaccctatctcaaaaaacaaaacaaaaaaaccagaatggctaaaagataaattcaggagggtcgatggagcaagactctgtctca

SEQ ID NO: 62429 - DNA, 216 bp, Homo sapiens
ccagatgaatgaattgtcacagtggtgaggactgacttccaagggaccaccctcatttcttataagaattaagaaatataatcctagcaaagtctttttaaaatttgaggctaaagcaggtcttcagttttgtgtctttgtacctttcaaatcaatacttatttatagtacatgcaaaacagggcttgtgtgaattttttatgtggtcagaatatg

SEQ ID NO: 62430 - DNA, 195 bp, Homo sapiens
  misc_feature (1)..(1): n is a, c, g, or t
ncctcaataatcatgatttaaaacttacctaataaaagacaacttcagattcctaacgttcaagctctaagatatctggggagagggtgtccaatgttttgtgaacagctctttgagacaatgctgctggaaccatcctgaacaatgacaatggagaataatgtttttcctcttctccagcagcctgccccaagt

SEQ ID NO: 62431 - DNA, 308 bp, Homo sapiens
actatgtaaaaagtgccttttgccttccaccatgattgtgaggcctctccagatacgtcgaaccgtagaaattcagaaattcagtgtgtaaaatggtaaagcggattgaagttgaagatattagatcatttaagaagtcaataaatgaagtaataaacatgcgaatgagaagactgatgatgaagaggacctttaaaagtgtatttctgttacggttattttttttttaaagtgatttgaagccatttataatgattgctaagtggcatgctaaagttttaaaaacaaataaagcattaaaaaataag

SEQ ID NO: 62432 - DNA, 390 bp, Homo sapiens
cagggtaagactgaaaaaaggaaaagaaatgaagcaaaattgctagtaggcctttaaaaaaaaattcttttacagcacatataagtcatagtgctgacaaggaattttaaatagaggccaggtatctattttcctccttaaaagtaatccttgtctctgtaaatgcctcatttgttgagtgtactttttagatttaaataatctttagtacaatttttctcttgattgcagggtttgaagatgagaaattgagcaggtcgatgcaggtgtaacttagcagacagaccattatttccttgtataaactcatgccatcaactcttcaaccagaatgtggttgcagaggcattgaacagattttataattatgagtttatttcatggggtgta

SEQ ID NO: 62433 - DNA, 780 bp, Homo sapiens
gcgacaccatagaatggaagcttttaatcaatgtgaagagattggaaatatgaccatgaaaagacctgagatgacttggaaaaaaatactgttcaactcatgtaaattgctatacttatttttagcacaaattgttactttttcatggttgacatccttttttttttcttgttcaatctagaaggcaaaaacatgcacaaaaatataaggctgccttacctaggtccaaccaactcctcttgtcttgatcttccctgaggtctctgtagcctccttggagccctgcaaagtgcctcaaacaacagcttttcctcccattcagccaacactgatctctagatcagcacaaccattgctttccactctgcctaaggctggccacttttttcttttttccattacattctatgtgtcggaccgttctaaatacattttaggataaatggactctaatggaacaggaagcgtgcaaactcaacattagtaagaagggatatggataagagactggacccattcgaggcaatcagagagcatctcctggagaagatgcatttttcccataatcatttccttactgttctactttcttctctgtagagcatttcagcaggctcagccactccaatctagtgcatttaggaagacaccttacactggactcagctgtttaatctggatgccctcgcccatctgaagtcgggcgggggcggagggaatcttaacaacttctccataacataaatattgtatttgattaatcttgatgaaaagtttgtt

SEQ ID NO: 62434 - DNA, 417 bp, Homo sapiens
ccagtgtgatgaggctgggaaattcacgggcatggttcagaactctgcttctcagatccatttcataacaacttaatatgctcaagtattttctgaggggcaagactgtcctacagcatagattaagtggtccaatttttgcctctgggagaaggaaaaaaatatccaagtaggtagacaactattcaaaagaaacattgcatagatgcttagctttggcaatgttctgatgctaagcaggggtggagagggtggtgcagagctgcgctctgaagcctggggaagcaggctgggctgaaagctgggaagaacttagatcagatgcgatgctgcctaatcaaggttaagacttagcctgttaccagggagaagaagaaagagccagtgaatctgactacataattgctatttctttca

SEQ ID NO: 62435 - DNA, 1069 bp, Homo sapiens
gacacagcccgggtcgcaggcacctccccgccagctctcccgcttctcgcacagcttcccgacgcgtctgctgagccccatggcccacgccacgctctccgccgcccccagcaatccccggctcctgcgggtggcgctgctgctcctgctcctggtggccgccagccggcgcgcagcaggagcgtccgtggtcactgaactgcgctgccagtgcttgcagacactgcagggaattcacctcaagaacatccaaagtgtgaatgtaaggtcccccggaccccactgcgcccaaaccgaagtcatagccacactcaagaatgggaagaaagcttgtctcaaccccgcatcccccatggttcagaaaatcatcgaaaagatactgaacaaggggagcaccaactgacaggagagaagtaagaagcttatcagcgtatcattgacacttcctgcagggtggtccctgcccttaccagagctgaaaatgaaaaagagaacagcagctttctagggacagctggaaaggacttaatgtgtttgactatttcttacgagggttctacttatttatgtatttatttttgaaagcttgtattttaatattttacatgctgttatttaaagatgtgagtgtgtttcatcaaacatagctcagtcctgattatttaattggaatatgatgggttttaaatgtgtcattaaactaatatttagtgggagaccataatgtgtcagccaccttgataaatgacagggtggggaactggagggtggggggattgaaatgcaagcaattagtggatcactgttagggtaagggaatgtatgtacacatctattttttatactttttttttaaaaaaagaatgtcagttgttatttattcaaattatctcacattatgtgttcaacatttttatgctgaagtttcccttagacattttatgtcttgcttgtagggcataatgccttgtttaatgtccattctgcagcgtttctctttcccttggaaaagagaatttatcattactgttacatttgtacaaatgacatgataataaaagttttatga

SEQ ID NO: 62436 - DNA, 1885 bp, Homo sapiens
gacacagcccgggtcgcaggcacctccccgccagctctcccgcttctcgcacagcttcccgacgcgtctgctgagccccatggcccacgccacgctctccgccgcccccagcaatccccggctcctgcgggtggcgctgctgctcctgctcctggtggccgccagccggcgcgcagcaggagcgtccgtggtcactgaactgcgctgccagtgcttgcagacactgcagggaattcacctcaagaacatccaaagtgtgaatgtaaggtcccccggaccccactgcgcccaaaccgaagtcatagccacactcaagaatgggaagaaagcttgtctcaaccccgcatcccccatggttcagaaaatcatcgaaaagatactgaacaagtgagttgtaatttccatatacacaggcgactggagccgttggtcagaaatactggcatctgccccctaaaaataaaatcagggaaccccaagagttagctgaaggactagaaattgtgattattattttcacaattaaagttgccattaaggttattaatctgctctggtgccagaggatatttcagtatttcagtgtcttccatttccaggcctaacccctgggagggtaaatgtgggtttctagaatactaagtaaatttgactaacaatgccaaaatgccccctgcctgttttgggacgtttacctcagtccctaatgggcttcagacctgaaaaatgcaatgtctggtttgggcactttgggcctgtaagccttcttggtgaagagcagaaactttgcagtaacaccttcagtgagttcaaggctaggatccctgtcaacattatttaatctctttgagctttagcaaaatagggtagataatggtagttatttcatagggttgtgtgcagcttaagggagatcatgaatggacatttctaacccaatgtgacaatcagtgaccaatatgttttggctttttcaaaccaagaatctagttgagtccacagccacttctttcttgaaaaaaaaaaaaaaaagcattcaggagtgcaagttttctgctatagaaggcagtgggtacagacagaccttccctgagtggagggctgggagagagtctgcatggggacatccctccaagcaacttcagagtgacagaagagcagccttccttagcacctgcaacagtaacccttttctcatcacagggggagcaccaactgacaggagagaagtaagaagcttatcagcgtatcattgacacttcctgcagggtggtccctgcccttaccagagctgaaaatgaaaaagagaacagcagctttctagggacagctggaaaggacttaatgtgtttgactatttcttacgagggttctacttatttatgtatttatttttgaaagcttgtattttaatattttacatgctgttatttaaagatgtgagtgtgtttcatcaaacatagctcagtcctgattatttaattggaatatgatgggttttaaatgtgtcattaaactaatatttagtgggagaccataatgtgtcagccaccttgataaatgacagggtggggaactggagggtggggggattgaaatgcaagcaattagtggatcactgttagggtaagggaatgtatgtacacatctattttttatactttttttttaaaaaaagaatgtcagttgttatttattcaaattatctcacattatgtgttcaacatttttatgctgaagtttcccttagacattttatgtcttgcttgtagggcataatgccttgtttaatgtccattctgcagcgtttctctttcccttggaaaagagaatttatcattactgttacatttgtacaaatgacatgataataaaagttttatga

SEQ ID NO: 62437 - DNA, 1705 bp, Homo sapiens
cgtgttggtgaggtcgatctcgaattgcctgacctcaggtgatgcctccgcaccttggcctcccagggtgctgggattacaggcatgagccaccaccccatcttgcgcccaaaccgaagtcatagccacactcaagaatgggaagaaagcttgtctcaaccccgcatcccccatggttcagaaaatcatcgaaaagatactgaacaagtgagttgtaatttccatatacacaggcgactggagccgttggtcagaaatactggcatctgccccctaaaaataaaatcagggaaccccaagagttagctgaaggactagaaattgtgattattattttcacaattaaagttgccattaaggttattaatctgctctggtgccagaggatatttcagtatttcagtgtcttccatttccaggcctaacccctgggagggtaaatgtgggtttctagaatactaagtaaatttgactaacaatgccaaaatgccccctgcctgttttgggacgtttacctcagtccctaatgggcttcagacctgaaaaatgcaatgtctggtttgggcactttgggcctgtaagccttcttggtgaagagcagaaactttgcagtaacaccttcagtgagttcaaggctaggatccctgtcaacattatttaatctctttgagctttagcaaaatagggtagataatggtagttatttcatagggttgtgtgcagcttaagggagatcatgaatggacatttctaacccaatgtgacaatcagtgaccaatatgttttggctttttcaaaccaagaatctagttgagtccacagccacttctttcttgaaaaaaaaaaaaaaaagcattcaggagtgcaagttttctgctatagaaggcagtgggtacagacagaccttccctgagtggagggctgggagagagtctgcatggggacatccctccaagcaacttcagagtgacagaagagcagccttccttagcacctgcaacagtaacccttttctcatcacagggggagcaccaactgacaggagagaagtaagaagcttatcagcgtatcattgacacttcctgcagggtggtccctgcccttaccagagctgaaaatgaaaaagagaacagcagctttctagggacagctggaaaggacttaatgtgtttgactatttcttacgagggttctacttatttatgtatttatttttgaaagcttgtattttaatattttacatgctgttatttaaagatgtgagtgtgtttcatcaaacatagctcagtcctgattatttaattggaatatgatgggttttaaatgtgtcattaaactaatatttagtgggagaccataatgtgtcagccaccttgataaatgacagggtggggaactggagggtggggggattgaaatgcaagcaattagtggatcactgttagggtaagggaatgtatgtacacatctattttttatactttttttttaaaaaaagaatgtcagttgttatttattcaaattatctcacattatgtgttcaacatttttatgctgaagtttcccttagacattttatgtcttgcttgtagggcataatgccttgtttaatgtccattctgcagcgtttctctttcccttggaaaagagaatttatcattactgttacatttgtacaaatgacatgataataaaagttttatga

SEQ ID NO: 62438 - DNA, 229 bp, Homo sapiens
gagcgtccgtggtcactgaactgcgctgccagtgcttgcagacactgcagggaattcacctcaagaacatccaaagtgtgaatgtaaggtcccccggaccccactgcgcccaaaccgaagtcatgtaagtcccgccccgcgcttccgctgccaccgctggggtccccgactctcccgctgccccaaccctgtccccagcccgacctcctgtctcacggaattcccttct

SEQ ID NO: 62439 - DNA, 1167 bp, Homo sapiens
gacacagcccgggtcgcaggcacctccccgccagctctcccgcttctcgcacagcttcccgacgcgtctgctgagccccatggcccacgccacgctctccgccgcccccagcaatccccggctcctgcgggtggcgctgctgctcctgctcctggtggccgccagccggcgcgcagcaggtgggtcccggcgccctggggtccccgggccggacgcggctggggtgggcgccccgcgccgacagccccgctcaatcagcgagtctattcttccctaggagcgtccgtggtcactgaactgcgctgccagtgcttgcagacactgcagggaattcacctcaagaacatccaaagtgtgaatgtaaggtcccccggaccccactgcgcccaaaccgaagtcatagccacactcaagaatgggaagaaagcttgtctcaaccccgcatcccccatggttcagaaaatcatcgaaaagatactgaacaaggggagcaccaactgacaggagagaagtaagaagcttatcagcgtatcattgacacttcctgcagggtggtccctgcccttaccagagctgaaaatgaaaaagagaacagcagctttctagggacagctggaaaggacttaatgtgtttgactatttcttacgagggttctacttatttatgtatttatttttgaaagcttgtattttaatattttacatgctgttatttaaagatgtgagtgtgtttcatcaaacatagctcagtcctgattatttaattggaatatgatgggttttaaatgtgtcattaaactaatatttagtgggagaccataatgtgtcagccaccttgataaatgacagggtggggaactggagggtggggggattgaaatgcaagcaattagtggatcactgttagggtaagggaatgtatgtacacatctattttttatactttttttttaaaaaaagaatgtcagttgttatttattcaaattatctcacattatgtgttcaacatttttatgctgaagtttcccttagacattttatgtcttgcttgtagggcataatgccttgtttaatgtccattctgcagcgtttctctttcccttggaaaagagaatttatcattactgttacatttgtacaaatgacatgataataaaagttttatga

SEQ ID NO: 62440 - DNA, 170 bp, Homo sapiens
ggactggaggactagaggtcagtggtcagagagagacttctcaatccatagactcatttctatttaaatgtttaattatgtatatgcattactgtgcacaacagttgtatgcagatgcagcctaatggcatctcctcttgacaaccctgagcatctccgaaccgatgtcc

SEQ ID NO: 62441 - DNA, 373 bp, Homo sapiens
cgcaggggctgggtcgcagccaggaggaaagggctcgcccctgcccccgggggcccctctgataagcaggggtgcaggcaaggagggaggccccggcgacagggccgcccacgcggactttctgcccgcagaggagggggcacacgggatggcggctcccacgggtctcctctcatagctccgcttcccacctacccgcaccctccctcgggtctgttccccttgggtgcactccccttagcgcggcctaggcaccaaggagctgctctcggcagtgttcacgagatacaatgaattgaccagatctgtcataactgatggccgttccttcagaagctcattccagtcgccccacttcccactactgcctttg

SEQ ID NO: 62442 - DNA, 479 bp, Homo sapiens
ctaatacaacttggaaagacttacaaccagttgtcaggtttattttccatcattccgtcttctcaaaataggttggtgtgattctctgaaaacatggccattattgaataatgttactgtcttatattttgtttcttatagatagcagtatcagtatacttttccatagaaaatactgtgtgacttcatgaccttggtgacaattttatgtttgtacaataaacacatttctgctgtgagggatgatacatgcaggctgtagggcatcaggcgatcaggggatgtgaaggtaattgtaggctgatcactgtaggctgaacacctcaaatttttgagagcttgtcctattaattatccaaaatttctgagcattcttttctagcagtaggagagtaagaaattataaatttgattttgattaagaggcctttctcctttttcaacagtgttgatttttaaaaagtcttaaaaaaaaaaca

SEQ ID NO: 62443 - DNA, 883 bp, Homo sapiens
  misc_feature (555)..(555): n is a, c, g, or t
  misc_feature (803)..(803): n is a, c, g, or t
  misc_feature (825)..(825): n is a, c, g, or t
  misc_feature (833)..(833): n is a, c, g, or t
  misc_feature (841)..(841): n is a, c, g, or t
  misc_feature (854)..(854): n is a, c, g, or t
  misc_feature (856)..(856): n is a, c, g, or t
  misc_feature (859)..(859): n is a, c, g, or t
ggccgaggaggtgccgagagtgagcgagggctgccagggctgccagcgtgctgtcacctctcaacaccactgcgtggtccttgggctgggccatcccgggcaagtctctggtaaatggtgagcgtggtgtgtatcgctgtggtgcaggcagggaggtgtaggggctggatgcagagtgagcaggtgccatgaggacagcagcctgccagcctgagtgcctcagccatgggcaaggccatgtctctctttcctgaaacttgttcctgtggcgtctttcagtttatagaggtagagagtacagtcaagcggacccgcaggtgccagtcacctgcttcaacagtgaagcttttgctaaccttgttttatatctcacatgcatgtgtatccgagtaacctttaaaaatctcggacatcgggaaatttcacctgtaaatgctccagtttgtgtctaacaaacttttatttttataacaccatgctttatctcacttaaaaatatctcacttaaaaattatatagccatttcttaacatcctgtattcgttcttatccatntggccatttccccaattttcgaaacaagtctctacagatgcgtggctcacatcaggagcccacgtgccatggggctgctgtgtccctgaagccccctttcctccatccgttttgctcccaggcctttgactggtcagagaaactgatgcctttgcccacaggaggcccctcagtctagacttggctggatttttccccaagtgcaacagtctcccttgtgggaaggcttttgataatgaattcagttnctttgataaaaagctattctgnttctctgntttcttgnttctatttcatangntgnattttcttcttctctctttttttt

SEQ ID NO: 62444 - DNA, 180 bp, Homo sapiens
taattaactcaaatagcttcatgtggctagctgccgccctgtagaacagcacagttctagaactttcgagaccttctccctgttatccacacttactttacagagtagactcagcacttcgagtcccctgtccttcaggccaggccaaaccttggtccccagagcccagtgtggcagagg

SEQ ID NO: 62445 - DNA, 301 bp, Homo sapiens
ttagcctaactctaatctgattcattttataactcatataatattctaattttatagggtagaaagttgttttagttgtcatgactgcttgtagttagccacaaaggtaaacgtttaactcttaatatggaatgagatatttaccttcctctaattgtggcattcatctctttatgttagatttttaactactgttctggttcattccacatagttttcttttcattgaagagttgtcctacaaccttttgtcccaattaatatctctacttacattgtggtactttctataatttgactg

SEQ ID NO: 62446 - DNA, 427 bp, Homo sapiens
tggctttcatgtcgtcttcacagcaagagatgaggattgagggaaacacaactttgttatttctgctgcttttatgatatgtttaaagaatataggatgccctgaaaatgttaaaccattttccttattaagattactgactaagggccgggcgcgggtggctcacgcctgtaatgccagcactttgggaggccgaggcgggtggatcacgaggtcaggagatcgagaccatcctggctaacgcggtgaaatcccgtctctactaaaaatacaaaaaattatctgggcgtggtggcgggcgcctgtagtcccagctactggggaggctgaggcaggagaatggcgtgaacctgggaggcggagcttgcagcgagccgagatcgcgccactgcactccagcctgggcgacagagcgagactctgtctc

SEQ ID NO: 62447 - DNA, 406 bp, Homo sapiens
atgcagtttcaattcccagagtgtgtcagtcatcttgtgactgtgagacaaagaccaatggaatgacagagatataaattgtgccctggagaggctaaacccctgccagcagctatcaattttcatattcctcatttcctgagaaaaggaaatcctaattggtataagcaaatttttaaaggcaatgttgtgtaatggttaatgacagcagctcttgcacaagacttcccagattcaaataccaacagtaccacttactagctgggtcagttggagcaagctacttaatctacctctgccttgattttctcctgtgcaaaatgggggtctcttgggctttgagggcttttctggtaccaaagtgccacagacaacattgctccattggaaaaaaccatttcaattc

SEQ ID NO: 62448 - DNA, 1272 bp, Homo sapiens
tccgctcctcccgccgcggcgcccgcaccgcagtgacagccagccgggcccggtggcggagaggaagtgcggtccgcgccaagcccgtccccgccgacgccggctccccgcggctcgggtgacagcgtcgcggccgccggacgcagcgcggggcaggcgcgggcagagccgagcgcagcggaggctccggcggaggcgcggggaaaatggctgatgactttggcttcttctcgtcgtcggagagcggtgccccggaggcggcggaggaggacccggcggccgccttcctggcccagcaggagagcgagattgcaggcatagagaacgacgagggcttcggggcacctgccggcagccatgcggcccccgcgcagccgggccccacgagtggggctggttctgaggacatggggaccacagtcaatggagatgtgtttcaggaggccaacggtcctgctgatggctacgcagccattgcccaggctgacaggctgacccaggagcctgagagcatccgcaagtggcgagaggagcagaggaaacggctgcaagagctggatgctgcatctaaggtcacggaacaggaatggcgggagaaggccaagaaggacctggaggagtggaaccagcgccagagtgaacaagtagagaagaacaagatcaacaaccgggcatccgaggaggctttcgtgaaggaatccaaggaggagaccccaggcacagagtgggagaaggtggcccagctatgtgacttcaaccccaagagcagcaagcagtgcaaagatgtgtcccgcctgcgctcggtgctcatgtccctgaagcagacgccactgtcccgctaggtgcctgctaggtgcatggccacagagcatgggctgggcctgggcacaggaggagcagctgctttggtcggggtggagactcgcagcagctgctacccacagcctattccactcctccccatctccaggcgctgggaggggggccctcaccccatcacgcctcgctccctcctggccctctggtccagcccctcacgcctcctctcagtctactcaattgtgactgtccctcctgatgtattttttttcttggcttaaagggtgtgttgttgactctttttacacttatttattatcattctcacttctctggaagccacaactggtgtcagggctcggtttgtgcttagaactttcccagcttcatgaccttgagagaagggagaatgttcccccatttcccagccaagtgggagccccaagctctcca

SEQ ID NO: 62449 - DNA, 5932 bp, Homo sapiens
  misc_feature (2)..(2): n is a, c, g, or t
  misc_feature (6)..(6): n is a, c, g, or t
  misc_feature (958)..(958): n is a, c, g, or t
  misc_feature (1850)..(1850): n is a, c, g, or t
  misc_feature (2277)..(2277): n is a, c, g, or t
  misc_feature (2532)..(2532): n is a, c, g, or t
  misc_feature (2536)..(2536): n is a, c, g, or t
  misc_feature (2639)..(2639): n is a, c, g, or t
  misc_feature (2641)..(2641): n is a, c, g, or t
  misc_feature (2651)..(2651): n is a, c, g, or t
  misc_feature (2664)..(2664): n is a, c, g, or t
  misc_feature (2667)..(2668): n is a, c, g, or t
  misc_feature (2670)..(2670): n is a, c, g, or t
  misc_feature (2902)..(2902): n is a, c, g, or t
  misc_feature (3967)..(3967): n is a, c, g, or t
  misc_feature (3969)..(3973): n is a, c, g, or t
  misc_feature (3975)..(3976): n is a, c, g, or t
  misc_feature (3978)..(3981): n is a, c, g, or t
  misc_feature (3983)..(3991): n is a, c, g, or t
  misc_feature (3994)..(3994): n is a, c, g, or t
  misc_feature (3997)..(4002): n is a, c, g, or t
  misc_feature (4005)..(4005): n is a, c, g, or t
  misc_feature (4008)..(4009): n is a, c, g, or t
  misc_feature (4032)..(4032): n is a, c, g, or t
  misc_feature (4037)..(4037): n is a, c, g, or t
  misc_feature (4078)..(4078): n is a, c, g, or t
  misc_feature (4097)..(4097): n is a, c, g, or t
  misc_feature (4101)..(4101): n is a, c, g, or t
  misc_feature (4108)..(4108): n is a, c, g, or t
  misc_feature (4110)..(4110): n is a, c, g, or t
  misc_feature (4120)..(4121): n is a, c, g, or t
  misc_feature (4124)..(4124): n is a, c, g, or t
  misc_feature (4126)..(4126): n is a, c, g, or t
  misc_feature (4134)..(4134): n is a, c, g, or t
  misc_feature (4958)..(4958): n is a, c, g, or t
  misc_feature (5169)..(5169): n is a, c, g, or t
  misc_feature (5262)..(5262): n is a, c, g, or t
  misc_feature (5264)..(5264): n is a, c, g, or t
  misc_feature (5279)..(5279): n is a, c, g, or t
gncaangatcaggcacagagagggtgagtaacttgcccgcagtcacacaggtggcggagtgttgctggcagagggaacagcaagtgcaaagataggtgtagtcaccagagacagtgggtatgaggttgtttgaggctgagttatccagacatgagtgggtccccagcaggggcagcagagacagcggggcaggtgtgctggctggatagactgctgcgtgtttgtgttctaggaggccaacggtcctgctgatggctacgcagccattgcccaggctgacaggctgacccaggagcctgagagcatccgcaagtggcgagaggagcagaggaaacggctgcaagagctgggggtgagggcggggctgaggcggggttggctgggtgggctgtgtgtggggtggagtgtggggagtcctcggagtgcatgggatgctgcatgccttaatgtgggactgggccggtgcggccctgtggctgcctggcaggggccaggggaggagcgcggccgggcctgtgcatcccagctggaaagcagccactcattctcttgtggggtcctagatgctgcatctaaggtcacggaacaggaatggcgggagaaggccaagaaggacctggaggagtggaaccagcgccagagtgaacaagtagagaagaacaagatcaacaaccgtgagagggctgtagggacatgagggggccatggggacatgaggggggctgtggggacatgagggggccgtggggacatgagggggccatggggacatgaaggggtggggacatgagggagctgtggggacatgagggggccgtggggacatgagacgggctgtggggacatgagggagctgtggggacatgagaggggctgtggggacatgagagggagctgtggggacatgagagggagctgtggggacatgagaggggctgtggggacatgagaggggctntggggacatgagaggggctgtggggacatgactgaacactgcccagtgctccctgcctttgaggctctgtccttcacggtacaaggtcttccaggaagggaaaggcctgttctgggaagctacccttctgtctagggaactgctgcatgccaggctctggggtaggcacggaggagatggagataaggaggacccagccttatgtcctcaaagggcgcgaggagaaaaacacacatgttcaactaagctcaaatacagtagggccctctgcacgaaggccatggaagcaaggaaacaggtcagggagagacctctgtgtcttgggacttgggctttggaagatgactaggaggaaaaaagggaaaaaagggcaggaggtaggggggcattctagacctgggtacgaagaaaaaaatgtgatgtattaggcaacagggggccagggagcggtgggagagaaggcaggaacctgtggactcacactgtaagggccttggctgatgagttgggcagtgacatgggcagtggggagccactgaaggtgtttgaacaggagtaacatgatcagggatgaattttagagaaggtgctggggccagggtgaaggtcccattctcctgtttggggctgtgggtcgttgctgagccttccagaactatgcttcctaacatttctcccactggaggtactaatgctgtctctctctctctctcaaccttctgcctgcctgtctgtcttgccatctgccttcccccacctaaccccttccctcaacctttccctcaaggatcgctgacaaagcattctaccagcagccagatgctgatatcatcggctacgtgtacgtgtctgttttgcttctctgttgggggagctagagagggaatggccnccacagtttcttgagtttcctgcttgtgggatataaatgagtgtggctgggctcggagcaatggtcagaacaggaggcaaatgccctggtgggtgcaggcagcaaccacctccctccctccagtgaagtggaggctgcttggctaaatcagagccttgcaggataaaggcagagaaaggaatgtgcttgccacttattcccatgtgggaggggcaaatggcagagcaccccaactccctccctctgtgatgtctcttggtgggtgtgtggggtgaagggttttttgttttttgagatggagtttcgctcttgctgctcaggatggagtgcagtgctgcgatctcggctcactgcgacctccacctcctgggttcaagcgattctcctgcctcagcctcccgagtagctgagattataggcacatgcnaccgtgcccggctaacttttgtatttttagtagagacggggtttcaccatgtcggccaggctggtctcgaactcctgacctcaggtgatccacccacctcggcctcccaaagtgctgggattacaggcatgagccaccacacccagctgaaggggtcttttattcaacaaaacagacactgagcatgggatgctggaggcatgtaaaggacaagagctgctcctttgtgacatccatctcttcctcctgccccantgcnctgactttggccatcagcccctgcccagaccaccacaggccccctcacatgtttcaggtttggggtctacttggtgtgatgagtaatcaagaccagggttggnanacaggttatntctcgtgccgacntcnntnagttggtagagacatcctggagggtggtggtggggattgtggagctgaagagaaggtacttgctgttcttcactctaggtgtgccctggcagcccgtcatgtgtcgaggctaagcctcctctcacagggcacagagcacaccagagccttcgtctgcttccttccactctccctcatttagtactctttggcactcgccttgtgccagattggtaagacacccacaggccgnccccctcaccgtgctcatggtctggagtgtgttatgataagggccttgtggaaggacacagtgagctctggaagccactctctgcctggggagcctgggcaggcttcagagatgcaagaccttcagctgaccttaaagtgtgagaaggagtttgctggatagggagggtgggaagagaaggtgggaggagcagctggggccaaggcatccagagagaaaaggcccagctggctgcagtggctgaagctctacaggctgggatggtggggatggtggggatggtggggatgggtgggagctgaggctgggaggtggttggcttggggctggttgcaaagcgcctgttgtgccaaggctgagctcagacttgatccagaaggcagtggggagccacaggaggcttccagcaagggatggggatgtcagatgggcatgggtgctgtggaataccacagggggctcgatgcttctgttgagcctgaggaaatggcccagagagcacccaggagagccctgaagagagagtatagaccagggcttctcaaacttttttttttttttaagacggagtcttgctctgtcacccaggctggagtgcagtggcatgatctcagctcactgcaacctccgcctcctgggctcaagcaattcttctgcctcggcctcctgagtagctgggactacaggtgcccgccaccatgcccggctaattttgtgtatttttagtagagacggggtttcaccgtgttggccaggatggtctcaatctgacctcgtgatccgcccaccttggcctcccaaagtgctgggattgcaggcatgagccaccgtgcctggccacacccagctaattttttgtatttttagtagagatggggtttcaccatgttggccaggcaggtctcgaactcctgacctcaagtgaatccacccgcctctgcctcccaaagtgctgggattacaggagtgagccactgcgcccaggctcaaactttcacatgcctatgaattaccagggggtctcgtgaaaaccctgattctgattcagcaggacggtggggaggncnnnnngnntnnnntnnnnnnnnnctntgnnnnnntgngtnncattggaccatggacgctttganctgcnaggacagaggggagcctctggaccctgaagggacagctccnaggatagctcccctcatcnccanttgccancnagctccagcnncantntccttttntccagacctgcttgctacctcattgaattctcagtccagtgaaatagttggtagggcagagctatgatcctcattttacaggctaggaaatgagcatacagccagcatccctagagaggggccaggtcacctgatccggggtcagctcttccatggagcgctcctgccatcagtcatgtctggcatcggcagaactggtcctgcttgagatggagagggggcttccagggacttgtgagcgaccctcgctggccaaacaggacatagacccagctctcctcacctaagaatcccttattgtctttctgttagtgagtcccacgtgtagattttgtccactagactgtatttacttgtttccccactgtcccttagtcagtggcttctgtgactgtcaaccagaacttctgatgaaggaccgccagttttcatcctaacttgattccaaccaaaagcagactccagtggagcattcatgccccaggctgtggctcctcagagacagtggtggttctgggctacaaagggctctgtggtgaaagacgcttgggatgtggtggattccatcacatacacaccttggagggtcacgacgcacacagcacatgaaaggctttgaaagtcttgctgtaaagatcctctttagctgggttttccataggtatttgaccacagtctttctggagaatcctcacacagaacattcaggcaatgctgaactaggtgcttctgttagatggttagtcagtgtcctacttctgccaagtttttggaaatggtgaaatagctaaggtcctgcattaggtcgtcctaggacctccaanggtctttaggtgtcaggaacctcaggttgggaactcccgatggggaagtaatgaacagagggtgcctaggctgggaagactttctgaggaggtgaggcccgcactgagacctgaatgacaagaagcagcaagccaggaacaggtctgggagaagcgtgttccaggaagaggtgatagcaagtgccaaggtcctgaggcaggaccaagctangcttcctcctgcgccaaggctgccctcctctgaagtcaggggggcacaaggctggggaggacacagtgccccagagtaggctgggcaaagcancnttgctcaagggcaangctgggggaaagcagactgctataaaagcccgtcctatctccacccgcaggggcatccgaggaggctttcgtgaaggaatccaaggaggagaccccaggcacagagtgggagaaggtggcccagctatgtgacttcaaccccaagagcagcaagcagtgcaaagatgtgtcccgcctgcgctcggtgctcatgtccctgaagcagacgccactgtcccgctaggtgcctgctaggtgcatggccacagagcatgggctgggcctgggcacaggaggagcagctgctttggtcggggtggagactcgcagcagctgctacccacagcctattccactcctccccatctccaggcgctgggaggggggccctcaccccatcacgcctcgctccctcctggccctctggtccagcccctcacgcctcctctcagtctactcaattgtgactgtccctcctgatgtattttttttcttggcttaaagggtgtgttgttgactctttttacacttatttattatcattctcacttctctggaagccacaactggtgtcagggctcggtttgtgcttagaactttcccagcttcatgaccttgagagaagggagaatgttcccccatttcccagccaagtgggagccccaagctctcca

SEQ ID NO: 62450 - DNA, 647 bp, Homo sapiens
gctgcaggaattcggcacgaggatcaacattcggggcatccgaggaggctttcgtgaaggaatccaaggaggagaccccaggcacagagtgggagaaggtggcccagctatgtgacttcaaccccaagagcagcaagcagtgcaaagatgtgtcccgcctgcgctcggtgctcatgtccctgaagcagacgccactgtcccgctaggtgcctgctaggtgcatggccacagagcatgggctgggcctgggcacaggaggagcagctgctttggtcggggtggagactcgcagcagctgctacccacagcctattccactcctccccatctccaggcgctgggaggggggccctcaccccatcacgcctcgctccctcctggccctctggtccagcccctcacgcctcctctcagtctactcaattgtgactgtccctcctgatgtattttttttcttggcttaaagggtgtgttgttgactcttcctctctataccctttcccctattccacttttctttatcttcttcaacattcatcctctcctattttccacttaccctatcttccttccctctatttcacctatctaccactttctctttcctattccttaactatccccatctacttctctcctcctctcct

SEQ ID NO: 62451 - DNA, 1291 bp, Homo sapiens
cgcggggagccggcgtcggcggggacgggcttggcgcggaccgcacttcctctccgccaccgggccggctccccgcggctcgggtgacagcgtcgcggccgccggacgcagcgcggggcaggcgcgggcagagccgagcgcagcggaggctccggcggaggcgcggggaaaatggctgatgactttggcttcttctcgtcgtcggagagcggtgccccggaggcggcggaggaggacccggcggccgccttcctggcccagcaggagagcgagattgcaggcatagagaacgacgagggcttcggggcacctgccggcagccatgcggcccccgcgcagccgggccccacgagtggggctggttctgaggacatggggaccacagtcaatggagatgtgtttcaggaggccaacggtcctgctgatggctacgcagccattgcccaggctgacaggctgacccaggagcctgagagcatccgcaagtggcgagaggagcagaggaaacggctgcaagagctggatgctgcatctaaggtcacggaacaggaatggcgggagaaggccaagaaggacctggaggagtggaaccagcgccagagtgaacaagtagagaagaacaagatcaacaaccggatcgctgacaaagcattctaccagcagccagatgctgatatcatcggctacgtggcatccgaggaggctttcgtgaaggaatccaaggaggagaccccaggcacagagtgggagaaggtggcccagctatgtgacttcaaccccaagagcagcaagcagtgcaaagatgtgtcccgcctgcgctcggtgctcatgtccctgaagcagacgccactgtcccgctaggtgcctgctaggtgcatggccacagagcatgggctgggcctgggcacaggaggagcagctgctttggtcggggtggagactcgcagcagctgctacccacagcctattccactcctccccatctccaggcgctgggaggggggccctcaccccatcacgcctcgctccctcctggccctctggtccagcccctcacgcctcctctcagtctactcaattgtgactgtccctcctgatgtattttttttcttggcttaaagggtgtgttgttgactctttttacacttatttattatcattctcacttctctggaagccacaactggtgtcagggctcggtttgtgcttagaactttcccagcttcatgaccttgagagaagggagaatgttcccccatttcccagccaagtgggagccccaagctctcca

SEQ ID NO: 62452 - DNA, 1109 bp, Homo sapiens
tccgctcctcccgccgcggcgcccgcaccgcagtgacagccagccgggcccggtggcggagaggaagtgcggtccgcgccaagcccgtccccgccgacgccggctccccgcggctcgggtgacagcgtcgcggccgccggacgcagcgcggggcaggcgcgggcagagccgagcgcagcggaggctccggcggaggcgcggggaaaatggctgatgactttggcttcttctcgtcgtcggagagcggtgccccggaggcggcggaggaggacccggcggccgccttcctggcccagcaggagagcgagattgcaggcatagagaacgacgagggcttcggggcacctgccggcagccatgcggcccccgcgcagccgggccccacgagtggggctggttctgaggacatggggaccacagtcaatggagatgtgtttcaggaggccaacggtcctgctgatggctacgcagccattgcccaggctgacaggctgacccaggagcctgagagcatccgcaagtggcgagaggagcagaggaaacggctgcaagagctggatgctgcatctaaggtcacggaacaggaatggcgggagaaggccaagaaggacctggaggagtggaaccagcgccagagtgaacaagtagagaagaacaagatcaacaaccgggcatccgaggaggctttcgtgaaggaatccaaggaggagaccccaggcacagagtgggagaaggtggcccagctatgtgacttcaaccccaagagcagcaagcagtgcaaagatgtgtcccgcctgcgctcggtgctcatgtccctgaagcagacgccactgtcccgctaggtgcctgctaggtgcatggccacagcccctcacgcctcctctcagtctactcaattgtgactgtccctcctgatgtattttttttcttggcttaaagggtgtgttgttgactctttttacacttatttattatcattctcacttctctggaagccacaactggtgtcagggctcggtttgtgcttagaactttcccagcttcatgaccttgagagaagggagaatgttcccccatttcccagccaagtgggagccccaagctctcca

SEQ ID NO: 62453 - DNA, 647 bp, Homo sapiens
gggtctacttgtgtgtgagtaatcaagaccaggttggcaaacaggggcatccgaggaggctttcgtgaaggaatccaaggaggagaccccaggcacagagtgggagaaggtggcccagctatgtgacttcaaccccaagagcagcaagcagtgcaaagatgtgtcccgcctgcgctcggtgctcatgtccctgaagcagacgccactgtcccgctaggtgcctgctaggtgcatggccacagagcatgggctgggcctgggcacaggaggagcagctgctttggtcggggtggagactcgcagcagctgctacccacagcctattccactcctccccatctccaggcgctgggaggggggccctcaccccatcacgcctcgctccctcctggccctctggtccagcccctcacgcctcctctcagtctactcaattgtgactgtccctcctgatgtattttttttcttggcttaaagggtgtgttgttgactctttttacacttatttattatcattctcacttctctggaagccacaactggtgtcagggctcggtttgtgcttagaactttcccagcttcatgaccttgagagaagggagaatgttcccccatttcccagccaagtgggagccccaagctctcca

SEQ ID NO: 62454 - DNA, 573 bp, Homo sapiens
gctcggtacccgctgatccgcttaagtgggagaaggtggcccagctatgtgacttcaaccccaagagcagcaagcagtgcaaagatgtgtcccgcctgcgctcggtgctcatgtccctgaagcagacgccactgtcccgctaggtgcctgctaggtgcatggccacagagcatgggctgggcctgggcacaggaggagcagctgctttggtcggggtggagactcgcagcagctgctacccacagcctattccactcctccccatctccaggcgctgggaggggggccctcaccccatcacgcctcgctccctcctggccctctggtccagcccctcacgcctcctctcagtctactcaattgtgactgtccctcctgatgtattttttttcttggcttaaagggtgtgttgttgactctttttacacttatttattatcattctcacttctctggaagccacaactggtgtcagggctcggtttgtgcttagaactttcccagcttcatgaccttgagagaagggagaatgttcccccatttcccagccaagtgggagccccaagctctcca

SEQ ID NO: 62455 - DNA, 1245 bp, Homo sapiens
tccgctcctcccgccgcggcgcccgcaccgcagtgacagccagccgggcccggtggcggagaggaagtgcggtccgcgccaagcccgtccccgccgacgccggctccccgcggctcgggtgacagcgtcgcggccgccggacgcagcgcggggcaggcgcgggcagagccgagcgcagcggaggctccggcggaggcgcggggaaaatggctgatgactttggcttcttctcgtcgtcggagagcggtgccccggaggcggcggaggaggacccggcggccgccttcctggcccagcaggagagcgagattgcaggcatagagaacgacgagggcttcggggcacctgccggcagccatgcggcccccgcgcagccgggccccacgagtggggctggttctgaggacatggggaccacagtcaatggagatgtgtttcagcccgtgcaccaccagcgggtccagctacaaacccagttgccaatacagcctaaggacgagcctgcccacaactattccagttccatttggcacagccaggggcagggacagaagggccctgcaggactccgcctccccacctctgcacagatcctctctcctttcccctaatactcccatcatcctccttttagcttcttagaggaatcagcagctcagcttagcttagatttagctgatcaatcccaaagaaggatgtggctcatcctcttggccatccctggagtcgcagcacacgcttggctggtgtgggtccacagaggttctcatgggtgggcccagcagaggggcccctcaggagagggattctagggagctagactgagacaagcctggccctgactgtcgcctcctgccttctggtcctggccattcctgcccctttctctctccagagcttgggaggagtcagaacattgctctagccgctggtgatctctcctggttgccaaccctcctggccatgactgatctccccactgagatgctcaggtttgaaagccaagctgcccagggaagggacttctcaaaggtcgcgagtccagtgagtggcagaagggggatgtaaagccccagcccctctgatggagtgtccagcgctcgtcccgtgccctccacgcccctgtgtacccagctacttgtttattcatttggtttatacgtttggtcgttcattcatttggtcagtgcacattcttttatggccacacacctgctagggcagtgaataaacggatatggaggc

SEQ ID NO: 62456 - DNA, 920 bp, Homo sapiens
  misc_feature (9)..(9): n is a, c, g, or t
  misc_feature (40)..(40): n is a, c, g, or t
aggcgcggngcagagcgagcgagccgtgccccacgagtgngctggttctgaggacatggggaccacagtcaatggagatgtgtttcaggaggccaacggtcctgctgatggctacgcagccattgcccaggctgacaggctgacccaggagcctgagagcatccgcaagtggcgagaggagcagaggaaacggctgcaagagctggatgctgcatctaaggtcacggaacaggaatggcgggagaaggccaagaaggacctggaggagtggaaccagcgccagagtgaacaagtagagaagaacaagatcaacaaccgggcatccgaggaggctttcgtgaaggaatccaaggaggagaccccaggcacagagtgggagaaggtggcccagctatgtgacttcaaccccaagagcagcaagcagtgcaaagatgtgtcccgcctgcgctcggtgctcatgtccctgaagcagacgccactgtcccgctaggtgcctgctaggtgcatggccacagagcatgggctgggcctgggcacaggaggagcagctgctttggtcggggtggagactcgcagcagctgctacccacagcctattccactcctccccatctccaggcgctgggaggggggccctcaccccatcacgcctcgctccctcctggccctctggtccagcccctcacgcctcctctcagtctactcaattgtgactgtccctcctgatgtattttttttcttggcttaaagggtgtgttgttgactctttttacacttatttattatcattctcacttctctggaagccacaactggtgtcagggctcggtttgtgcttagaactttcccagcttcatgaccttgagagaagggagaatgttcccccatttcccagccaagtgggagccccaagctctcca

SEQ ID NO: 62457 - DNA, 1173 bp, Homo sapiens
tccgctcctcccgccgcggcgcccgcaccgcagtgacagccagccgggcccggtggcggagaggaagtgcggtccgcgccaagcccgtccccgccgacgccggctccccgcggctcgggtgacagcgtcgcggccgccggacgcagcgcggggcaggcgcgggcagagccgagcgcagcggaggctccggcggaggcgcggggaaaatggctgatgactttggcttcttctcgtcgtcggagagcggtgccccggaggcggcggaggaggacccggcggccgccttcctggcccagcaggagagcgagattgcaggcatagagaacgacgagggcttcggggcacctgccggcagccatgcggcccccgcgcagccgggccccacgagtggggctggttctgaggacatggggaccacagtcaatggagatgtgtttcaggaggccaacggtcctgctgatggctacgcagccattgcccaggctgacaggctgacccaggagcctgagagcatccgcaagtggcgagaggagcagaggaaacggctgcaagagctggatgctgcatctaaggtcacggaacaggaatggcgggagaaggccaagaaggacctggaggagtggaaccagcgccagagtgaacaagtagagaagaacaagatcaacaaccgggcatccgaggaggctttcgtgaaggaatccaaggaggagaccccaggcacagagtgggagaaggtggcccagctatgtgacttcaaccccaagagcagcaagcagtgcaaagatgtgtcccgcctgcgctcggtgctcatgtccctgaagcagacgccactgtcccgctaggtgcctgctaggtgcatggccacagagcatgggctgggcctgggcacaggaggagcagctgctttggtcggggtggagactcgcagcagctgctacccacagcctattccactcctccccatctccaggcgctgggaggggggccctcaccccatcacgcctcgctccctcctggccctctggtccagcccctcacgcctcctctcagtctactcaattgtgactgtccctcctgatgtatttttttttcctccaactcaaaaggcaaaaataatcctatttttattatcttgctacaactgcaactttctgccctataaatttacattcc

SEQ ID NO: 62458 - DNA, 1326 bp, Homo sapiens
tccgctcctcccgccgcggcgcccgcaccgcagtgacagccagccgggcccggtggcggagaggaagtgcggtccgcgccaagcccgtccccgccgacgccggctccccgcggctcgggtgacagcgtcgcggccgccggacgcagcgcggggcaggcgcgggcagagccgagcgcagcggaggctccggcggaggcgcggggaaaatggctgatgactttggcttcttctcgtcgtcggagagcggtgccccggaggcggcggaggaggacccggcggccgccttcctggcccagcaggagagcgagattgcaggcatagagaacgacgagggcttcggggcacctgccggcagccatgcggcccccgcgcagccgggccccacgagtggggctggttctgaggacatggggaccacagtcaatggagatgtgtttcaggaggccaacggtcctgctgatggctacgcagccattgcccaggctgacaggctgacccaggagcctgagagcatccgcaagtggcgagaggagcagaggaaacggctgcaagagctggatgctgcatctaaggtcacggaacaggaatggcgggagaaggccaagaaggacctggaggagtggaaccagcgccagagtgaacaagtagagaagaacaagatcaacaaccggatcgctgacaaagcattctaccagcagccagatgctgatatcatcggctacgtggcatccgaggaggctttcgtgaaggaatccaaggaggagaccccaggcacagagtgggagaaggtggcccagctatgtgacttcaaccccaagagcagcaagcagtgcaaagatgtgtcccgcctgcgctcggtgctcatgtccctgaagcagacgccactgtcccgctaggtgcctgctaggtgcatggccacagagcatgggctgggcctgggcacaggaggagcagctgctttggtcggggtggagactcgcagcagctgctacccacagcctattccactcctccccatctccaggcgctgggaggggggccctcaccccatcacgcctcgctccctcctggccctctggtccagcccctcacgcctcctctcagtctactcaattgtgactgtccctcctgatgtattttttttcttggcttaaagggtgtgttgttgactctttttacacttatttattatcattctcacttctctggaagccacaactggtgtcagggctcggtttgtgcttagaactttcccagcttcatgaccttgagagaagggagaatgttcccccatttcccagccaagtgggagccccaagctctcca

SEQ ID NO: 62459 - DNA, 1824 bp, Homo sapiens
tccgctcctcccgccgcggcgcccgcaccgcagtgacagccagccgggcccggtggcggagaggaagtgcggtccgcgccaagcccgtccccgccgacgccggctccccgcggctcgggtgacagcgtcgcggccgccggacgcagcgcggggcaggcgcgggcagagccgagcgcagcggaggctccggcggaggcgcggggaaaatggctgatgactttggcttcttctcgtcgtcggagagcggtgccccggaggcggcggaggaggacccggcggccgccttcctggcccagcaggagagcgagattgcaggcatagagaacgacgagggcttcggggcacctgccggcagccatgcggcccccgcgcagccgggccccacgagtggggctggttctgaggacatggggaccacagtcaatggagatgtgtttcagcccgtgcaccaccagcgggtccagctacaaacccagttgccaatacagcctaaggacgagcctgcccacaactattccagttccatttggcacagccaggggcagggacagaagggccctgcaggactccgcctccccacctctgcacagatcctctctcctttcccctaatactcccatcatcctccttttagcttcttagaggaatcagcagctcagcttagcttagatttagctgatcaatcccaaagaaggatgtggctcatcctcttggccatccctggagtcgcagcacacgcttggctggtgtgggtccacagaggttctcatgggtgggcccagcagaggggcccctcaggagagggattctagggagctagactgagacaagcctggccctgactgtcgcctcctgccttctggtcctggccattcctgcccctttctctctccagagcttgggaggagtcagaacattgctctagccgctggtgatctctcctggttgccaaccctcctggccatgactgatctccccactgagatgctcaggaggccaacggtcctgctgatggctacgcagccattgcccaggctgacaggctgacccaggagcctgagagcatccgcaagtggcgagaggagcagaggaaacggctgcaagagctggatgctgcatctaaggtcacggaacaggaatggcgggagaaggccaagaaggacctggaggagtggaaccagcgccagagtgaacaagtagagaagaacaagatcaacaaccgggcatccgaggaggctttcgtgaaggaatccaaggaggagaccccaggcacagagtgggagaaggtggcccagctatgtgacttcaaccccaagagcagcaagcagtgcaaagatgtgtcccgcctgcgctcggtgctcatgtccctgaagcagacgccactgtcccgctaggtgcctgctaggtgcatggccacagagcatgggctgggcctgggcacaggaggagcagctgctttggtcggggtggagactcgcagcagctgctacccacagcctattccactcctccccatctccaggcgctgggaggggggccctcaccccatcacgcctcgctccctcctggccctctggtccagcccctcacgcctcctctcagtctactcaattgtgactgtccctcctgatgtattttttttcttggcttaaagggtgtgttgttgactctttttacacttatttattatcattctcacttctctggaagccacaactggtgtcagggctcggtttgtgcttagaactttcccagcttcatgaccttgagagaagggagaatgttcccccatttcccagccaagtgggagccccaagctctcca

SEQ ID NO: 62460 - DNA, 1160 bp, Homo sapiens
tccgctcctcccgccgcggcgcccgcaccgcagtgacagccagccgggcccggtggcggagaggaagtgcggtccgcgccaagcccgtccccgccgacgccggctccccgcggctcgggtgacagcgtcgcggccgccggacgcagcgcggggcaggcgcgggcagagccgagcgcagcggaggctccggcggaggcgcggggaaaatggctgatgactttggcttcttctcgtcgtcggagagcggtgccccggaggcggcggaggaggacccggcggccgccttcctggcccagcaggagagcgagattgcaggcatagagaacgacgagggcttcggggcacctgccggcagccatgcggcccccgcgcagccgggccccacgagtggggctggttctgaggacatggggaccacagtcaatggagatgtgtttcaggaggccaacggtcctgctgatggctacgcagccattgcccaggctgacaggctgacccaggagcctgagagcatccgcaagtggcgagaggagcagaggaaacggctgcaagagctggggcatccgaggaggctttcgtgaaggaatccaaggaggagaccccaggcacagagtgggagaaggtggcccagctatgtgacttcaaccccaagagcagcaagcagtgcaaagatgtgtcccgcctgcgctcggtgctcatgtccctgaagcagacgccactgtcccgctaggtgcctgctaggtgcatggccacagagcatgggctgggcctgggcacaggaggagcagctgctttggtcggggtggagactcgcagcagctgctacccacagcctattccactcctccccatctccaggcgctgggaggggggccctcaccccatcacgcctcgctccctcctggccctctggtccagcccctcacgcctcctctcagtctactcaattgtgactgtccctcctgatgtattttttttcttggcttaaagggtgtgttgttgactctttttacacttatttattatcattctcacttctctggaagccacaactggtgtcagggctcggtttgtgcttagaactttcccagcttcatgaccttgagagaagggagaatgttcccccatttcccagccaagtgggagccccaagctctcca

SEQ ID NO: 62461 - DNA, 883 bp, Homo sapiens
tccgctcctcccgccgcggcgcccgcaccgcagtgacagccagccgggcccggtggcggagaggaagtgcggtccgcgccaagcccgtccccgccgacgccggctccccgcggctcgggtgacagcgtcgcggccgccggacgcagcgcggggcaggcgcgggcagagccgagcgcagcggaggctccggcggaggcgcggggaaaatggctgatgactttggcttcttctcgtcgtcggagagcggtgccccggaggcggcggaggaggacccggcggccgccttcctggcccagcaggagagcgagattgcaggcatagagaacgacgagggcttcggggcacctgccggcagccatgcggcccccgcgcagccgggccccacgagtggggctggttctgaggacatggggaccacagtcaatggagatgtgtttcaggaggccaacggtcctgctgatggctacgcagccattgcccaggctgacaggctgacccaggagcctgagagcatccgcaagtggcgagaggagcagaggaaacggctgcaagagctggatgctgcatctaaggtcacggaacaggaatggcgggagaaggccaagaaggacctggaggagtggaaccagcgccagagtgaacaagtagagaagaacaagatcaacaaccgttgtgactgtccctcctgatgtattttttttcttggcttaaagggtgtgttgttgactctttttacacttatttattatcattctcacttctctggaagccacaactggtgtcagggctcggtttgtgcttagaactttcccagcttcatgaccttgagagaagggagaatgttcccccatttcccagccaagtgggagccccaagctctcca

SEQ ID NO: 62462 - DNA, 1030 bp, Homo sapiens
  misc_feature (1022)..(1023): n is a, c, g, or t
tccgctcctcccgccgcggcgcccgcaccgcagtgacagccagccgggcccggtggcggagaggaagtgcggtccgcgccaagcccgtccccgccgacgccggctccccgcggctcgggtgacagcgtcgcggccgccggacgcagcgcggggcaggcgcgggcagagccgagcgcagcggaggctccggcggaggcgcggggaaaatggctgatgactttggcttcttctcgtcgtcggagagcggtgccccggaggcggcggaggaggacccggcggccgccttcctggcccagcaggagagcgagattgcaggcatagagaacgacgagggcttcggggcacctgccggcagccatgcggcccccgcgcagccgggccccacgagtggggctggttctgaggacatggggaccacagtcaatggagatgtgtttcagcccgtgcaccaccagcgggtccagctacaaacccagttgccaatacagcctaaggacgagcctgcccacaactattccagttccatttggcacagccaggggcagggacagaagggccctgcaggactccgcctccccacctctgcacagatcctctctcctttcccctaatactcccatcatcctccttttagcttcttagaggaatcagcagctcagcttagcttagatttagctgatcaatcccaaagaaggatgtggctcatcctcttggccatccctggagtcgcagcacacgcttggctggtgtgggtccacagaggttctcatgggtgggcccagcagaggggcccctcaggagagggattctagggagctagactgagacaagcctggccctgactgtcgcctcctgccttctggtcctggccattcctgcccctttctctctccagagcttgggaggagtcagaacattgctctagccgctggtgatctctcctggttgccaaccctcctggccatgactgatctccccactgagatgctcaggtgattaaacgagagcccagttgtggcccnngtgacac

SEQ ID NO: 62463 - DNA, 502 bp, Homo sapiens
tccgctcctcccgccgcggcgcccgcaccgcagtgacagccagccgggcccggtggcggagaggaagtgcggtccgcgccaagcccgtccccgccgacgccggctccccgcggctcgggtgacagcgtcgcggccgccggacgcagcgcggggcaggcgcgggcagagccgagcgcagcggaggctccggcggaggcgcggggaaaatggctgatgactttggcttcttctcgtcgtcggagagcggtgccccggaggcggcggaggaggacccggcggccgccttcctggcccagcaggagagcgagattgcaggcatagagaacgacgagggcttcggggcacctgccggcagccatgcggcccccgcgcagccgggccccacgagtggggctggttctgaggacatggggaccacagtcaatggagatgtgtttcaggaggccaacggtcctgctgatggctacgcagccaattgccccgctgtcgggctaggtcgggg

SEQ ID NO: 62464 - DNA, 877 bp, Homo sapiens
ttaatgggggaattgcgctgtgaatgaaccacaatactataggttccttagggccaggcacacagcacaggctcagtaaatgttttctgaatgaatgaatgaatgaatgaatggtcctcttcatagacttacagtgtaacactgggatttggagaactgctttaaaatctctattcatatctagggattaataaactagattttgggaaagtcagtactgaatataatgtaggtgtttctgtttgttaattaattaaaatgaccacagtcattattcttacccttaatttctcagtctgaaaagttaatcaactgtatctgttccatgaataattgagttgaacttgaaagagaactcgctattccaaaagcctcccacaccaccagttaactgtgatttatccttttacttctaaagaattttaagcatcttccatctaacttgactgacaaccaatctgtgcttcctctgtctttattccgtcaggaagaagacgttactcgtgaaagtcgttttaattttagcggttatgggatgggtcactgcctccaagtgaaagatggaacagctgtcaaggccacacctgccaacccactcccacaaccgccaaaagatggagatgctatcaagaagaagtttgtggaccgggcaaaaaggattgacacgatatctcgagctgccttcccattggccttcctcattttcaacatcttttactggatcacatacaagatcattcggcatgaagatgtccacaagaaatagatgtgccctacagaccctgggaccttcttgcctcagtgttgtgcttgtaaatacacagtgaaattgtctttatatcactttgacagaggagaagattgagggaggggggag

SEQ ID NO: 62465 - DNA, 1435 bp, Homo sapiens
cttgattaatcagatgaatctgcatatgagaatgacggctttctgcaaagaccatgactccaggtctggaaaacaaccttcacagaccctatctccttcagatttcttggacaagttaatgggaaggacatcaggatatgatgcaagaatcaggccaaattttaaaggtcctccagtaaacgttacttgcaatatttttatcaacagttttggatcagtcacagaaacgaccatggactaccgagtgaatatttttctgagacaacagtggaatgattcacggctggcgtacagtgagtacccagatgactccctggacttggacccatccatgctagactccatttggaaaccagatttgttctttgccaatgagaagggtgccaacttccacgatgtcaccactgacaacaaattgctacggatttcgaaaaatggcaaagtgctctacagtatcagactcaccttgaccttatcctgtcccatggacttgaagaactttccgatggatgtccagacctgtacaatgcagctggagagttttgggtacacgatgaatgacctgatatttgagtggttaagtgatggtccagtgcaagttgctgaaggattgaccctgccccagtttattttgaaagaagagaaggaacttggctactgtacaaagcactacaacactggaaagtttacctgcattgaggtcaagtttcacctggaacgccaaatgggatattatttgatccagatgtacatcccaagcctgcttatagtaattttgtcctgggtttccttttggataaatatggatgcagcccctgccagggtcgcactgggcatcaccacagtcttaacgatgaccacccagagttcaggctccagggcatctctgccaaaggtctcctatgtaaaagcgattgacatctggatggcggtgtgccttctgtttgtgtttgctgccttactggaatacgcagcggtgaacttcgtctccaggcaacacaaggagttcctgcgcctccgaagaagacagaagaggcagaataaggaagaagacgttactcgtgaaagtcgttttaattttagcggttatgggatgggtcactgcctccaagtgaaagatggaacagctgtcaaggccacacctgccaacccactcccacaaccgccaaaagatggagatgctatcaagaagaagtttgtggaccgggcaaaaaggattgacacgatatctcgagctgccttcccattggccttcctcattttcaacatcttttactggatcacatacaagatcattcggcatgaagatgtccacaagaaatagatgtgccctacagaccctgggaccttcttgcctcagtgttgtgcttgtaaatacacagtgaaattgtctttatatcactttgacagaggagaagattgagggaggggggag

SEQ ID NO: 62466 - DNA, 504 bp, Homo sapiens
actcaccttgaccttatcctgtcccatggacttgaagaactttccgatggatgtccagacctgtacaatgcagctggagagttgtaagtcaccactgttgaaatgactccctgcttgttttaaccaatgacctggttcttttagtatgtcattaaagagaaaggacccttacaactcattccctatatactgaccaacccccaacatcctaatggaaagacaaaccaaagtgtgtgtgtgtgtgtgtgtgtgtgtgtgtgtgtgtgtgtgtgtgtgtgtcatacaaaatctcattatcaatacagcataggcaacctttcaaagtaaaatgccaaataacttgcctttctccccccgcccaaaaaatagcctgatttggtaagcttttcattgaaatgaaaatgtctcctgagaaaattaaaattattagtcattaaatctttatagtgaatcactctttaatcagaaaattgaatttctttccatcttatgcccatgtagacc

SEQ ID NO: 62467 - DNA, 2015 bp, Homo sapiens
aggctgggtaagatcacgtctccgtctcattctatagccctcattccagcacaggatctcagcaatttttccctcttccccccacccactccagcgcgcagagtcctttcttctctctcatttacaacttctttttaaaagaaaacattttctagaaaaagggctttgctaaacagaaaagatataaaacaaaagccacagctatctagcatggcattgtcaccaactccctttgcatggtgatgcgattaaggtagcagcatttttattattcaggaaaagcagctgggggattcatcagttctgaggctttgtctttctgggttaactgatggtcccaagcctcggtttgacctgaccatgatgcccaggactggcactttttcttttttctcagcaaactgtacaaaaccaaatctctttttgattttcaaggaaactaggttcctgccaaattttgaatctggacaataaacagacactttgtcctagcatctttctggaatcatttcgggatattttccacaagcaacacagaaacaggaatgaaccggcagctagtgaacattttgacagccttgtttgcatttttcttagagacaaaccacttcaggacggctttctgcaaagaccatgactccaggtctggaaaacaaccttcacagaccctatctccttcagatttcttggacaagttaatgggaaggacatcaggatatgatgcaagaatcaggccaaattttaaaggtcctccagtaaacgttacttgcaatatttttatcaacagttttggatcagtcacagaaacgaccatggactaccgagtgaatatttttctgagacaacagtggaatgattcacggctggcgtacagtgagtacccagatgactccctggacttggacccatccatgctagactccatttggaaaccagatttgttctttgccaatgagaagggtgccaacttccacgatgtcaccactgacaacaaattgctacggatttcgaaaaatggcaaagtgctctacagtatcagactcaccttgaccttatcctgtcccatggacttgaagaactttccgatggatgtccagacctgtacaatgcagctggagagttttgggtacacgatgaatgacctgatatttgagtggttaagtgatggtccagtgcaagttgctgaaggattgaccctgccccagtttattttgaaagaagagaaggaacttggctactgtacaaagcactacaacactggaaagtttacctgcattgaggtcaagtttcacctggaacgccaaatgggatattatttgatccagatgtacatcccaagcctgcttatagtaattttgtcctgggtttccttttggataaatatggatgcagcccctgccagggtcgcactgggcatcaccacagtcttaacgatgaccacccagagttcaggctccagggcatctctgccaaaggtctcctatgtaaaagcgattgacatctggatggcggtgtgccttctgtttgtgtttgctgccttactggaatacgcagcggtgaacttcgtctccaggcaacacaaggagttcctgcgcctccgaagaagacagaagaggcagaataaggaagaagacgttactcgtgaaagtcgttttaattttagcggttatgggatgggtcactgcctccaagtgaaagatggaacagctgtcaaggccacacctgccaacccactcccacaaccgccaaaagatggagatgctatcaagaagaagtttgtggaccgggcaaaaaggattgacacgatatctcgagctgccttcccattggccttcctcattttcaacatcttttactggatcacatacaagatcattcggcatgaagatgtccacaagaaatagatgtgccctacagaccctgggaccttcttgcctcagtgttgtgcttgtaaatacacagtgaaattgtctttatatcactttgacagaggagaagattgagggaggggggag

SEQ ID NO: 62468 - DNA, 1096 bp, Homo sapiens
cacaaaaccaaacccatcagaagtttgcaggacgtccttgtttagagctgggaaataaaccacgaaacagcgcaaaggagagtccaggcctgccaatgcttccgcgaactcctcgccccgacctcatccttctccagctcctacctgcaggcctcaggcctcctgacctccaggctccttaccctcccgctggcctctgctctacactcatctttgtgccctgcttccaatcatgccaggcctcggggtccctgtctctaacttcaccatgagactcaggtgcttctctacactccaccctctccaacactgtttggaatctcaggcttggtcccaatcctatgggctaactttgaaaagaccgctgttcataaggagagagaaaggaggaagagatgagaaaggaagacagagaaagaaactctatgatcacggtttttccaaaattcatggttaaattagaacttactatgtgcaaatatagaagcacgggtccacagagttccagagaatgaatgctgacgactaagcaccagcctccactccctgccccatagtgagtatccctcctctgtgtgctcatgctgtgaatcccccccattctaccacttctcccctcatcactggcttgctgtaggatcagaagttccttaagaacaagaaccttctcccagtgtatccccagcacctaatacagaaggtaataaggaggaggcatctgctaaacgcttgttgaaggagtgaaattgagagaccaggaagggcctgcaggcactgtggtgagcctgcctgttgtccacgtggctgcagcaagcaaacatgggttttccttggaaggactgtgggccatcaacccattaattgccgagttgcttctatcagggcaaggctgtggaatcctgttatcctagacaatgaggtacagggtgcaagcagatctgtgtgctgctgtcttccggtaaacggaccaagttctcacttcccatcctcctccccagtctcacccacccgtgctcccaagagagcaattcatcatgtcagtgtctggtgttttcttgaaggcctgtgctaaataaagtggattgtttataaagtg

SEQ ID NO: 62469 - DNA, 368 bp, Homo sapiens
cacactcagcagcagccagatgaaaattatattaatcagcaataagaataaagccctttaatgggatttccaggtcttggctttggggtagcagtatagtctagtggataaatccatggtctatattgaaatacatactgtaacattggccaagttaattcaaagattgcttcctcatttgaaaaatgggagcaaaaataactacattgatttttataaaaataaggatgcatgctgtgtctgcatatcacttattaccactgtggtagcaattagcaacaatccataatttacagttgttattatgtgttaattttctttggctcttctccctgcctaaacaacaaataagaaaagaatgtaaatat

SEQ ID NO: 62470 - DNA, 1008 bp, Homo sapiens
tggcagtccagggagtgaaaaggttaatggaaacatgcaagggcagaccggaaagaaaatacatccaccaaagaggtggctgttgggggatatgagtgagtgaggtaagattcatctctgagttacaggtgaaggaagcccaggcaaacaggaaggcagaaatgagtccatggcatccaaagaatatgtggcagtccacatgtcatagctgtctgtaaaagtgagatgagccgcagcccgttcatctctccagtctccctggcaaccctgagtctccatggaattttggggacacagcttgaaaattgctttttatagaggcaaaataatggccttgcagccagctgggtttctattctaattctgatactattaaatgaccttaggcattttaacctctctgtatctagtttcttcatctgtgaaaaaggttgtgtaataatacctacctcatactgttgtgaggtttaagtgcaataacatataccaaacatatggcacatactaaatctttaggatgaggaaagatgtagggcaagaaagcaaaagcagaagttagaactggggaataaggtagagtcttacttgttttgttttgtttttttgagacagagtctcgttctgtcgcctaggctggggtgcagtggcgccatcatggctcactgcagccttgagcctcagtgagctatgagcttgaggctgcagtgagctatgatggtactactgccctccagcctgggcaacagagtaaggccctttatctaaaaacaaaaacaaaaaacttcttaaatctctcctgatgaaggacaggattggtttggggatgaggttgagcctgtagtataagtcagatggtcttgggtgtaaagattaaaaggcctggagggatggatgaccgaaggcagatttttgtcacaatgtttaggcccattttataatcttaattatggtagatataattgctgtatgacttttatcacctgagactttccacaacactgaaataaa

SEQ ID NO: 62471 - DNA, 629 bp, Homo sapiens
  misc_feature (566)..(566): n is a, c, g, or t
  misc_feature (584)..(584): n is a, c, g, or t
  misc_feature (589)..(591): n is a, c, g, or t
gatttagaatagtaattctatggttagattaattcaagccatattaattatttgaagattgtaatgcatgattctaatatgatgctcattcgattcacatttcccattacctctgaagagtacatatctccaaacggagttatttggaataagtcttttactgtgcacaagtttagaaaaaatttccaggaatttatcccaaaggaaaacccaatagaaacaaaaacaatttgtatttgcccacactagtgcatttctctgccttctgccagacattttttagatattctcaaatcaagttctcatttctgcctctggcatctcactgcaacagtaccagacattgatatagtctcgataactttcaaaagctttctttgtacatcgtcgggtcggatctgtgcaattattttgtgggtttaaaaatgcttctctacctaaatgtaagctcctagagggaagaactttgtctatcttgcctacttttgtatcttcagaattcagaaacgtgtctggtacgtagaaaatgtcattaaccatttgttgaattctgtagatgaggccgnctgttagcgcataagggnttttnnntttttgtctccctaatttgccgctctccccttcccccc

SEQ ID NO: 62472 - DNA, 322 bp, Homo sapiens
ggaataaaatgcctacacagaagcctctatctaacagtcctgctgggtggggcattacaaagagaggccacaggaaaacctttgagagtttggagcctgctgcgtgagagagataaaagtagaaacagcaaattggctgcaatacgaatggcaggtgcatttgttcactggaggcaagtttggcaatttagttttcaatgaccagcttgtctctttaaggttcacctttcaaagtcctcctttttgccctcaacatacatcgctaaagccctgtctcatcttgagtccccacgctccaggtaacagcagctctttactctgc

SEQ ID NO: 62473 - DNA, 451 bp, Homo sapiens
attgataaggttttagctgtaaaaaaacttggatgctgtcattccaggccttagaacaataaagagccgaacaaaatatcagtgacttttcatggacccatcagataactgaagatacaagaaaaactgccacaatgaaatctggagactcaggcacatccagagagatacagacagcatccgcttacctggagcagcagctgttagagccacacaaaggaatatttacattgaaattttggtgatttgctgaaggctgagagtgagagtgagaaactcttggaggctatagttcaaaagtctccccctacattcttatattttagttcataaacccaccgatctgattgacaagaaaaatccccataggcttctggcagggaaaggggaaaagtaaccattctgaaatatacccagatttttctccacaaggaagccctatttgtcaaag

SEQ ID NO: 62474 - DNA, 882 bp, Homo sapiens
gcttgtcttaggacctcatggatcccagggggaccaagagaggagctgagaagacagaggtagctgagcctcggaacaaactacctcgtccagcaccttctctgcccacagaccctgccctctactctgggccctttcctttctaccggcgcccttcggaactgggctgcttctccctggatgctcaacgccagtaccatggagatgcccgagccctgcgctactatagcccaccccccactaacggtccaggccccaactttgacctcagagacggatacccggatcgataccagccccgggacgaggaggtccaggaaaggctggaccacctgctgtgctggctcctggaacaccgaggccggttggaggggggtccaggctggctggcagaggccatagtgacgtggcgggggcacctgacaaaactgctgacgacaccgtatgagcggcaggagggctggcagctggcagcctcccggttccagggaacactatacctgagtgaagtggagacaccgaacgctcgggcccagaggcttgctcggccaccgctcctccgggagcttatgtacatgggatacaaatttgagcagtacatgtgtgcaggtgagttgcccctgcttcatagcccccttccccttcccagaggttgagagccccccacgcctgctgctgcttctctccttgtgcagacaaacctggaagctccccagacccctctggggaggttaacaccaacgtggccttctgctctgtgctacgcagccgcctgggaagccaccctctgctcttctcaggggaggtagactgcacagacccccaagccccatccacacagcccccaacctgctatgtggagctcaagacctccaaggagat

SEQ ID NO: 62475 - DNA, 475 bp, Homo sapiens
tgaaaaattaagtcacacataaatttctattatagcttctggtaactccttcctaaaagtcttctcagctaatgtggaaaattctagcttctcttttcattttttgagacagggactggctcagtcacccagactggagtgctgcggcatgatcatggctcactgcaggcttgacctcccaggctccagcaatcctctcatgtcagcctcccaggtagctgggaccaacaggctcgcaataccgcatgtgactaatttttgtattttttgtagagacggggtttcaccatgcagcacaggctggtcttgaactcctgggctccagcaatcctcccacctcggtctcccaaagtgctggagccactgcccccagcctgatttctcttttctatctttactccatttatccacttacatacctttacctttcaccaataaaatgtactaatctttgatatggatatgttacataaag

SEQ ID NO: 62476 - DNA, 226 bp, Homo sapiens
gatctgcctgcctcagcctcccaaagttctaggattacaagcatgagccaccgtgcccagctggggatcacaggcgtgagtcaccatacctggcccaccccacttttgttttgtttttcttgttttaaattggtttgtttatttatttatttatttatttttcgagacggagtctcgctgtgttgcccaggctggagtgcaatggtgccatctccgctcactgcaa

SEQ ID NO: 62477 - DNA, 536 bp, Homo sapiens
  misc_feature (302)..(302): n is a, c, g, or t
  misc_feature (416)..(416): n is a, c, g, or t
caaagccctcacacagcaatagttagggatctcggggtaattcaccaggttgttcttacagtgcctcttccataatgggaaagcagcaagcctttgggaaattttagcttctcctgtgaagaaaaactgtgcatcagcttttgtgacctgttacaggctaaggagaaaccttcattcgcccataccagaagcttccctgtgccctgtttgcattttccagaatgcagaatgaagatattggagcgaactgttctgcttgccaactagtgagaaggtgttaaaaaaaaaaaaaaaaaactcgnactctgccgaattcggcacgagcggcacgagcgatggagcagcagtacccacccatgaaaaccatgaaggggccttttggctgaaattccccacctgcctttggatgaaagacnccgttgggaataaatggccaaagcttataggactctgtgacaggttgtgaatgttttttttgttgttgttgttgtttttaattgctgttaatattttttaaataataaagaaacaaaact

SEQ ID NO: 62478 - DNA, 254 bp, Homo sapiens
gcagacagctgcgtaaaacagattatcagtggaaggtatggcagttccaaggcctgacctgcaaagtcagtcgggaaaagggtgcggtcagaaccagcacagctggaaggtcacccacagaataaaagttgccaactggatgtgttcctctaagacaactttgcaatgacacagaagcacagccatggtcaagagatggccagaaggaggtggtgaggagctgagagaggtccttggtgatcctcaacctacaa

SEQ ID NO: 62479 - DNA, 394 bp, Homo sapiens
ctccacatgttatgtcatttcttctgtttgaaatgactctccatctattcagttcaaatctgaatctgccttattttgaggcctggcccaaatgccaccttcttcagtgagcctatgtttagagtcctttccacactatacttgtggtataatgactcatgtgtttatcgtcccttttataataatagtaacttaagggaaagaaatcattttttgctctggctacatgcaaatagaacaactaattgttattggggtgggggaggaatttaggtgagaggaaggtgaacataaaaatacatgctgaaggaataaatgccatctcacaagccattgctaagcagaatggtgaatggtacgtaacaggacccttggaaaacagggtgtgataaaa

SEQ ID NO: 62480 - DNA, 373 bp, Homo sapiens
cattctttattcaattgccttagcaacaatttttacagagcttctctgaacttggagtaacgaatctggagcgaaattttcctcattataattattctacaatctttccctccaagtggttttaagtggctagggctgaagaagagagcccaggcatgtacacagcatgatgctgagctcctgcaggagagaagggcagcctgtctttccatcacactacccttccccaggagggaagagcgggctctgctcctccccaagggcagctggttaatgaggccggacgctgggccccgtggagctcactgctggtgcccgccctgctgtattcacacagctactgatctcagcctctcgagcatcttacatttca

SEQ ID NO: 62481 - DNA, 268 bp, Homo sapiens
gaagtataaacttttcttttgccacaaaattaatttgaaacatatcctaagctttttggtaagtcattggacttcatatttgaactggtgatagggttgtatgtaaccaaaccttgagatcatacagtgagctgtgtttaattataactcattattgtaattaatcttacattgtagaacttgacgtctcgtttttctttttaaaaattgggcaagtagctgtgcagtggctcatgactgtcatcccagctacttgggagactgagca

SEQ ID NO: 62482 - DNA, 423 bp, Homo sapiens
gtctttgagttcagccaccttggctctgcagcggcccccatggtgctcatctcagacatcttcatgcccacatctggaagtccagtttggattttaagaaaaatcttctttatctctgtttaccacgtctcatgtttcttctggctttctggatgggtgggatacaggtagcctgacttaaaatgtcatctactaattctgccattcggccatttatgggacttttcctgtggatcgatttgactcctaggaagggattattttcctttcttccttgaacacgtggtgatctttgattacaagcaaaacactgtgacctcttggctttgtgctgatgcacacacaggcacacgtgcacatgcatacacacacacatgcacacatgcacatgagttttgtgagccagcagtgctgtgcatgcac

SEQ ID NO: 62483 - DNA, 140 bp, Homo sapiens
ctttcgactgcttttgttctttatagaaatggagttgtgcagtatgtgctcctttttaatctagcatctttcttttgaattgtttatgacatttatctgtatattttgagtggtcataattcatttgcattattgattaa

SEQ ID NO: 62484 - DNA, 318 bp, Homo sapiens
ctccacagttcattgttcagggcaggtgacaaggccagccccaggggaacggaaatagactctcgccgttcattggaagcactgtctgcatgtacagtgatgggaggaaactctggcagtcctatttctggccaactatccaaacatattttccattatctgtatgcatttctgacgggaaaaaagaaaaatatatctttaggcaaaaatatagcatattggaagagaaccaggaggagtgaaaacatttggactttaatgatgtctttgatactcagtatttgaatgatcttgttggaataaatgatttcatttggc

SEQ ID NO: 62485 - DNA, 1194 bp, Homo sapiens
actcttttcagattcacgttctctaacaaagagtctcatgttcaagatcaatatgtctaataagtgctggtgtccttttaaagtatttaaatatatatgttgctgttgctgaatacaggagaccaggttaggaatatagtttcataataatagtacatacaatactaattgtatataaggtagcaaccaaaagaggttgttaattagcacatattccttttagaaaaatgtttcagaaacctcagtcttgatatctgagctatctgggctcccttacttgtgagtaagggatcatgctcaccactggagaagcttacaccgggactttttttcttttttcttttttttttgctatgacagagtaatgctaacgtaaggacaactgagtttgatcagtgtttaatcgcagtgggtaatcttatctgattgtctttaaaagtgaaaaggattaagattttattctttcttgtaaacattacttgattttttaaagaagttttgggctcactgctaaaatagagtatacaactgaatgtttttaagtcaagatactgttttaggagtttaccctctcatttataaccaaagttgctctaaaacactttccaaatatctgcacttctgatgtcagaatcaaaccagataattctctaattcttctttaatctaaagtagatagcttcccactggaaagtaaacaaaaccatccctcccaacctcaaagctaggccacactctatttcaaggcattttctttcagctgataaggtgtcctcctgaagccaagtaggtggttctggtctccaagtatcgttaagcacaggtgctatgacagaaaaagttctggggtggaagttttaagatgaggagttctgatcttaggcatcttaacagtcacaaggtgaaaagtcaaatgaaacagtacaattcttgatgagtgaggtgtcatcttccaaccacacagaggacgttttggctatgatcatctgatggcaagtgaaggagaaatgagtgatagggctttgcgttttcatccagatgctgtggccctgtgtttcacagcattaagagccataatttccaacctgcacagatcctgaacaacaaatgaataacgatgaatgtctttttggttgtaatttaacaagtcaaataaaataatcattgctgagcacaatcacatgttgaaacaag

SEQ ID NO: 62486 - DNA, 2006 bp, Homo sapiens
ggcggcatggggtctgtagacatccaggtagctgtggctgaggagaaagggcctctccaacatgacatcctcctgctgtgtcaccaacaacttgcaagcctctctcaagagctgcccccggcctgcctcggtctgttccagcggcgtgaactgccggcctgagctgtgcctgggctatgtctgccagcccatggcatgcctgccttcggtctgcctgcccaccaccttccggccagccagctgcctctccaaaacctatctatccagttcctgccaggcagccagtggcatctccggctccatgggccccggcagctggtacagcgaaggggccttcaatggcaatgagaaggaaaccatgcagttccttaacgaccgcctggccagctacctgacgagggtgcggcagctggagcaggagaatgcggagctggagagcaggatccaagaggcctctcactcccaggtgctcaccatgactcctgactaccagtctcatttcaggaccattgaggagctccagcagaagattctgtgtaccaaggcagagaatgccaggatggttgtgaacattgataatgccaaactggctgccgatgacttcagggccaagtacgaggcagagctggccatgcggcagctggtggaggccgacatcaatggcctgcgcaggatcctggatgatctcactctgtgcaaggctgacctggaggcccaggttgagtccctgaaggaggagctgatgtgcctcaaaaagaaccatgaggaggaagtcggttcccttcgatgccagcttggggaccgccttaacatcgaggtggacgctgcacccccggtggacctgaccagggtgctggaggagatgcggtgtcagtacgaggccatggtggaggccaaccgcagggacgtggaggaatggttcaatatgcagatggaggagcttaaccaacaggtggccacaagctctgagcagcttcagaactaccagtcagacatcattgacctgagacgcacggtcaacacgctggagatcgagctgcaggcccagcacagcctgagggactccctggaaaacacgctgacggagagtgaggcccgctacagctcccagctggcccagatgcagtgcatgatcaccaacgttgaggcccagctggctgagatccgggctgacctggagcggcagaaccaggagtaccaggtgctgctggacgtccgggcccggctggagggcgagatcaacacgtaccggagcctgctggagagcgaggactgcaagctgccctgtaacccatgctccactccttcctgcaccacctgtgtgccctccacatgcatgcacccgcaccgtctgtgtgccacgcactgttggcatgccttgctcaccctgcccccagggccgctactgaagtccctttgtgccagtggatcctggagggcctggggctgggcagcctggtattcagtggccaccagaagagcagggccagccccggtcagcaaggaagaccctgagcaggaccgtggatcacctgcaacaagctctgatactccaggggatacttaagccctcatcacttcaaaactgcctcttttttccatgggtgaactgttctctttggtgatgtttctggttgtctgtgctgcctcaaagagcgtgtgttcttagttaactggcaaatagagctgtactcagtggccttgcaaacatgtctgtctctgtttgtcacttacgctgctgcatccacaagccaatcctactcaattgggcttaagaggaacgtgggcaaattctgtatttatttttatgctccttctgcttccatagaggcttgagaggtgttcactaaaagggcccgcatgccataaaccagttaaaactaatcaattactctagagccaagtaataaaagaataaagagaggagggagataattatgccagaaacctaggccaaattactgtaattgagaatcatatcataataaacccacccctaaatctca

SEQ ID NO: 62487 - DNA, 1358 bp, Homo sapiens
ttattttactttaacttctgggatacatgtgcagaacgtgcaggtttgttacataggtgtacatgtgccatggtggtggtttgttgcctatcaacccgtcatctaggttttaagccctgcatgcattagatatttgttttaattttctccctccctgctcccctcacctctcgacaggccccagtatatgatgttcccctccctgtgtccatgtgttctcattgttcaactctcacttatgagtgagaacatgtagtgtttggttttctgttcctgtgttagtttgctgagaatgatggcttccagaggaagctgcttttcatcctgagctcaaatggaagccactgaaggttttagggaggggagggacataattggatttgtgactgtagaagattgctctggctactaagtggacagtggttaggaggggcccaagtggggttggggagatcagttaggaggccatgaggtgactcaggcaaagatggcggaggttgggaccagggaggctgggcagagaaagcacggaagatggggttgagaggcatccgaggggagaattggcaggacctgtggccgagtgggccttctctactaatcctgtttctctttgactttctcctgcaggctgccctgtaacccatgctccactccttcctgcaccacctgtgtgccctccacatgcatgcacccgcaccgtctgtgtgccacgcactgttggcatgccttgctcaccctgcccccagggccgctactgaagtccctttgtgccagtggatcctggagggcctggggctgggcagcctggtattcagtggccaccagaagagcagggccagccccggtcagcaaggaagaccctgagcaggaccgtggatcacctgcaacaagctctgatactccaggggatacttaagccctcatcacttcaaaactgcctcttttttccatgggtgaactgttctctttggtgatgtttctggttgtctgtgctgcctcaaagagcgtgtgttcttagttaactggcaaatagagctgtactcagtggccttgcaaacatgtctgtctctgtttgtcacttacgctgctgcatccacaagccaatcctactcaattgggcttaagaggaacgtgggcaaattctgtatttatttttatgctccttctgcttccatagaggcttgagaggtgttcactaaaagggcccgcatgccataaaccagttaaaactaatcaattactctagagccaagtaataaaagaataaagagaggagggagataattatgccagaaacctaggccaaattactgtaattgagaatcatatcataataaacccacccctaaatctca

SEQ ID NO: 62488 - DNA, 955 bp, Homo sapiens
gataaatcgagctcgtgacccggccccatgcacagttcggtccatgcacagttttcagtaaatgtcaaagacccttctaactgtcacatgagtgacttcagacatgagattcttcccttccacattgcttggcacatccaaaatggggaatttgaatttacgaagcttcaggttcttaaaaaatacatctcaagttctccaaggactagcaattcgctaaatatctcccagagttccagggaagaggaccttctgcagggatggctgcagggctgctggatcctacctttgctgctgtcttctcttcatttgggttcttcttgcttcgtctcatcctgaactaaccctctccatgtgccttggcctacagattctgtgtaccaaggcagagaatgccaggatggttgtgaacattgataatgccaaactggctgccgatgacttcagggccaagtgagttcagtcggggggctggagctggggaggacctgtcctcataggctctggggcaactttccattagtttcacggagggttggaaagtgccggcagtttaaggccttccctgagttctgcattctgtttcacccttggttgctgaccctgtccttgtgcaggtacgaggcagagctggccatgcggcagctggtggaggccgacatcaatggcctgcgcaggatcctggatgatctcactctgtgcaaggctgacctggaggcccaggttgagtccctgaaggaggagctgatgtgcctcaaaaagaaccatgaggaggtgaggctggaagtcccgctgaagtggccccgggaagcagagggggaggaacgtggggtatggggttggataggcgtgggttgaaattcccaagcctgccacatgttgttttagtgactttgcccaatttatggaatcttcctgagcctcctcttctgtaaaatggggacaacatgatcac

SEQ ID NO: 62489 - DNA, 1392 bp, Homo sapiens
gataaatcgagctcgtgacccggccccatgcacagttcggtccatgcacagttttcagtaaatgtcaaagacccttctaactgtcacatgagtgacttcagacatgagattcttcccttccacattgcttggcacatccaaaatggggaatttgaatttacgaagcttcaggttcttaaaaaatacatctcaagttctccaaggactagcaattcgctaaatatctcccagagttccagggaagaggaccttctgcagggatggctgcagggctgctggatcctacctttgctgctgtcttctcttcatttgggttcttcttgcttcgtctcatcctgaactaaccctctccatgtgccttggcctacagattctgtgtaccaaggcagagaatgccaggatggttgtgaacattgataatgccaaactggctgccgatgacttcagggccaagtgagttcagtcggggggctggagctggggaggacctgtcctcataggctctggggcaactttccattagtttcacggagggttggaaagtgccggcagtttaaggccttccctgagttctgcattctgtttcacccttggttgctgaccctgtccttgtgcaggtacgaggcagagctggccatgcggcagctggtggaggccgacatcaatggcctgcgcaggatcctggatgatctcactctgtgcaaggctgacctggaggcccaggttgagtccctgaaggaggagctgatgtgcctcaaaaagaaccatgaggaggaagtcggttcccttcgatgccagcttggggaccgccttaacatcgaggtggacgctgcacccccggtggacctgaccagggtgctggaggagatgcggtgtcagtacgaggccatggtggaggccaaccgcagggacgtggaggaatggttcaatatgcaggtgggcctctcacggtggggatggcctcctcgatatccctaagactagggactctagccttctccttcccccaactgcagatggaggagcttaaccaacaggtggccacaagctctgagcagcttcagaactaccagtcagacatcattgacctgagacgcacggtcaacacgctggagatcgagctgcaggcccagcacagcctgagggactccctggaaaacacgctgacggagagtgaggcccgctacagctcccagctggcccagatgcagtgcatgatcaccaacgttgaggcccagctggctgagatccgggctgacctggagcggcagaaccaggagtaccaggtgctgctggacgtccgggcccggctggagggcgagatcaacacgtaccggagcctgctggagagcgaggactgcaagtacgcaggcccagctgaggcttagagag

SEQ ID NO: 62490 - DNA, 1401 bp, Homo sapiens
gttgcatcttttcatgtctccctggggaggtgagccaggatcctatcattgtcacatttttctggaggtcttgtgccttttcaggaagtcggttcccttcgatgccagcttggggaccgccttaacatcgaggtggacgctgcacccccggtggacctgaccagggtgctggaggagatgcggtgtcagtacgaggccatggtggaggccaaccgcagggacgtggaggaatggttcaatatgcaggtgggcctctcacggtggggatggcctcctcgatatccctaagactagggactctagccttctccttcccccaactgcagatggaggagcttaaccaacaggtggccacaagctctgagcagcttcagaactaccagtcagacatcattgacctgagacgcacggtcaacacgctggagatcgagctgcaggcccagcacagcctgagggactccctggaaaacacgctgacggagagtgaggcccgctacagctcccagctggcccagatgcagtgcatgatcaccaacgttgaggcccagctggctgagatccgggctgacctggagcggcagaaccaggagtaccaggtgctgctggacgtccgggcccggctggagggcgagatcaacacgtaccggagcctgctggagagcgaggactgcaagctgccctgtaacccatgctccactccttcctgcaccacctgtgtgccctccacatgcatgcacccgcaccgtctgtgtgccacgcactgttggcatgccttgctcaccctgcccccagggccgctactgaagtccctttgtgccagtggatcctggagggcctggggctgggcagcctggtattcagtggccaccagaagagcagggccagccccggtcagcaaggaagaccctgagcaggaccgtggatcacctgcaacaagctctgatactccaggggatacttaagccctcatcacttcaaaactgcctcttttttccatgggtgaactgttctctttggtgatgtttctggttgtctgtgctgcctcaaagagcgtgtgttcttagttaactggcaaatagagctgtactcagtggccttgcaaacatgtctgtctctgtttgtcacttacgctgctgcatccacaagccaatcctactcaattgggcttaagaggaacgtgggcaaattctgtatttatttttatgctccttctgcttccatagaggcttgagaggtgttcactaaaagggcccgcatgccataaaccagttaaaactaatcaattactctagagccaagtaataaaagaataaagagaggagggagataattatgccagaaacctaggccaaattactgtaattgagaatcatatcataataaacccacccctaaatctca

SEQ ID NO: 62491 - DNA, 1046 bp, Homo sapiens
  misc_feature (1)..(1): n is a, c, g, or t
ntagaaggatccccctgggtgtatgtgcaccactgaaggttttagggaggggagggacataattggatttgtgactgtagaagattgctctggctactaagtggacagtggttaggaggggcccaagtggggttggggagatcagttaggaggccatgaggtgactcaggcaaagatggcggaggttgggaccagggaggctgggcagagaaagcacggaagatggggttgagaggcatccgaggggagaattggcaggacctgtggccgagtgggccttctctactaatcctgtttctctttgactttctcctgcaggctgccctgtaacccatgctccactccttcctgcaccacctgtgtgccctccacatgcatgcacccgcaccgtctgtgtgccacgcactgttggcatgccttgctcaccctgcccccagggccgctactgaagtccctttgtgccagtggatcctggagggcctggggctgggcagcctggtattcagtggccaccagaagagcagggccagccccggtcagcaaggaagaccctgagcaggaccgtggatcacctgcaacaagctctgatactccaggggatacttaagccctcatcacttcaaaactgcctcttttttccatgggtgaactgttctctttggtgatgtttctggttgtctgtgctgcctcaaagagcgtgtgttcttagttaactggcaaatagagctgtactcagtggccttgcaaacatgtctgtctctgtttgtcacttacgctgctgcatccacaagccaatcctactcaattgggcttaagaggaacgtgggcaaattctgtatttatttttatgctccttctgcttccatagaggcttgagaggtgttcactaaaagggcccgcatgccataaaccagttaaaactaatcaattactctagagccaagtaataaaagaataaagagaggagggagataattatgccagaaacctaggccaaattactgtaattgagaatcatatcataataaacccacccctaaatctca

SEQ ID NO: 62492 - DNA, 2091 bp, Homo sapiens
gataaatcgagctcgtgacccggccccatgcacagttcggtccatgcacagttttcagtaaatgtcaaagacccttctaactgtcacatgagtgacttcagacatgagattcttcccttccacattgcttggcacatccaaaatggggaatttgaatttacgaagcttcaggttcttaaaaaatacatctcaagttctccaaggactagcaattcgctaaatatctcccagagttccagggaagaggaccttctgcagggatggctgcagggctgctggatcctacctttgctgctgtcttctcttcatttgggttcttcttgcttcgtctcatcctgaactaaccctctccatgtgccttggcctacagattctgtgtaccaaggcagagaatgccaggatggttgtgaacattgataatgccaaactggctgccgatgacttcagggccaagtgagttcagtcggggggctggagctggggaggacctgtcctcataggctctggggcaactttccattagtttcacggagggttggaaagtgccggcagtttaaggccttccctgagttctgcattctgtttcacccttggttgctgaccctgtccttgtgcaggtacgaggcagagctggccatgcggcagctggtggaggccgacatcaatggcctgcgcaggatcctggatgatctcactctgtgcaaggctgacctggaggcccaggttgagtccctgaaggaggagctgatgtgcctcaaaaagaaccatgaggaggaagtcggttcccttcgatgccagcttggggaccgccttaacatcgaggtggacgctgcacccccggtggacctgaccagggtgctggaggagatgcggtgtcagtacgaggccatggtggaggccaaccgcagggacgtggaggaatggttcaatatgcaggtgggcctctcacggtggggatggcctcctcgatatccctaagactagggactctagccttctccttcccccaactgcagatggaggagcttaaccaacaggtggccacaagctctgagcagcttcagaactaccagtcagacatcattgacctgagacgcacggtcaacacgctggagatcgagctgcaggcccagcacagcctgagggactccctggaaaacacgctgacggagagtgaggcccgctacagctcccagctggcccagatgcagtgcatgatcaccaacgttgaggcccagctggctgagatccgggctgacctggagcggcagaaccaggagtaccaggtgctgctggacgtccgggcccggctggagggcgagatcaacacgtaccggagcctgctggagagcgaggactgcaagctgccctgtaacccatgctccactccttcctgcaccacctgtgtgccctccacatgcatgcacccgcaccgtctgtgtgccacgcactgttggcatgccttgctcaccctgcccccagggccgctactgaagtccctttgtgccagtggatcctggagggcctggggctgggcagcctggtattcagtggccaccagaagagcagggccagccccggtcagcaaggaagaccctgagcaggaccgtggatcacctgcaacaagctctgatactccaggggatacttaagccctcatcacttcaaaactgcctcttttttccatgggtgaactgttctctttggtgatgtttctggttgtctgtgctgcctcaaagagcgtgtgttcttagttaactggcaaatagagctgtactcagtggccttgcaaacatgtctgtctctgtttgtcacttacgctgctgcatccacaagccaatcctactcaattgggcttaagaggaacgtgggcaaattctgtatttatttttatgctccttctgcttccatagaggcttgagaggtgttcactaaaagggcccgcatgccataaaccagttaaaactaatcaattactctagagccaagtaataaaagaataaagagaggagggagataattatgccagaaacctaggccaaattactgtaattgagaatcatatcataataaacccacccctaaatctca

SEQ ID NO: 62493 - DNA, 2301 bp, Homo sapiens
aaagagacttccctagggcatagggttattttataatttgagcactcagcctgaggctttcatgtggagagatctgggatctagtctcagttctaccattgcctcattgcatgactttgggggtcccatcccttccccaggcctcagttttctcatctgtaaaacagggataataatggtcgttatctaatggggttgtcaaaaggatttgatgagatgatgcaggtcaagtgcttggaacagcccctggtccacggtaagttttcagtaaatgtcaaagacccttctaactgtcacatgagtgacttcagacatgagattcttcccttccacattgcttggcacatccaaaatggggaatttgaatttacgaagcttcaggttcttaaaaaatacatctcaagttctccaaggactagcaattcgctaaatatctcccagagttccagggaagaggaccttctgcagggatggctgcagggctgctggatcctacctttgctgctgtcttctcttcatttgggttcttcttgcttcgtctcatcctgaactaaccctctccatgtgccttggcctacagattctgtgtaccaaggcagagaatgccaggatggttgtgaacattgataatgccaaactggctgccgatgacttcagggccaagtgagttcagtcggggggctggagctggggaggacctgtcctcataggctctggggcaactttccattagtttcacggagggttggaaagtgccggcagtttaaggccttccctgagttctgcattctgtttcacccttggttgctgaccctgtccttgtgcaggtacgaggcagagctggccatgcggcagctggtggaggccgacatcaatggcctgcgcaggatcctggatgatctcactctgtgcaaggctgacctggaggcccaggttgagtccctgaaggaggagctgatgtgcctcaaaaagaaccatgaggaggaagtcggttcccttcgatgccagcttggggaccgccttaacatcgaggtggacgctgcacccccggtggacctgaccagggtgctggaggagatgcggtgtcagtacgaggccatggtggaggccaaccgcagggacgtggaggaatggttcaatatgcaggtgggcctctcacggtggggatggcctcctcgatatccctaagactagggactctagccttctccttcccccaactgcagatggaggagcttaaccaacaggtggccacaagctctgagcagcttcagaactaccagtcagacatcattgacctgagacgcacggtcaacacgctggagatcgagctgcaggcccagcacagcctgagggactccctggaaaacacgctgacggagagtgaggcccgctacagctcccagctggcccagatgcagtgcatgatcaccaacgttgaggcccagctggctgagatccgggctgacctggagcggcagaaccaggagtaccaggtgctgctggacgtccgggcccggctggagggcgagatcaacacgtaccggagcctgctggagagcgaggactgcaagctgccctgtaacccatgctccactccttcctgcaccacctgtgtgccctccacatgcatgcacccgcaccgtctgtgtgccacgcactgttggcatgccttgctcaccctgcccccagggccgctactgaagtccctttgtgccagtggatcctggagggcctggggctgggcagcctggtattcagtggccaccagaagagcagggccagccccggtcagcaaggaagaccctgagcaggaccgtggatcacctgcaacaagctctgatactccaggggatacttaagccctcatcacttcaaaactgcctcttttttccatgggtgaactgttctctttggtgatgtttctggttgtctgtgctgcctcaaagagcgtgtgttcttagttaactggcaaatagagctgtactcagtggccttgcaaacatgtctgtctctgtttgtcacttacgctgctgcatccacaagccaatcctactcaattgggcttaagaggaacgtgggcaaattctgtatttatttttatgctccttctgcttccatagaggcttgagaggtgttcactaaaagggcccgcatgccataaaccagttaaaactaatcaattactctagagccaagtaataaaagaataaagagaggagggagataattatgccagaaacctaggccaaattactgtaattgagaatcatatcataataaacccacccctaaatctca

SEQ ID NO: 62494 - DNA, 626 bp, Homo sapiens
gaccccgaccagaagatagagattgaaacgatgaggaaaacgaagtgcctaatccccgctggacgctaactgcaggcacccagaaatactctccacaccatgctgcactgctgcggatgagggaaggatggtgtcggggcttcaagactgtttttcctacctcttcagtgcctctttcagtgatatgaagttaaaaccaggaacatggaggagacatatttccacctatttctctccataagtataaaagaccataaaagaccatctagggacttcagaacccaaataatgacacaatgttaatttgcaggttctccctctgcctgccaccccacccagcaaggaggagaggaagtgttgagaagggaagagatgagtcctggccctgtcacttcttaggggtgtgcttttgaacaacctgctcaccatgtatgaacttcactcttcttgtttataaaatgaggacaatgacacctgcaagactgtgaggtttaaaaacaaaatctgtgttgagaggtaacttgcctcttttacttaccaatgatttcctcaatgcctggtgactggggctggttcatactagacgatcaataaatgctccttgacctcaaaaacccccccctctc

SEQ ID NO: 62495 - DNA, 841 bp, Homo sapiens
gaccccgaccagaagatagagattgaaacgatgaggaaaacgaagtgcctaatccccgctggacgctaactgcagggcaagctccccagtgttgtagttgtgtttcggaggccgagaaccgctatcgggcttcctcggactctggccctggaggggggaaacggcgagggagaaggcgaaacgagtctccagtgtgttcttggggcctggtgcgaggcccagagaattctctgcaggcctttgcccgggcactgattaaggctgcgaagagacgcaccgggctgcgggcttagtagcttcaggcttctgaagtcagagggagggctgagagcttacacttctggagctccccgggagacggcaactacccaaccgtgtgggtgtgtttgtcacccagaaatactctccacaccatgctgcactgctgcggatgagggaaggatggtgtcggggcttcaagactgtttttcctacctcttcagtgcctctttcagtgatatgaagttaaaaccagttaatttgcaggttctccctctgcctgccaccccacccagcaaggaggagaggaagtgttgagaagggaagagatgagtcctggccctgtcacttcttaggggtgtgcttttgaacaacctgctcaccatgtatgaacttcactcttcttgtttataaaatgaggacaatgacacctgcaagactgtgaggtttaaaaacaaaatctgtgttgagaggtaacttgcctcttttacttaccaatgatttcctcaatgcctggtgactggggctggttcatactagacgatcaataaatgctccttgacctcaaaaacccccccctctc

SEQ ID NO: 62496 - DNA, 438 bp, Homo sapiens
ccaaggaatgacaaatcctggaaagcagcatggaacaggttttccctcacagcgcttagaaggaaccaatcctgccaacaacttgatcttggacttctatcttctagaactttaatttgcaggttctccctctgcctgccaccccacccagcaaggaggagaggaagtgttgagaagggaagagatgagtcctggccctgtcacttcttaggggtgtgcttttgaacaacctgctcaccatgtatgaacttcactcttcttgtttataaaatgaggacaatgacacctgcaagactgtgaggtttaaaaacaaaatctgtgttgagaggtaacttgcctcttttacttaccaatgatttcctcaatgcctggtgactggggctggttcatactagacgatcaataaatgctccttgacctcaaaaacccccccctctc

SEQ ID NO: 62497 - DNA, 1036 bp, Homo sapiens
cgccccttccaaacgcccccgtctccggggacatcccgacgcgcccaccatgggaaaagacaggccaaacggcgcccgcggatcccgaacgtaacacggccgcttgagctggcccgccgaggaagagttgaagatgagaaccgaaggccaatcccgctgacgctaactgcaggcaagctccccagtgttgtagttgtgtttcggaggccgagaaccgctatcgggcttcctcggactctggccctggaggggggaaacggcgagggagaaggcgaaacgagtctccagtgtgttcttggggcctggtgcgaggcccagagaattctctgcaggcctttgcccgggcactgattaaggctgcgaagagacgcaccgggctgcgggcttagtagcttcaggcttctgaagtcagagggagggctgagagcttacacttctggagctccccgggagacggcaactacccaaccgtgtgggtgtgtttgtcacccagaaatactctccacaccatgctgcactgctgcggatgagggaaggatggtgtcggggcttcaagactgtttttcctacctcttcagtgcctctttcagtgatatgaagttaaaaccaggaacatggaggagacatatttccacctatttctctccataagtataaaagaccataaaagaccatctagggacttcagaacccaaataatgacacaatgttaatttgcaggttctccctctgcctgccaccccacccagcaaggaggagaggaagtgttgagaagggaagagatgagtcctggccctgtcacttcttaggggtgtgcttttgaacaacctgctcaccatgtatgaacttcactcttcttgtttataaaatgaggacaatgacacctgcaagactgtgaggtttaaaaacaaaatctgtgttgagaggtaacttgcctcttttacttaccaatgatttcctcaatgcctggtgactggggctggttcatactagacgatcaataaatgctccttgacctcaaaaacccccccctctc

SEQ ID NO: 62498 - DNA, 1101 bp, Homo sapiens
cttttcaggatgctgcaaagattaagtgaggaacatcacgtggtttctcgttggcatgaagcaaacattagttccctttgctgttctcatttgaacatgcatattttgggggattctagccagggtggcattgaggactcacaccatggtccacttgttacttgacccctgcaagtgcccagcgagaggctcaacaaacaacaaacagtgcatcccttagaaaaagagcagggtgggtgcgggaatcctaaacgtcccaacctgaccactcaggcacgcctgcccagagcctcctgggttcccaagtctctgacctaagggcagaagtcacagatctgccaaaccacacagaagaaagccagtgagaaacatttagaggtgtcaccaggcgccagggtcttattggtgtgtgaccgccgggcaccacccatgcacagaggtcactagcgttcagtgagcgcctcgttcacacctaccttgagtctggcattttaccagcatagtaggaacttggtatggttacctcctagaaacttcacttccaccctccaaggtggggctgttctgaccctgatctgttggaagaggaaccctggcaggggagtagcagatgcacaattcaaacccaggtctcctgatccaatgcccagggtttttcatttgttttcattttaccgtgctacaggaaggagcaagaacaagagcccaggtaaaggaatttgcaagtctggccggcatggaaagcaaactcctttcttcattttgcccccacttgttcagtttgcccctatttgttcagtttgccccgggttaaaggtcaagttcatttggggatgaggaaagtcttcactgatctccagctgtctagtgtgggacactcagggaaagggctgggtaaaagaaatacaaccaagctagagaaagtttcagaaggaaaaaatatcacatattcctacctcctcgagagccaggaaaagaagccttatcatcacctgattgctttttccatgtgataggaatgaccggactttctttggaccacccctttattaatcttgattatgtacaataaagataaaaactttgtagccaaccaccaag

SEQ ID NO: 62499 - DNA, 659 bp, Homo sapiens
gttagaggatcccgcttgctgggaagaggggagggtggtcaggaacagcacagtgctcagccagagcttcggccttggttgcgccagcctggtggccagtggtggtggagactgaggaagaggaagaggaagacgctcaccagttctgctgtccggcctccgagtgcagtagtccctcctctcggtaactgagaggacaagggccattttctatgcagaagcaaaagccttaaccagcccctccttccccagccgatgtggtgaggaccaggtgtcaaacctggagcagggacagggcagcaaggatgggagggcgaggaggctctggtgtagggcagtgagaagagtggggcaggccaggccctcagcagtggccgggtttggtgcggggccttgggggagtctgctccagatctgtccccagcacagcagtgaccagaatctcataaaagcaagagggcccggaccccgcctcgggcttgaaaggggcatctgagccccggagcaatcgaaggcaggatctgggggctctcaagctctgaggggtgtggcgggagatgggattgggaggcgggcaggcctcccagagaggagggggccaggtcagggccttgagagctgagtgcctttcctctctagtccctcttcccagccagggt

SEQ ID NO: 62500 - DNA, 196 bp, Homo sapiens
gaggagggggtggtgacacggtggagacaccggctaggccagggggcctgcccttgggacaggtccagacccatggagccccccgggaggagcagcaggtccacagcgtctcatactctacaccagtattgctgtcctctcagagtgcgtgttgctgtgtacaaaggaatttccatcaataaaagctgatctcttc

SEQ ID NO: 62501 - DNA, 754 bp, Homo sapiens
ggggggctcatgggtctggactgtccaaggcaggcctggctagccggtgtctccaccgtgtcaccaccccgtcgggtggagcagcaggtccacagcgtctcatactctacaccagtattgctgtcctactcaggtccttgactccatgaagcttaccccctcaggcaggctggcagagagcagggaagaggaggaggaggaggagactgaggaagaggaagaggaagacgctcaccagttctgctgtccggcctccgagtgcagtagtccctcctctcggtaactgagaggacaagggccattttctatgcagaagcaaaagccttaaccagcccctccttccccagccgatgtggtgaggaccaggtgtcaaacctggagcagggacagggcagcaaggatgggagggcgaggaggctctggtgtagggcagtgagaagagtggggcaggccaggccctcagcagtggccgggtttggtgcggggccttgggggagtctgctccagatctgtccccagcacagcagtgaccagaatctcataaaagcaagagggcccggaccccgcctcgggcttgaaaggggcatctgagccccggagcaatcgaaggcaggatctgggggctctcaagctctgaggggtgtggcgggagatgggattgggaggcgggcaggcctcccagagaggagggggccaggtcagggccttgagagctgagtgcctttcctctctagtccctcttcccagccagggt

SEQ ID NO: 62502 - DNA, 669 bp, Homo sapiens
gaggagggggtggtgacacggtggagacaccggctaggccagggggcctgcccttgggacaggtccagacccatggagccccccgggaggagcagcagggaagaggaggaggaggaggagactgaggaagaggaagaggaagacgctcaccagttctgctgtccggcctccgagtgcagtagtccctcctctcggtaactgagaggacaagggccattttctatgcagaagcaaaagccttaaccagcccctccttccccagccgatgtggtgaggaccaggtgtcaaacctggagcagggacagggcagcaaggatgggagggcgaggaggctctggtgtagggcagtgagaagagtggggcaggccaggccctcagcagtggccgggtttggtgcggggccttgggggagtctgctccagatctgtccccagcacagcagtgaccagaatctcataaaagcaagagggcccggaccccgcctcgggcttgaaaggggcatctgagccccggagcaatcgaaggcaggatctgggggctctcaagctctgaggggtgtggcgggagatgggattgggaggcgggcaggcctcccagagaggagggggccaggtcagggccttgagagctgagtgcctttcctctctagtccctcttcccagccagggt

SEQ ID NO: 62503 - DNA, 751 bp, Homo sapiens
gaggagggggtggtgacacggtggagacaccggctaggccagggggcctgcccttgggacaggtccagacccatggagccccccgggaggagcagcaggtccacagcgtctcatactctacaccagtattgctgtcctactcaggtccttgactccatgaagcttaccccctcaggcaggctggcagagagcagattcccccatgggaccctgtcccctgcttcaggaaccagatgggcaagcatcgtgccccttcctccccccaccttcttcttggaattcccatccccactgctgtctcctctggactccagcccctgaattaaagagagctggagccctaggtccgactaaaatgtgggagaagcagagcttggagcttggagcttggaacctggatcctcccgtacccgcactcccacttcccaggcaccctggagcctgccactactggagaggtctccaaatgacatcccaaggacctacctctgtcctctgtgagcacaaacagagatgcagggtgcctagggctcagaggaccagacgggggcaggacccagcctgcctagttccctgtcgtttgttcccttgctgtggccattgctgccatctcctccactgcttgaaggcctcaccccatgccctctgccactcccatagtgctctgtaaatattatcaggaggaaaaggcctctcagagtgcgtgttgctgtgtacaaaggaatttccatcaataaaagctgatctcttc

SEQ ID NO: 62504 - DNA, 185 bp, Homo sapiens
ttctctctggaggagtggcagtgcctggacacagcacagcagaatttatataggaatgtcatgttagagaattatagaaacctggtattcctgggtattgctgtgtctaatttagacctgatcacctgtctggagcaaggaaaagagccctggaatatgaagagacacgagatggtagccaaacc

SEQ ID NO: 62505 - DNA, 441 bp, Homo sapiens
gtaaccaacccatgttccacctagaaatgcctctcctgctacaggccagtgtggcacctggggcagcaccctgttaatccatagaaagggttcagcacaaccccaggccggcgagtgctcacaagggtgagctgtgatttcagtgactcctatggctcgttggacgccactgtggacacagtgaggcagcggaggctatcttcccagacaaagcagtggcaggtccctgcaggacctcccaaggcatctgacccaggagataaattgcatttggcaagagacctcatatcttcaaagggctccctgtcaccagggccactcacagcacctcagtcgaccagagaccctgcagccctgggccgtcccagagcaccccacttaggacttgcttgcacgtggctctctgcaaatgtcagactcctgacaaaatgatagacaaag

SEQ ID NO: 62506 - DNA, 148 bp, Homo sapiens
agtagtatgtttgtaatttcagtgtttattactaatattatacatccctcaattggcataattataatattttaactaaaatatacttgtgctgggcttctggcaaaattataaagttgctttattaaattcatacatgcggaaatct

SEQ ID NO: 62507 - DNA, 394 bp, Homo sapiens
cttatttgtggctcctaaattttcaaatcaaatgaaaattctcagtcagaattaagtctattctttacttctaataactagtaatttttaaagaccctgactctcttatgtcttgagaatattcagtaataaaatgctagtatacagtttttaccagactccattgcaatgctccctgtgtggaacaatggaattttttcaaggctagtagtttgtgtgtttgtttgccaaagtggaggctgtgagattggtttatagagctgcccttgggaccacattgttctcacacgtgtagggtctctttcatctattctagctgtcaattgtaacatacaggagtaactcactagctttttcactcctgggagactccttctctccttttctattctgg

SEQ ID NO: 62508 - DNA, 571 bp, Homo sapiens
tcctggccctcccccatgcacacgtcctccatgaacccaagccagaggtggcagctggtcatgtaacctttatgtaatacccaccctgttccatccagggctgtgtgctggccccacacaggacaatggctcccgcacagaacaatggctctccgcaactttggtcccctggtccacttctgctcgagagcctcaggacaaacctctctctttcacttgacagcccattacacatttgattacagccatgcgtgtggcccttgtccctatcttctgcaggctaaatatctccagtcccttcaacctcccctgatgaaactatttccactcaccacattgtcctgcttcctctgagatggacaaacttcactgggtcagagattctcctagagtgtaaggctcagctctcctaccctcctggaggaggcgtcccctgataacagccttcccagaagggagtttggaaaaacatgaaaacatcttaaaaatgtttatacccttcattgcataaattccatttctgggaatggatcttaaataatcaaagataattaaaatatttaagtcacac

SEQ ID NO: 62509 - DNA, 945 bp, Homo sapiens
cccaaggaagagatcagccttttgcattgcaaactttccccccacactagtaaaggtgaaaggcctacgtatcccaatgactaaaaggccaaattagagctagctttttggcttatgacttaattgttgttggttttagttgtagtttataaagaatttttcatggaccttcttttctcttaatgctaccagtaggccttatcagtcctttataccaactgttcccaaccttttagcaccagggaccacctgtaccagtccgtggcccatgtgttggggacccgtaatttataccatggtgttagattagtttgagatgctccccataagagcagtttttgaaaggagggaaaaaaaatagaaccagactcccaaggttggcggaaaaaaaacaatctcacatatttgaaagactgagtcctttatatcctctgccatcttttcgatgttccccttccctttgccttatcaatgtacaaagctttttactagaaaatacaaggcaaaatgcacattctctaataaagcagaaaattactttggataaactttcagcaaaaccatgtagatttcttggtttaaaaaaattgtgtttgtgcaggaactttttgtttatacatccccacaagctccaacaaaactgaagatgataatcaaggttgcagattttattagggttcactttagaaaataaatgtatagtataaatggaaattaaatatttcaggaaatgactggctttatccagaacatacaagttttaatttttcaacagacaatatcaagatgttctttatttagcccctaccttgcatagtggggaagacacaaggccagttgaacagtgaactgctgaaagcaaatttcactttcaacacagaaagcacgggattatgaaacaggttcttcttaagaaatacagagggttttaaactttttggttgc

SEQ ID NO: 62510 - DNA, 1086 bp, Homo sapiens
cttcctgaagtcgtgtttttccacaggcttaagaaaattattcaccactcataagtcatggagacatcctcaaaaggtctgcttacccaagttactcagttttggaacctcctagatgatctagctcagagtgaccctgagggctatgagaagtttattcagcagcagctgaaagaagggaaacagctctgtgctgccccagaaccacagctttgtctacagaccaggattctgaaaccaaaagaaaaaatactttttatcaacctgtgtcagtggacaaggatcccagctccccaatcaaccactcatccagtacctctaactgttggcaaaccagaagatacaactgagatatcagatgcttacacagtcattgatgttgcctacaatcctgatgttcttcatgcagcagaaaaggaccaagtgaaaaaaaatcagttaattcagatggccatgaaatgcattgaggagaaattccagttcaccctctcacactcttaccatattaccaaatttagaataaaaggaagcattcaaagaatgaaacaaaatctgatgggaatccaaactgattccatagatttaagagaaaaaatgagaagggaactaactcttggacagatacgaagcagtactatgagcaatccagatcactttcctcaactgttactgccaaaagaccaagtttcaggcaaagcagtgtgtctgatagaagagatttccagtactgaaatccaggtggagatgaagatgccagcctatgaactaaaaattgtgcatgatcacagtgagaaacctctgaaaattgagttgaaagttgaattacctggtattaattctgtctctctctgtgaccttagtgtttctgaggatgatttattgattgaagtatctgagaagtacagattacatctgaatcttccaaaacttattgatactgaaatgaccacagcaaaatttatcaaagaaaaatccacgctaatcatcacaatgcctttggtgtgaaagaagagcatcatatgttttgggttttcagtgctaaagtcatgtgaattaaaggaccttcattttggctaaaaaaaaaaa

SEQ ID NO: 62511 - DNA, 1172 bp, Homo sapiens
aagtcgtgctcctgagaaatcgtcccaccaacaggcagcccagagactcccacaagggagggttttcaggacactccagaggttgacgggtgcagaaagaaggcgggcgctttcctggaagagaagtgggtcaggcccaactgaaaagcaagcctggcaccagaagggggacattccggaactagatatgaagagacttttctccctgaagttccccggacccaattagatgttgtacccaggctggttaccctggtaacaggcgtcgcggtttgtcaaggaactgagagaagaggcttaagaaaattattcaccactcataagtcatggagacatcctcaaaaggtctgcttacccaagttactcagttttggaacctcctagatgatctagctcagagtgaccctgagggctatgagaagtttattcagcagcagctgaaagaagggaaacagctctgtgctgccccagaaccacagctttgtctacagaccaggattctgaaaccaaaagaaaaaatactttttatcaacctgtgtcagtggacaaggatcccagctccccaatcaaccactcatccagtacctctaactgttggcaaaccagaagatacaactgagatatcagatgcttacacagtcattgatgttgcctacaatcctgatgttcttcatgcagcagaaaaggaccaagtgaaaaaaaatcagttaattcagatggccatgaaatgcattgaggagaaattccagttcaccctctcacactcttaccatattaccaaatttagaataaaaggaagcattcaaagaatgaaacaaaatctgatgggaatccaaactgattccatagatttaagagaaaaaatgagaagggaactaactcttggacagatacgaagcagtactatgagcaatccagatcactttcctcaactgttactgccaaaagaccaagtttcaggcaaagcagtgtgtctgatagaagagatttccagtactgaaatccaggtggagatgaagatgccagcctatgaactaaaaattgtgcatgatcacagtgagaaacctctgaaaattgagttgaaagttgaattacctggtattaattctgtctctctctgtgaccttagtgtttctgaggtaagttgaatagataacactgtaaatttgtat

SEQ ID NO: 62512 - DNA, 1476 bp, Homo sapiens
aagtcgtgctcctgagaaatcgtcccaccaacaggcagcccagagactcccacaagggagggttttcaggacactccagaggttgacgggtgcagaaagaaggcgggcgctttcctggaagagaagtgggtcaggcccaactgaaaagcaagcctggcaccagaagggggacattccggaactagatatgaagagacttttctccctgaagttccccggacccaattagatgttgtacccaggctggttaccctggtaacaggcgtcgcggtttgtcaaggaactgagagaagaggcttaagaaaattattcaccactcataagtcatggagacatcctcaaaaggtctgcttacccaagttactcagttttggaacctcctagatgatctagctcagagtgaccctgagggctatgagaagtttattcagcagcagctgaaagaagggaaacagctctgtgctgccccagaaccacagctttgtctacagaccaggattctgacagagtcttactttgtcaccaggctggagtgcaatggtgtggtcttggctcgctgcaacctctgcctcccgggtttaagcgattctcctgcctcagcctcccaagtagctgggattacagaaaccaaaagaaaaaatactttttatcaacctgtgtcagtggacaaggatcccagctccccaatcaaccactcatccagtacctctaactgttggcaaaccagaagatacaactgagatatcagatgcttacacagtcattgatgttgcctacaatcctgatgttcttcatgcagcagaaaaggaccaagtgaaaaaaaatcagttaattcagatggccatgaaatgcattgaggagaaattccagttcaccctctcacactcttaccatattaccaaatttagaataaaaggaagcattcaaagaatgaaacaaaatctgatgggaatccaaactgattccatagatttaagagaaaaaatgagaagggaactaactcttggacagatacgaagcagtactatgagcaatccagatcactttcctcaactgttactgccaaaagaccaagtttcaggcaaagcagtgtgtctgatagaagagatttccagtactgaaatccaggtggagatgaagatgccagcctatgaactaaaaattgtgcatgatcacagtgagaaacctctgaaaattgagttgaaagttgaattacctggtattaattctgtctctctctgtgaccttagtgtttctgaggatgatttattgattgaagtatctgagaagtacagattacatctgaatcttccaaaacttattgatactgaaatgaccacagcaaaatttatcaaagaaaaatccacgctaatcatcacaatgcctttggtgtgaaagaagagcatcatatgttttgggttttcagtgctaaagtcatgtgaattaaaggaccttcattttggctaaaaaaaaaaa

SEQ ID NO: 62513 - DNA, 1355 bp, Homo sapiens
aagtcgtgctcctgagaaatcgtcccaccaacaggcagcccagagactcccacaagggagggttttcaggacactccagaggttgacgggtgcagaaagaaggcgggcgctttcctggaagagaagtgggtcaggcccaactgaaaagcaagcctggcaccagaagggggacattccggaactagatatgaagagacttttctccctgaagttccccggacccaattagatgttgtacccaggctggttaccctggtaacaggcgtcgcggtttgtcaaggaactgagagaagaggcttaagaaaattattcaccactcataagtcatggagacatcctcaaaaggtctgcttacccaagttactcagttttggaacctcctagatgatctagctcagagtgaccctgagggctatgagaagtttattcagcagcagctgaaagaagggaaacagctctgtgctgccccagaaccacagctttgtctacagaccaggattctgaaaccaaaagaaaaaatactttttatcaacctgtgtcagtggacaaggatcccagctccccaatcaaccactcatccagtacctctaactgttggcaaaccagaagatacaactgagatatcagatgcttacacagtcattgatgttgcctacaatcctgatgttcttcatgcagcagaaaaggaccaagtgaaaaaaaatcagttaattcagatggccatgaaatgcattgaggagaaattccagttcaccctctcacactcttaccatattaccaaatttagaataaaaggaagcattcaaagaatgaaacaaaatctgatgggaatccaaactgattccatagatttaagagaaaaaatgagaagggaactaactcttggacagatacgaagcagtactatgagcaatccagatcactttcctcaactgttactgccaaaagaccaagtttcaggcaaagcagtgtgtctgatagaagagatttccagtactgaaatccaggtggagatgaagatgccagcctatgaactaaaaattgtgcatgatcacagtgagaaacctctgaaaattgagttgaaagttgaattacctggtattaattctgtctctctctgtgaccttagtgtttctgaggatgatttattgattgaagtatctgagaagtacagattacatctgaatcttccaaaacttattgatactgaaatgaccacagcaaaatttatcaaagaaaaatccacgctaatcatcacaatgcctttggtgtgaaagaagagcatcatatgttttgggttttcagtgctaaagtcatgtgaattaaaggaccttcattttggctaaaaaaaaaaa

SEQ ID NO: 62514 - DNA, 1041 bp, Homo sapiens
aagtcgtgctcctgagaaatcgtcccaccaacaggcagcccagagactcccacaagggagggttttcaggacactccagaggttgacgggtgcagaaagaaggcgggcgctttcctggaagagaagtgggtcaggcccaactgaaaagcaagcctggcaccagaagggggacattccggaactagatatgaagagacttttctccctgaagttccccggacccaattagatgttgtacccaggctggttaccctggtaacaggcgtcgcggtttgtcaaggaactgagagaagaggcttaagaaaattattcaccactcataagtcatggagacatcctcaaaaggtctgcttacccaagttactcagttttggaacctcctagatgatctagctcagagtgaccctgagggctatgagaagtttattcagcagcagctgaaagaagggaaacagctctgtgctgccccagaaccacagctttgtctacagaccaggattctgacagagtcttactttgtcaccaggctggagtgcaatggtgtggtcttggctcgctgcaacctctgcctcccgggtttaagcgattctcctgcctcagcctcccaagtagctgggattacagaaaccaaaagaaaaaatactttttatcaacctgtgtcagtggacaaggatcccagctccccaatcaaccactcatccagtacctctaactgttggcaaaccagaagatacaactgagatatcagatgcttacacagtcattgatgttgcctacaatcctgatgttcttcatgcagcagaaaaggaccaagtgaaaaaaaatcagttaattcagatggccatgaaatgcattgaggagaaattccagttcaccctctcacactcttaccatattaccaaatttagaataaaaggaagcattcaaagaatgaaacaaaatctgatgggaatccaaactgattccatagatttaagagaaaaaatgagaaggggtaagttgatgattgtaaatggaaaattaaactgctttaagatgttt

SEQ ID NO: 62515 - DNA, 1014 bp, Homo sapiens
  misc_feature (933)..(933): n is a, c, g, or t
  misc_feature (1011)..(1011): n is a, c, g, or t
ccgagaagctcttgcacaggacagcctctggaaccccgcgccattagcgcctgcgccgtctctaggccccgccccctcacccctccggtcctggagctcccacagctaacatggcggcgccctgtgtgtcctacggcggagcagtttcgtaccggcttcttctctggggtaggggtagcctcgcccggaagcaaggcctctggaaaaccgcggcccctgagttgcaaacaaatgtcagatcccagatattaaggctaagacatactgcatttgtaataccaaagaaaaacgttcctacctcaaaacgtgaaacttacacagaggattttattaaaaagcagattgaagagttcaacataggaaagagacatttagccaacatgatgggagaagatccagaaactttcactcaagaagatattgacagagctattgcttaccttttcccaagtggtttgtttgagaaacgagccaggccagtaatgaagcatcctgaacagatttttccaagacaaagagcaatccagtggggagaagatggccgtccatttcactatctcttctatactggcaaacagtcatactattcattaatgcatgatgtatatggaatgttactcaatttagaaaaacatcaaagtcacttgcaagccaaaagtctgctcccagaaaaaactgtaaccagagacgtgattggcagcagatggctgattaaggaggaactagaagaaatgttagtggaaaaactgtcagatctagattatatgcagttcattcggctgctagaaaagttattgacatcgcagtgtggtgctgctgaggaagaatttgtgcagaggtttcgaagaagtgtaactcttgaatcaaaaaacaggtgattgaacctgtacagtatgatgaggcaaggaatggcctttagcaaaagcgaaggtnaaagaaagactgcaaaagcagaagcaattgtttataaacatggaagtggaagattaaaagtaaatggaattgattacnagc

SEQ ID NO: 62516 - DNA, 659 bp, Homo sapiens
ccgagaagctcttgcacaggacagcctctggaaccccgcgccattagcgcctgcgccgtctctaggccccgccccctcacccctccggtcctggagctcccacagctaacatggcggcgccctgtgtgtcctacggcggagcagtttcgtaccggcttcttctctggggtaggggtagcctcgcccggaagcaaggcctctggaaaaccgcggcccctgagttgcaaacaaatgtcagatcccagatattaaggctaagacatactgcatttgtaataccaaagaaaaacgttcctacctcaaaacgtgaaacttacacagaggattttattaaaaagcagattgaagagttcaacataggaaagagacatttagccaacatgatgggagaagatccagaaactttcactcaagaagatattgacagagctattgcttaccttttcccaagtggtttgtttgagaaacgagccaggccagtaatgaagcatcctgaacagatttttccaagacaaagagcaatccagtggggagaagatggccgtccatttcactatctcttctatactggcaaacagtcatactattcattaatgcatgatgtatatggaatggtactcaattagaaaaacaatggcttgcaggccgtctgcttcagg

SEQ ID NO: 62517 - DNA, 937 bp, Homo sapiens
  misc_feature (856)..(856): n is a, c, g, or t
  misc_feature (934)..(934): n is a, c, g, or t
ccgagaagctcttgcacaggacagcctctggaaccccgcgccattagcgcctgcgccgtctctaggccccgccccctcacccctccggtcctggagctcccacagctaacatggcggcgccctgtgtgtcctacggcggagcagtttcgtaccggcttcttctctggggtaggggtagcctcgcccggaagcaaggcctctggaaaaccgcggcccctgagttgcaaacaaatgtcagatcccagatattaaggctaagacatactgcatttgtaataccaaagaaaaacgttcctacctcaaaacgtgaaacttacacagaggattttattaaaaagcagattgaagagttcaacataggaaagagacatttagccaacatgatgggagaagatccagaaactttcactcaagaagatattgacagagctattgcttaccttttcccaagtggtttgtttgagaaacgagccaggccagtaatgaagcatcctgaacagatttttccaagacaaagagcatgatgtatatggaatgttactcaatttagaaaaacatcaaagtcacttgcaagccaaaagtctgctcccagaaaaaactgtaaccagagacgtgattggcagcagatggctgattaaggaggaactagaagaaatgttagtggaaaaactgtcagatctagattatatgcagttcattcggctgctagaaaagttattgacatcgcagtgtggtgctgctgaggaagaatttgtgcagaggtttcgaagaagtgtaactcttgaatcaaaaaacaggtgattgaacctgtacagtatgatgaggcaaggaatggcctttagcaaaagcgaaggtnaaagaaagactgcaaaagcagaagcaattgtttataaacatggaagtggaagattaaaagtaaatggaattgattacnagc

SEQ ID NO: 62518 - DNA, 1063 bp, Homo sapiens
ccgagaagctcttgcacaggacagcctctggaaccccgcgccattagcgcctgcgccgtctctaggccccgccccctcacccctccggtcctggagctcccacagctaacatggcggcgccctgtgtgtcctacggcggagcagtttcgtaccggcttcttctctggggtaggggtagcctcgcccggaagcaaggcctctggaaaaccgcggcccctgagttgcaaacaaatgtcagatcccagatattaaggctaagacatactgcatttgtaataccaaagaaaaacgttcctacctcaaaacgtgaaacttacacagaggattttattaaaaagcagattgaagagttcaacataggaaagagacatttagccaacatgatgggagaagatccagaaactttcactcaagaagatattgacagagctattgcttaccttttcccaagtggtttgtttgagaaacgagccaggccagtaatgaagcatcctgaacagatttttccaagacaaagagcaatccagtggggagaagatggccgtccatttcactatctcttctatactggcaaacagtcatactattcattaatgattaccagctttacttcccgatcacacaggacagagaacagctgatgttccctttccactttgttgaccggctgggaaagcacgacgtgacctgcacagtctcagggggcgggaggtcagcgcaggctggagcaatacgactggcaatggcaaaagccttgtgcagctttgtcaccgaggacgaggtcgagtggatgagacaagctggactacttactactgatccacgtgtgagggaacggaagaagccaggccaagagggagcccgcagaaagtttacgtggaagaaacgctaagggtttgctcccaggaaaggagaggaagagctatatatatgtgccgacatgtggcagacacacagtaaataatggctgaccagcatgagggcagtactgtcagaaatttctttgagctgtgagatggatttatttttaaatgctactttgtaaaggtgacctttaaaaaat

SEQ ID NO: 62519 - DNA, 2957 bp, Homo sapiens
tcctccccgccctctgagaacccttgactcgacataggggcgctaagatgtcagggagttggctccccaggctcagcccgcgtttccctgggcagcggtctcgcaggagcccttctgggcggacctgcagcctcgcgtggcgttcgtggagcgcgggggctcgctgtggctgaattgcagcaccaactgccctcggccggagcgcggtggcctggagacctcgctgcgccgaaacgggacccagaggggtttgcgttggttggcgcggcagctggtggacattcgcgagccggagactcagcccgtctgcttcttccgctgcgcgcggcgcacactacaggcgcgtgggctcattcgcactttccagcgaccagatcgcgtagagctgatgccgctgcctccctggcagccggtgggcgagaacttcaccctgagctgtagggtccccggcgccgggccccgtgcgagcctcacgctgaccctgctgcggggcgcccaggagctgatccgccgcagcttcgccggtgaaccaccccgagcgcggggcgcggtgctcacagccacggtactggctcggagggaggaccatggagccaatttctcgtgtcgcgccgagctggacctgcggccgcacggactgggactgtttgaaaacagctcggcccccagagagctccgaaccttctccctgtctccggatgccccgcgcctcgctgctccccggctcttggaagttggctcggaaaggcccgtgagctgcactctggacggactgtttccagcctcagaggccagggtctacctcgcactgggggaccagaatctgagtcctgatgtcaccctcgaaggggacgcattcgtggccactgccacagccacagctagcgcagagcaggagggtgccaggcagctgatctgcaacgtcaccctggggggcgaaaaccgggagacccgggagaacgtgaccatctacagcttcccggcaccactcctgaccctgagcgaacccagcgtctccgaggggcagatggtgacagtaacctgcgcagctgggacccaagctctggtcacactggagggagttccagccgcggtcccggggcagcccgcccagcttcagctaaatgccaccgagaacgacgacagacgcagcttcttctgcgacgccaccctcgatgtggacggggagaccctgatcaagaacaggagcgcagagcttcgtgtcctatacgctccccggctagacgattcggactgccccaggagttggacgtggcccgagggcccagagcagacgctgcgctgcgaggcccgcgggaacccagaaccctcagtgcactgtgcgcgctccgacggcggggccgtgctggctctgggcctgctgggtccagtcactcgggcgctctcaggcacttaccgctgcaaggcggccaatgatcaaggcgaggcggtcaaggacgtaacgctaacggtggagtacgcaccagcgctggacagcgtgggctgcccagaacgcattacttggctggagggaacagaagcctcgctgagctgtgtggcgcacggggtaccgccgcctgatgtgatctgcgtgcgctctggagaactcggggccgtcatcgaggggctgttgcgtgtggcccgggagcatgcgggcacttaccgctgcgaagccaccaaccctcggggctctgcggccaaaaatgtggccgtcacggtggaatatggccccaggtttgaggagccgagctgccccagcaattggacatgggtggaaggatctgggcgcctgttttcctgtgaggtcgatgggaagccacagccaagcgtgaagtgcgtgggctccgggggcgccactgagggggtgctgctgccgctggcacccccagaccctagtcccagagctcccagaatccctagagtcctggcacccggtatctacgtctgcaacgccaccaaccgccacggctccgtggccaaaacagtcgtcgtgagcgcggagtcgccaccggagatggatgaatctacctgcccaagtcaccagacgtggctggaaggggctgaggcttccgcgctggcctgcgccgcccggggtcgcccttccccaggagtgcgctgctctcgggaaggcatcccatggcctgagcagcagcgcgtgtcccgagaggacgcgggcacttaccactgtgtggccaccaatgcgcatggcacggactcccggaccgtcactgtgggcgtggaataccggccagtggtggccgaacttgctgcctcgccccctggaggcgtgcgcccaggaggaaacttcacgttgacctgccgcgcggaggcctggcctccagcccagatcagctggcgcgcgcccccgggggccctcaacatcggcctgtcgagcaacaacagcacactgagcgtggcaggcgccatgggaagccacggcggcgagtacgagtgcgcacgcaccaacgcgcacgggcgccacgcgcggcgcatcacggtgcgcgtggccggtccgtggctatgggtcgccgtgggcggcgcggcggggggcgcggcgctgctggccgcgggggccggcctggccttctacgtgcagtccaccgcctgcaagaagggcgagtacaacgtgcaggaggccgagagctcaggcgaggccgtgtgtctcaacggagcgggcggcggcgctggcggggcggcaggcgcggagggcggacccgaggcggcggggggcgcggccgagtcgccggcggagggcgaggtcttcgccatacagctgacatcggcgtgagcccgctcccctctccccgcgggccgggggacgccccccagactcacacgggggcttatttattgctttatttatttacttattcatttatttatgtattcaactccaagggcgtcacccccattttctacccatcccctcaataaagtttttataaaggaaaaacctg

SEQ ID NO: 62520 - DNA, 3011 bp, Homo sapiens
agccgtcctctagcccagctcctcggctcgcgctctcctcgcctcctgtgctttccccgccgcggcgatgccagggccttcgccagggctgcgccgggcgctactcggcctctgggctgctctgggcctggggctcttcggcctctcagcggtctcgcaggagcccttctgggcggacctgcagcctcgcgtggcgttcgtggagcgcgggggctcgctgtggctgaattgcagcaccaactgccctcggccggagcgcggtggcctggagacctcgctgcgccgaaacgggacccagaggggtttgcgttggttggcgcggcagctggtggacattcgcgagccggagactcagcccgtctgcttcttccgctgcgcgcggcgcacactacaggcgcgtgggctcattcgcactttccagcgaccagatcgcgtagagctgatgccgctgcctccctggcagccggtgggcgagaacttcaccctgagctgtagggtccccggcgccgggccccgtgcgagcctcacgctgaccctgctgcggggcgcccaggagctgatccgccgcagcttcgccggtgaaccaccccgagcgcggggcgcggtgctcacagccacggtactggctcggagggaggaccatggagccaatttctcgtgtcgcgccgagctggacctgcggccgcacggactgggactgtttgaaaacagctcggcccccagagagctccgaaccttctccctgtctccggatgccccgcgcctcgctgctccccggctcttggaagttggctcggaaaggcccgtgagctgcactctggacggactgtttccagcctcagaggccagggtctacctcgcactgggggaccagaatctgagtcctgatgtcaccctcgaaggggacgcattcgtggccactgccacagccacagctagcgcagagcaggagggtgccaggcagctgatctgcaacgtcaccctggggggcgaaaaccgggagacccgggagaacgtgaccatctacagcttcccggcaccactcctgaccctgagcgaacccagcgtctccgaggggcagatggtgacagtaacctgcgcagctgggacccaagctctggtcacactggagggagttccagccgcggtcccggggcagcccgcccagcttcagctaaatgccaccgagaacgacgacagacgcagcttcttctgcgacgccaccctcgatgtggacggggagaccctgatcaagaacaggagcgcagagcttcgtgtcctatacgctccccggctagacgattcggactgccccaggagttggacgtggcccgagggcccagagcagacgctgcgctgcgaggcccgcgggaacccagaaccctcagtgcactgtgcgcgctccgacggcggggccgtgctggctctgggcctgctgggtccagtcactcgggcgctctcaggcacttaccgctgcaaggcggccaatgatcaaggcgaggcggtcaaggacgtaacgctaacggtggagtacgcaccagcgctggacagcgtgggctgcccagaacgcattacttggctggagggaacagaagcctcgctgagctgtgtggcgcacggggtaccgccgcctgatgtgatctgcgtgcgctctggagaactcggggccgtcatcgaggggctgttgcgtgtggcccgggagcatgcgggcacttaccgctgcgaagccaccaaccctcggggctctgcggccaaaaatgtggccgtcacggtggaatatggccccaggtttgaggagccgagctgccccagcaattggacatgggtggaaggatctgggcgcctgttttcctgtgaggtcgatgggaagccacagccaagcgtgaagtgcgtgggctccgggggcgccactgagggggtgctgctgccgctggcacccccagaccctagtcccagagctcccagaatccctagagtcctggcacccggtatctacgtctgcaacgccaccaaccgccacggctccgtggccaaaacagtcgtcgtgagcgcggagtcgccaccggagatggatgaatctacctgcccaagtcaccagacgtggctggaaggggctgaggcttccgcgctggcctgcgccgcccggggtcgcccttccccaggagtgcgctgctctcgggaaggcatcccatggcctgagcagcagcgcgtgtcccgagaggacgcgggcacttaccactgtgtggccaccaatgcgcatggcacggactcccggaccgtcactgtgggcgtggaataccggccagtggtggccgaacttgctgcctcgccccctggaggcgtgcgcccaggaggaaacttcacgttgacctgccgcgcggaggcctggcctccagcccagatcagctggcgcgcgcccccgggggccctcaacatcggcctgtcgagcaacaacagcacactgagcgtggcaggcgccatgggaagccacggcggcgagtacgagtgcgcacgcaccaacgcgcacgggcgccacgcgcggcgcatcacggtgcgcgtggccggtccgtggctatgggtcgccgtgggcggcgcggcggggggcgcggcgctgctggccgcgggggccggcctggccttctacgtgcagtccaccgcctgcaagaagggcgagtacaacgtgcaggaggccgagagctcaggcgaggccgtgtgtctcaacggagcgggcggcggcgctggcggggcggcaggcgcggagggcggacccgaggcggcggggggcgcggccgagtcgccggcggagggcgaggtcttcgccatacagctgacatcggcgtgagcccgctcccctctccccgcgggccgggggacgccccccagactcacacgggggcttatttattgctttatttatttacttattcatttatttatgtattcaactccaagggcgtcacccccattttctacccatcccctcaataaagtttttataaaggaaaaacctg

SEQ ID NO: 62521 - DNA, 388 bp, Homo sapiens
actccactactctccctccctcccaggccccgccccctgggtcccagggtcctccccttcaggccccaccttctgttccaagtcccggtgttcaaagagctgcggactcttcccccttgcagagcgaccagatcgcgtagagctgatgccgctgcctccctggcagccggtgggcgagaacttcaccctgagctgtagggtccccggcgccgggccccgtgcgagcctcacgctgaccctgctgcggggcgcccaggagctgatccgccgcagcttcgccggtgaaccaccccgagcgcggggcgcggtgctcacagccacggtactggctcggagggaggaccatggagccaatttctcgtgtcgcgccgagctggacctgcggccg

SEQ ID NO: 62522 - DNA, 704 bp, Homo sapiens
aggtcccttttgtgttgtttttgccaacacagcagcttccctgctatatataccagttgcccctttgtccctatcatactagatgctaatcaccctctgtcaacaaccatggggaagatcaccttctacgaggaccgagactttcagggtcgctgctacaattgcatcagtgactgccccaacctgcgggtctacttcagccgctgcaactccatccgagtagacagcggctgctggatgctctatgagcgtcccaattaccagggccaccagtacttcctgcgccgaggcaagtaccccgactatcagcactggatgggcctcagcgactcggtccaatcctgccgtataattcctcataccagctcgcacaagttaaggctgtacgagagagatgactaccgaggccttatgtctgagctcactgatgactgcgcctgtgttccagaactgttccgtctccctgagatctattccctccacgtactggagggctgctgggtcctctatgaaatgcccaactaccgggggcggcagtatctgctgaggcctggggactacagaaggtaccacgactgggggggtgcagatgccaaagtcggctctttgagacgggtcaccgatttgtactaagctgtgcctgccttgttgtgatccccatagaaacataataaatatacaagttgtgttccctgcaaaaaatg

SEQ ID NO: 62523 - DNA, 195 bp, Homo sapiens
cacagagattattaagtgagaagaccactgggagtcaaatatagttgtggttataatccacaatataattagcaatagtcagtaaaaggaataattgcgtgagtaaagattccttagaagtcaatcattggagcaaagccaaagattatggcccaatatcatagtacctatatctaaaacaacaacaaaaaaacc

SEQ ID NO: 62524 - DNA, 275 bp, Homo sapiens
gaagactcattccaatgagttttggttgagtagtaaaacttactttttaccacggttgtcattatcacagtcagtcctttgaatataccaagacccaaacatttccagaaatttgtctttagagaagagaggctcccattaatataaaaagaacaacaatgaaaaaaatctttatattccttagtaaatgtgactacttagtgaattttgtagtatatctcttagtatattttagatcacagatgtttttgcaaaaacaattttaataggttaca

SEQ ID NO: 62525 - DNA, 339 bp, Homo sapiens
caacaatgaaagaagaaatgatgagaacctaaactaaggcaatactaatagaagcaaagagaagggaagagatttcacaagtttataagaagaaagtggtaggacttgaaagttaattggatgtaaagaccaaagcaaggggcagtcaaggatggctcctggatttctggcttgagagactaggtggatgaaagagcagatgagaacaccaaagacagaatatatggttcttctagaagatccactttcaattttactaaagtgaatgacccactttgatgaaaagaataatgacttctaaggtctcttacaactctaatgttacaattctattgttcc

SEQ ID NO: 62526 - DNA, 123 bp, Homo sapiens
gggagttggagggctgaggtcgggagggtggtgtgtacagagctctaggactcacgcaccaggccagtcgcgggttttgggccgaggcctgggttacaagcagcaagtgcgcggttggggcca

SEQ ID NO: 62527 - DNA, 432 bp, Homo sapiens
tcggcacagggagtgggagggggccttcctccagggaatgtgactctcgcaggctcgccagagctaaagacagcggaaatagagcccaaggcagatggcagctggagggaaggagacgaagtcacactcatctgctctgcccgcggccatccagaccccaaactcagctggagccaattggggggcagccccgcagagccaatccccggacggcagggttgggtgagcagctctctgaccctgaaagtgaccagcgccctgagccgcgatggcatctcctgtgaagcctccaacccccacgggaacaagcgccatgtcttccacttcggcaccgtgagcccccagacctcccaggctggagtggccgtcatgccgtggccgtcagcgtgggcctcctgctcctcgtcgttgctgtcttctactgcgtgagac

SEQ ID NO: 62528 - DNA, 633 bp, Homo sapiens
cttacctctaaacagcagagcagtcgtgaactgctccgtgcacggcctgcccacccctgccctacgctggaccaaggactccactcccctgggcgatggccccatgctgtcgctcagttctatcaccttcgattccaatggcacctacgtatgtgaggcctccctgcccacagtcccggtcctcagccgcacccagaacttcacgctgctggtccaaggttcaggaggcagggagggggtgggcttggatggggacagtgtggggtgtgggacctggacaaacaggacgagttcctgagtccctggctggggactccatcttctgctcgatgcctctcttctctctctctctcctctcccttcactttcttcccatccccaccacccacaggctcgccagagctaaagacagcggaaatagagcccaaggcagatggcagctggagggaaggagacgaagtcacactcatctgctctgcccgcggccatccagaccccaaactcagctggagccaattggggggcagcgtaagggaccttcctctccaccctgagccccctctcactcatccaagtatcacaccccatcatctgtggacactggagtctggaataaatgctgtttgtcacatc

SEQ ID NO: 62529 - DNA, 620 bp, Homo sapiens
ctaggaatctaagccagcagatagaaattcaacctctagaaagggaagtaggtgtctgtcctgccttcatgctcaagcaaagggtcccataaagagaactttgtgaggttattttcctccatcaacctatctttaaggaggaccatcctaaacccttccagcaactgccaactctctcacttacattaaggctctggataagctacataagttctctgaacttcagaaatattgtattaaacttgatatacaaatgtctaccttgtagtttgctgtgaggtatagttatagcacatttgagtagtgctctgttgttttaaaaatgcttttgtttatgtattaattcatctggaaggtcaagattcaagttgccctcagtaattttatcatatcttgaatgaatactgctagtccttttcattttccaaataacatctctttattcctatacttttaaaaaatgcatcatgaattcatactgattttttcaattcaaatgtaagagagttcaataattctaagggattctttataaatttgaggtaaattttacatgcaattaagtgcacaaatatcaagtgctctatctgatgatgagtttgacaaatgcatacacccac

SEQ ID NO: 62530 - DNA, 165 bp, Homo sapiens
agcgtagcaccaaggctaacgtcttggtgttcataacgttcgtgttcatgaaaaatgtaaactgaaggaggaggaagctgcagggggcgtctgtgctgtttctgttgctcctttgtaagtctgaattatctgaacatttaaaaagaatacaaacggtctagccca

SEQ ID NO: 62531 - DNA, 618 bp, Homo sapiens
ttttatctaattttaattgactgtaagtaattaaatgtgttaaaatattgtaagccttccatatcttccctggtttgaagtagaaagatatctaaatgcaaaaaactcaattttggattgctttcactaaaatagttttatggtttaagttgccatgttcttataaaattgggtattgtgcaaattatttcacaatctaatctggatgatggcattttgtgcttctcaaataatccaaaagacaaatggatatattgtactataggtttgaggaaacttgatgtggggctggacgtgggtgggctaatgcctgtcatcccagtactttggggaggtaggagtcgggagggattgcttgagcccaggagtttgagaccagcctgggcccaaataggggagacccccatcacttaaaaaaaaaaaaaaagaaaaaaagaaacttgatgtgatggaaatgttttataagtcctcttctagttatctatttaatgtgcaagaatttccactatgtagatttgtgaataaaagaatagattgagaacccaaatttgatatttctgactattcatctgtttcggggtaagtagacagatcagaagaaactgtttattattgtaa

SEQ ID NO: 62532 - DNA, 209 bp, Homo sapiens
gaagatcccataaagtcaacagtggtagctttttgaaggaaggaaggtgagtaggatgagctacgcctttaaaattaacttcatatttttccattccattagatatcttttgttagcttaatcatgtacttactgaaaactaagtatgtaaaaaatgagacaccatttagctgctgaaagatcagggaccatttggcaggaatactgga

SEQ ID NO: 62533 - DNA, 351 bp, Homo sapiens
ttggacatcagggaagtgggtggacagtgacagagggagtctgacagagggagtcaaaaatggctccaaagtctctgacctgggtgaaatcatggaacttctgcctgtaccattaataactcctttctctgagagctgtctcctcactcacagggaaggtcctctgtcctgttcgtactgggtccccattgtttttgcagcctggccctccctccctttctgggaatggacccttccctcctgggaagcatccattgctccctcatctctccacggctgttgtggaggtcactgtgtaaactgcacagcctttgtctagggacgccggacccaagatgggtcaatcggaac

SEQ ID NO: 62534 - DNA, 333 bp, Homo sapiens
cttaggtcccattctacgtatatttgtgtgttgtgtgaggagtaaatgagatgatcagggccaggcacacatcacagtgcccatgataaagatccaacagccattgtctgctgtgtgcttgtgtgtgtgtgtgttcatctttgtgtctccctgcatctattggtgagggggtctagtgtctctgtgcgtatgtttctgtacatgtcagcggtgtgtgtgacaggcacaagatccacccctgctccctctctctggcctaggggtgagtggatggggctgtcagggaggggtgttggggtgttgctgccctcagttctcaggcttagggatctc

SEQ ID NO: 62535 - DNA, 204 bp, Homo sapiens
aatattcagctttcacaggaattcagtacaatgaatcaaaagccagaaataatgctgagaggctgcaattgctcccaagaaaaaacatcttttatcatttcccagtttctatcaagtcatttttttaaataaaagatttcatttttttaaataaagagtgacagcgaaattagagaacataaaattattgggctataataattt

SEQ ID NO: 62536 - DNA, 756 bp, Homo sapiens
ggagtgcaatggtacaatcacacctcatagcagcctccatctcccgggcttaagtgatcctcccgagcagctgggatcacaggcactcaccaccacagttggctaattttttgtagaagagggggtttcaccatgttgcccaaactggtgtcaaactcctgggctcaagcaatctgcctgcctcagcctcccaaagtgctgggattcaggcatgagccactgctcccagcctacaacccaactttcttttttttgagacagagttcgctctgttgcctaggctggagtggaatggcgtgatttcggctcactgcaacctctgcctcccaggttcaagtgattctcctgcctcagcctcccgagtagctgagattacaggcgcgtgccaccacgccaggttaatttttgtatttttagtagtgatagggtttcgccatgttggccaggttgatctcgaactcctggcctcaggtgatctacctgccttggcctcccaaagtgctgggattacaggcgtgagccactgcgcccggccgacacccaactttcagagcatctttggttcctggggtgagagaagccagaccccagcaccagtcctatcccacagggagctcggtgctgccacctctgcagctgcagaacccggcaggctctggagagctgccccccggtgggaggtagcagaatggagccagcgcacccctttcccgatgtctcgaggcccttctgctcaaaattcttttgtaggcaccg

SEQ ID NO: 62537 - DNA, 311 bp, Homo sapiens
cttcctcccaggctatcagatccactcacttccgtggagacacctttatggattccctcaaggagaattcatcaatgcctcttctgttctccctgaacaatctgttcataatggaagtcacagtttgctttgttcttgacatatctgttttgctccttagagcctgatgttccctaaagctcaggatcagatcttatttcatctatttaccacagtgtcagcacttccacagtgtctggcagattgtaggcacacaataattgttttaggaataaacacgtctggatctctgggaccctaatccatctggg

SEQ ID NO: 62538 - DNA, 203 bp, Homo sapiens
cggtgtgataaccaaataaattgatcttacactaatgatgtaagctaaagtattacatcatgaagaattacccattagaatgccatgtaatggaacagaacttggtgtgtttccaagtgcttaaaaagataagaagcacttttctgaataaatattgatgttagttgcagatactccgttccttctcatccactggcaaaaaa

SEQ ID NO: 62539 - DNA, 798 bp, Homo sapiens
ccaagactgcaagtgatacagcctaggcatgtgtaaaagaaacagctttgacctctacaacatccagaaccaatgattcctcctcatggaaccaagaagatgggacatgaccagaacctgctgcaatatgaccgccggcactctttcaaagcaaggggtctgttggccaggaagatctgggactaaaatctgcgtcaacatgccttactgtaaatggtcaaatttgaagacctccaactggaccttgccaagccaacatttgtgaatcctttctcttgtcatccaaccccttaatacttgccccaggccccaagtgagggagactgatttgagtccttctcctgtctcctcgctggccagccttgtaacaaagcctttcttttctcaaaagctggtgccatagtattagtttctatgtgtgtggggcagggagtccatttgctgtataacagtcgctcaatatccaccaccagcatgaacaaacactaatgttttccatacttgcttctgaatcctttaaatgaaaaaaatagatgatgaaactgagctcccttttaggtctgtctccaattttattcccttttctcccaaagtcatgaatgtgtattttttctcatccatgttgttatgtacatgtgttacctatatttttcaataaatagcatgcagcaatattttgcacttttattccatagatgttatcataatgaacaatcgatctgcaatgtgtttttctagacattagatttttaagatctatgttgatatataaagaccactttattcatttttaactcc

SEQ ID NO: 62540 - DNA, 646 bp, Homo sapiens
  misc_feature (646)..(646): n is a, c, g, or t
ccaagactgcaagtgatacagcctaggcatgtgtaaaagaaacagctttgacctctacaacatccagaaccaatgattcctcctcatggaaccaagaagatgggacatgaccagaacctgctgcaatatgaccgccggcactctttcaaagcaaggggtctgttggccaggaagatctgggactaaaatctgcgtcaacatgccttactgtaaatggtcaaatttgaagacctccaactggaccttgccaagccaacatttgtgaatcctttctcttgtcatccaaccccttaatacttgccccaggccccaagtgagggagactgatttgagtccttctcctgtctcctcgctggccagccttgtaacaaagcctttcttttctcaaaagctggtgccatagtattagtttctatgtgtgtggggcagggagtccatttgctgtataacagtcgctcaatatccaccaccagcatgaacaaacactaatgttttccatacttgcttctgaatcctttaaatgaaaaaaatagatgatgaaactgagctcccttttaggtctgtctccaattttattcccttttctcccaaagtcattagctgtttctgggggaaccgaagccgaattcgtatcatgcattagtan

SEQ ID NO: 62541 - DNA, 2253 bp, Homo sapiens
tgacgtcacggtcactgacagcgtgagcccgcggcggctgctgccatggtggctggcggccgggtaagggtctgagtggatctcctgccaggccagagcgccttcgggggccgcggcggaaggccaggagtttgcagccagggcgccgggtttgtggtctgcagtgtcgtgaggctgaggtgcagcatgtctagactgggagccctgggtggtgcccgtgccgggctgggactgttgctgggtaccgccgccggccttggattcctgtgcctcctttacagccagcgatggaaacggacccagcgtcatggccgcagccagagcctgcccaactccctggactatacgcagacttcagatcccggacgccacgtgatgctcctgcgggctgtcccaggtggggctggagatgcctcagtgctgcccagccttccacgggaaggacaggagaaggtgctggaccgcctggactttgtgctgaccagccttgtggcgctgcggcgggaggtggaggagctgagaagcagcctgcgagggcttgcgggggagattgttggggaggtccgatgccacatggaagagaaccagagagtggctcggcggcgaaggtttccgtttgtccgggagaggagtgactccactggctccagctctgtctacttcacggcctcctcgggagccacgttcacagatgctgagagtgaagggggttacacaacagccaatgcggagtctgacaatgagcgggactctgacaaagaaagtgaggacggggaagatgaagtgagctgtgagactgtgaagatggggagaaaggattctcttgacttggaggaagaggcagcttcaggtgcctccagtgccctggaggctggaggttcctcaggcttggaggatgtgctgcccctcctgcagcaggccgacgagctgcacaggggtgatgagcaaggcaagcgggagggcttccagctgctgctcaacaacaagctggtgtatggaagccggcaggactttctctggcgcctggcccgagcctacagtgacatgtgtgagctcactgaggaggtgagcgagaagaagtcatatgccctagatggaaaagaagaagcagaggctgctctggagaagggggatgagagtgctgactgtcacctgtggtatgcggtgctttgtggtcagctggctgagcatgagagcatccagaggcgcatccagagtggctttagcttcaaggagcatgtggacaaagccattgctctccagccagaaaaccccatggctcactttcttcttggcaggtggtgctatcaggtctctcacctgagctggctagaaaaaaaaactgctacagccttgcttgaaagccctctcagtgccactgtggaagatgccctccagagcttcctaaaggctgaagaactacagccaggattttccaaagcaggaagggtatatatttccaagtgctacagagaactagggaaaaactctgaagctagatggtggatgaagttggccctggagctgccagatgtcacgaaggaggatttggctatccagaaggacctggaagaactggaagtcattttacgagactaaccacgtttcactggccttcatgacttgatgccactatttaaggtgggggggcggggaggcttttttccttagaccttgctgagatcaggaaaccacacaaatctgtctcctgggtctgactgctacccactaccactccccattagttaatttattctaacctctaacctaatctagaattggggcagtactcatggcttccgtttctgttgttctctcccttgagtaatctcttaaaaaaatcaagattcacacctgccccaggattacacatgggtagagcctgcaagacctgagaccttccaattgctggtgaggtggatgaacttcaaagctataggaacaaagcacataacttgtcactttaatctttttcactgactaataggactcagtacatatagtcttaagatcataccttacctaccaaggtaaaaagagggatcagagtggcccacagacattgctttcttatcacctatcatgtgaattctacctgtattcctgggctggaccacttgataacttccagtgtcctggcagcttttggaatgacagcagtggtatggggtttatgatgctataaaacaatgtctgaaaagttgcctagaatatattttgttacaaacttgaaataaaccaaatttgatgtta

SEQ ID NO: 62542 - DNA, 2880 bp, Homo sapiens
tgacgtcacggtcactgacagcgtgagcccgcggcggctgctgccatggtggctggcggccgggtaagggtctgagtggatctcctgccaggccagagcgccttcgggggccgcggcggaaggccaggagtttgcagccagggcgccgggtttgtggtctgcagtgtcgtgaggctgaggtgcagcatgtctagactgggagccctgggtggtgcccgtgccgggctgggactgttgctgggtaccgccgccggccttggattcctgtgcctcctttacagccagcgatggaaacggacccagcgtcatggccgcagccagagcctgcccaactccctggactatacgcagacttcagatcccggacgccacgtgatgctcctgcgggctgtcccaggtggggctggagatgcctcagtgctgcccagccttccacgggaaggacaggagaaggtgctggaccgcctggactttgtgctgaccagccttgtggcgctgcggcgggaggtggaggagctgagaagcagcctgcgagggcttgcgggggagattgttggggaggtccgatgccacatggaagagaaccagagagtggctcggcggcgaaggtttccgtttgtccgggagaggagtgactccactggctccagctctgtctacttcacggcctcctcgggagccacgttcacagatgctgagagtgaagggggttacacaacagccaatgcggagtctgacaatgagcgggactctgacaaagaaagtgaggacggggaagatgaagtgagctgtgagactgtgaagatggggagaaaggattctcttgacttggaggaagaggcagcttcaggtgcctccagtgccctggaggctggaggttcctcaggcttggaggatgtgctgcccctcctgcagcaggccgacgagctgcacaggggtgatgagcaaggcaagcgggagggcttccagctgctgctcaacaacaagctggtgtatggaagccggcaggactttctctggcgcctggcccgagcctacagtgacatgtgtgagctcactgaggaggtgagcgagaagaagtcatatgccctagatggaaaagaagaagcagaggctgctctggagaagggggatgagagtgctgactgtcacctgtggtatgcggtgctttgtggtcagctggctgagcatgagagcatccagaggcgcatccagagtggctttagcttcaaggagcatgtggacaaagccattgctctccagccagaaaaccccatggctcactttcttcttggcaggtggtgctatcaggtctctcacctgagctggctagaaaaaaaaactgctacagccttgcttgaaagccctctcagtgccactgtggaagatgccctccagagcttcctaaaggctgaagaactacagccaggattttccaaagcaggaagggtatatatttccaagtgctacagagaactagggaaaaactctgaagctagatggtggatgaagttggccctggagctgccagatgtcacgaaggaggatttggctatccagaaggacctggaagaactggaagtcattttacgagactaaccacgtttcactggccttcatgacttgatgccactatttaaggtgggggggcggggaggcttttttccttagaccttgctgagatcaggaaaccacacaaatctgtctcctgggtctgactgctacccactaccactccccattagttaatttattctaacctctaacctaatctagaattggggcagtactcatggcttccgtttctgttgttctctcccttgagtaatctcttaaaaaaatcaagattcacacctgccccaggattacacatgggtagagcctgcaagacctgagaccttccaattgctggtgaggtggatgaacttcaaagctataggaacaaagcacataacttgtcactttaatctttttcactgactaataggactcagtacatatagtcttaagatcataccttacctaccaaggtaaaaagagggatcagagtggcccacagacattgctttcttatcacctatcatgtgaattctacctgtattcctgggctggaccacttgataacttccagtgtcctggcagcttttggaatgacagcagtggtatggggtttatgatgctataaaacaatgtctgaaaagttgcctagaatatattttgttacaaacttgaaataaaccaaatttgatgttaaaaaaaaaaaaaaaaaaaaaaaaaaaaaatttggggggggcgggccggaaaaggtttaaaaccttcggtggggggcgcgcggggccccataaggttaggtgggacacggttggccaaaagcgggtaccaagaggagaacgcgggaccaggaacagagggcgctgggcatcctcacacccaattaaaacggcccgggggggacacccgagggtccttgaaacacatcccagaagggggtcggcagcccataccggggctctaacaccgggaggtccagcggagccgaatatcaaatacgcccgcccgtggaaaacaacacaccgcaaggaaaaaagagaaacagcacgagaaaggggacaaaatcgacaagcagagcaaggaggacaccggatcacgccaagcacaaaagagagaagccacacgcgacagcacgacaacagagaagacagaacagatcagaccgcaacccacaacaagaaaaagacaaaaccgaaagacagaaagcaacaaagcgacacaaccaacaacaccacaagaacactcgaaccacaaagcacagagaccgaaacgacagcacactcagcaaacgccaagaagtcacacagaaacaagaaaagacaaacacgc

SEQ ID NO: 62543 - DNA, 2808 bp, Homo sapiens
tgacgtcacggtcactgacagcgtgagcccgcggcggctgctgccatggtggctggcggccgggtaagggtctgagtggatctcctgccaggccagagcgccttcgggggccgcggcggaaggccaggagtttgcagccagggcgccgggtttgtggtctgcagtgtcgtgaggctgaggtgcagcatgtctagactgggagccctgggtggtgcccgtgccgggctgggactgttgctgggtaccgccgccggccttggattcctgtgcctcctttacagccagcgatggaaacggacccagcgtcatggccgcagccagagcctgcccaactccctggactatacgcagacttcagatcccggacgccacgtgatgctcctgcgggctgtcccaggtggggctggagatgcctcagtgctgcccagccttccacgggaaggacaggagaaggtgctggaccgcctggactttgtgctgaccagccttgtggcgctgcggcgggaggtggaggagctgagaagcagcctgcgagggcttgcgggggagattgttggggaggtccgatgccacatggaagagaaccagagagtggctcggcggcgaaggtttccgtttgtccgggagaggagtgactccactggctccagctctgtctacttcacggcctcctcgggagccacgttcacagatgctgagagtgaagggggttacacaacagccaatgcggagtctgacaatgagcgggactctgacaaagaaagtgaggacggggaagatgaagtgagctgtgagactgtgaagatggggagaaaggattctcttgacttggaggaagaggcagcttcaggtgcctccagtgccctggaggctggaggttcctcaggcttggaggatgtgctgcccctcctgcagcaggccgacgagctgcacaggggtgatgagcaaggcaagcgggagggcttccagctgctgctcaacaacaagctggtgtatggaagccggcaggactttctctggcgcctggcccgagcctacagtgacatgtgtgagctcactgaggaggtgagcgagaagaagtcatatgccctagatggaaaagaagaagcagaggctgctctggagaagggggatgagagtgctgactgtcacctgtggtatgcggtgctttgtggtcagctggctgagcatgagagcatccagaggcgcatccagagtggctttagcttcaaggagcatgtggacaaagccattgctctccagccagaaaaccccatggctcactttcttcttggcaggtggtgctatcaggtaagctgcgtttcagtgcttgacataatggtcctaaatgcaacaagatcctcagccttctctggctcaggtgcccttggtggttcgacccagccccgtttgaccctattttcaatatatccccaaagatttaaagaaaaaaaaccttttaaaacctcttatacacaccttgatctttttgtggcagtctctcacctgagctggctagaaaaaaaaactgctacagccttgcttgaaagccctctcagtgccactgtggaagatgccctccagagcttcctaaaggtatgagaggggcaggtggcaggcaaaaacaccagggtaaccttgttttttcctaaggacattattgagacccttaatgggaggggttttcctagtcgggggcaattttgtgtttgcctgttctatgggaaaaccagaatcacttgcacagcttatcaaaaatataggtttcttcagacccactgaatcagccacatggttggggactagaaatctagtttaataaacttcagcctgattagaatataggaacctcttactgaaatatctttgtcccttttcccaggctgaagaactacagccaggattttccaaagcaggaagggtatatatttccaaggtaaactcatttgtctacttcaacatagatctgggaactcctgaaagtacacagtatcaggtttcactgttgtctcttttcagtgctacagagaactagggaaaaactctgaagctagatggtggatgaagttggccctggagctgccagatgtcacgaaggaggatttggctatccagaaggacctggaagaactggaagtcattttacgagactaaccacgtttcactggccttcatgacttgatgccactatttaaggtgggggggcggggaggcttttttccttagaccttgctgagatcaggaaaccacacaaatctgtctcctgggtctgactgctacccactaccactccccattagttaatttattctaacctctaacctaatctagaattggggcagtactcatggcttccgtttctgttgttctctcccttgagtaatctcttaaaaaaatcaagattcacacctgccccaggattacacatgggtagagcctgcaagacctgagaccttccaattgctggtgaggtggatgaacttcaaagctataggaacaaagcacataacttgtcactttaatctttttcactgactaataggactcagtacatatagtcttaagatcataccttacctaccaaggtaaaaagagggatcagagtggcccacagacattgctttcttatcacctatcatgtgaattctacctgtattcctgggctggaccacttgataacttccagtgtcctggcagcttttggaatgacagcagtggtatggggtttatgatgctataaaacaatgtctgaaaagttgcctagaatatattttgttacaaacttgaaataaaccaaatttgatgtta

SEQ ID NO: 62544 - DNA, 1968 bp, Homo sapiens
tgacgtcacggtcactgacagcgtgagcccgcggcggctgctgccatggtggctggcggccgggtaagggtctgagtggatctcctgccaggccagagcgccttcgggggccgcggcggaaggccaggagtttgcagccagggcgccgggtttgtggtctgcagtgtcgtgaggctgaggtgcagcatgtctagactgggagccctgggtggtgcccgtgccgggctgggactgttgctgggtaccgccgccggccttggattcctgtgcctcctttacagccagcgatggaaacggacccagcgtcatggccgcagccagagcctgcccaactccctggactatacgcagacttcagatcccggacgccacgtgatgctcctgcgggctgtcccaggtggggctggagatgcctcagtgctgcccagccttccacgggaaggacaggagaaggtgctggaccgcctggactttgtgctgaccagccttgtggcgctgcggcgggaggtggaggagctgagaagcagcctgcgagggcttgcgggggagattgttggggaggtccgccctttaatgaggagcagtagtaagaggcaccccatggtgagcagaaagacaagctggatgggacctaatggtacccttcgggatggggcctgctttccagatgccacatggaagagaaccagagagtggctcggcggcgaaggtttccgtttgtccgggagaggagtgactccactggctccagctctgtctacttcacggcctcctcgggagccacgttcacagatgctgagagtgaaggggggaaaagaagaagcagaggctgctctggagaagggggatgagagtgctgactgtcacctgtggtatgcggtgctttgtggtcagctggctgagcatgagagcatccagaggcgcatccagagtggctttagcttcaaggagcatgtggacaaagccattgctctccagccagaaaaccccatggctcactttcttcttggcaggtggtgctatcaggtctctcacctgagctggctagaaaaaaaaactgctacagccttgcttgaaagccctctcagtgccactgtggaagatgccctccagagcttcctaaaggctgaagaactacagccaggattttccaaagcaggaagggtatatatttccaagtgctacagagaactagggaaaaactctgaagctagatggtggatgaagttggccctggagctgccagatgtcacgaaggaggatttggctatccagaaggacctggaagaactggaagtcattttacgagactaaccacgtttcactggccttcatgacttgatgccactatttaaggtgggggggcggggaggcttttttccttagaccttgctgagatcaggaaaccacacaaatctgtctcctgggtctgactgctacccactaccactccccattagttaatttattctaacctctaacctaatctagaattggggcagtactcatggcttccgtttctgttgttctctcccttgagtaatctcttaaaaaaatcaagattcacacctgccccaggattacacatgggtagagcctgcaagacctgagaccttccaattgctggtgaggtggatgaacttcaaagctataggaacaaagcacataacttgtcactttaatctttttcactgactaataggactcagtacatatagtcttaagatcataccttacctaccaaggtaaaaagagggatcagagtggcccacagacattgctttcttatcacctatcatgtgaattctacctgtattcctgggctggaccacttgataacttccagtgtcctggcagcttttggaatgacagcagtggtatggggtttatgatgctataaaacaatgtctgaaaagttgcctagaatatattttgttacaaacttgaaataaaccaaatttgatgtta

SEQ ID NO: 62545 - DNA, 1127 bp, Homo sapiens
actttcacatgtatctagtgtggttcatcccacagaacttcattgagggtagtgttttccatatctggtctcccgtctgcttcctaatgctgggagagtatctttttagtctttgttggtctatcaagcctgcaagacctgagaccttccaattgctggtgaggtggatgaacttcaaagctataggaacaaagcacataacttgtcactttaatctttttcactgactaataggactcagtacatatagtcttaagatcataccttacctaccaaggtaaaaagagggatcagagtggcccacagacattgctttcttatcacctatcatgtgaattctacctgtattcctgggctggaccacttgataacttccagtgtcctggcagcttttggaatgacagcagtggtatggggtttatgatgctataaaacaatgtctgaaaagttgcctagaatatattttgttacaaacttgaaataaaccaaatttgatgttaaaaaaaaaaaaaaaaaaaaaaaaaaaaaatttggggggggcgggccggaaaaggtttaaaaccttcggtggggggcgcgcggggccccataaggttaggtgggacacggttggccaaaagcgggtaccaagaggagaacgcgggaccaggaacagagggcgctgggcatcctcacacccaattaaaacggcccgggggggacacccgagggtccttgaaacacatcccagaagggggtcggcagcccataccggggctctaacaccgggaggtccagcggagccgaatatcaaatacgcccgcccgtggaaaacaacacaccgcaaggaaaaaagagaaacagcacgagaaaggggacaaaatcgacaagcagagcaaggaggacaccggatcacgccaagcacaaaagagagaagccacacgcgacagcacgacaacagagaagacagaacagatcagaccgcaacccacaacaagaaaaagacaaaaccgaaagacagaaagcaacaaagcgacacaaccaacaacaccacaagaacactcgaaccacaaagcacagagaccgaaacgacagcacactcagcaaacgccaagaagtcacacagaaacaagaaaagacaaacacgc

SEQ ID NO: 62546 - DNA, 2137 bp, Homo sapiens
tgacgtcacggtcactgacagcgtgagcccgcggcggctgctgccatggtggctggcggccgggtgcagcatgtctagactgggagccctgggtggtgcccgtgccgggctgggactgttgctgggtaccgccgccggccttggattcctgtgcctcctttacagccagcgatggaaacggacccagcgtcatggccgcagccagagcctgcccaactccctggactatacgcagacttcagatcccggacgccacgtgatgctcctgcgggctgtcccaggtggggctggagatgcctcagtgctgcccagccttccacgggaaggacaggagaaggtgctggaccgcctggactttgtgctgaccagccttgtggcgctgcggcgggaggtggaggagctgagaagcagcctgcgagggcttgcgggggagattgttggggaggtccgatgccacatggaagagaaccagagagtggctcggcggcgaaggtttccgtttgtccgggagaggagtgactccactggctccagctctgtctacttcacggcctcctcgggagccacgttcacagatgctgagagtgaagggggttacacaacagccaatgcggagtctgacaatgagcgggactctgacaaagaaagtgaggacggggaagatgaagtgagctgtgagactgtgaagatggggagaaaggattctcttgacttggaggaagaggcagcttcaggtgcctccagtgccctggaggctggaggttcctcaggcttggaggatgtgctgcccctcctgcagcaggccgacgagctgcacaggggtgatgagcaaggcaagcgggagggcttccagctgctgctcaacaacaagctggtgtatggaagccggcaggactttctctggcgcctggcccgagcctacagtgacatgtgtgagctcactgaggaggtgagcgagaagaagtcatatgccctagatggaaaagaagaagcagaggctgctctggagaagggggatgagagtgctgactgtcacctgtggtatgcggtgctttgtggtcagctggctgagcatgagagcatccagaggcgcatccagagtggctttagcttcaaggagcatgtggacaaagccattgctctccagccagaaaaccccatggctcactttcttcttggcaggtggtgctatcaggtctctcacctgagctggctagaaaaaaaaactgctacagccttgcttgaaagccctctcagtgccactgtggaagatgccctccagagcttcctaaaggctgaagaactacagccaggattttccaaagcaggaagggtatatatttccaagtgctacagagaactagggaaaaactctgaagctagatggtggatgaagttggccctggagctgccagatgtcacgaaggaggatttggctatccagaaggacctggaagaactggaagtcattttacgagactaaccacgtttcactggccttcatgacttgatgccactatttaaggtgggggggcggggaggcttttttccttagaccttgctgagatcaggaaaccacacaaatctgtctcctgggtctgactgctacccactaccactccccattagttaatttattctaacctctaacctaatctagaattggggcagtactcatggcttccgtttctgttgttctctcccttgagtaatctcttaaaaaaatcaagattcacacctgccccaggattacacatgggtagagcctgcaagacctgagaccttccaattgctggtgaggtggatgaacttcaaagctataggaacaaagcacataacttgtcactttaatctttttcactgactaataggactcagtacatatagtcttaagatcataccttacctaccaaggtaaaaagagggatcagagtggcccacagacattgctttcttatcacctatcatgtgaattctacctgtattcctgggctggaccacttgataacttccagtgtcctggcagcttttggaatgacagcagtggtatggggtttatgatgctataaaacaatgtctgaaaagttgcctagaatatattttgttacaaacttgaaataaaccaaatttgatgtta

SEQ ID NO: 62547 - DNA, 2354 bp, Homo sapiens
tgacgtcacggtcactgacagcgtgagcccgcggcggctgctgccatggtggctggcggccgggtaagggtctgagtggatctcctgccaggccagagcgccttcgggggccgcggcggaaggccaggagtttgcagccagggcgccgggtttgtggtctgcagtgtcgtgaggctgaggtgcagcatgtctagactgggagccctgggtggtgcccgtgccgggctgggactgttgctgggtaccgccgccggccttggattcctgtgcctcctttacagccagcgatggaaacggacccagcgtcatggccgcagccagagcctgcccaactccctggactatacgcagacttcagatcccggacgccacgtgatgctcctgcgggctgtcccaggtggggctggagatgcctcagtgctgcccagccttccacgggaaggacaggagaaggtgctggaccgcctggactttgtgctgaccagccttgtggcgctgcggcgggaggtggaggagctgagaagcagcctgcgagggcttgcgggggagattgttggggaggtccgccctttaatgaggagcagtagtaagaggcaccccatggtgagcagaaagacaagctggatgggacctaatggtacccttcgggatggggcctgctttccagatgccacatggaagagaaccagagagtggctcggcggcgaaggtttccgtttgtccgggagaggagtgactccactggctccagctctgtctacttcacggcctcctcgggagccacgttcacagatgctgagagtgaagggggttacacaacagccaatgcggagtctgacaatgagcgggactctgacaaagaaagtgaggacggggaagatgaagtgagctgtgagactgtgaagatggggagaaaggattctcttgacttggaggaagaggcagcttcaggtgcctccagtgccctggaggctggaggttcctcaggcttggaggatgtgctgcccctcctgcagcaggccgacgagctgcacaggggtgatgagcaaggcaagcgggagggcttccagctgctgctcaacaacaagctggtgtatggaagccggcaggactttctctggcgcctggcccgagcctacagtgacatgtgtgagctcactgaggaggtgagcgagaagaagtcatatgccctagatggaaaagaagaagcagaggctgctctggagaagggggatgagagtgctgactgtcacctgtggtatgcggtgctttgtggtcagctggctgagcatgagagcatccagaggcgcatccagagtggctttagcttcaaggagcatgtggacaaagccattgctctccagccagaaaaccccatggctcactttcttcttggcaggtggtgctatcaggtctctcacctgagctggctagaaaaaaaaactgctacagccttgcttgaaagccctctcagtgccactgtggaagatgccctccagagcttcctaaaggctgaagaactacagccaggattttccaaagcaggaagggtatatatttccaagtgctacagagaactagggaaaaactctgaagctagatggtggatgaagttggccctggagctgccagatgtcacgaaggaggatttggctatccagaaggacctggaagaactggaagtcattttacgagactaaccacgtttcactggccttcatgacttgatgccactatttaaggtgggggggcggggaggcttttttccttagaccttgctgagatcaggaaaccacacaaatctgtctcctgggtctgactgctacccactaccactccccattagttaatttattctaacctctaacctaatctagaattggggcagtactcatggcttccgtttctgttgttctctcccttgagtaatctcttaaaaaaatcaagattcacacctgccccaggattacacatgggtagagcctgcaagacctgagaccttccaattgctggtgaggtggatgaacttcaaagctataggaacaaagcacataacttgtcactttaatctttttcactgactaataggactcagtacatatagtcttaagatcataccttacctaccaaggtaaaaagagggatcagagtggcccacagacattgctttcttatcacctatcatgtgaattctacctgtattcctgggctggaccacttgataacttccagtgtcctggcagcttttggaatgacagcagtggtatggggtttatgatgctataaaacaatgtctgaaaagttgcctagaatatattttgttacaaacttgaaataaaccaaatttgatgtta

SEQ ID NO: 62548 - DNA, 1729 bp, Homo sapiens
gcgggaccctgtctcaaaaaaaaaaaaaaaaaagaaaaaaagtctgcccttaagaggtatgaatgattgtgatttggtgctttggacaatgccatgtagagtgcttctttgggggtgagggatagacagaccctaggggctctgagctgaataatcctcttgttgtcccttacatttctctgccagttacacaacagccaatgcggagtctgacaatgagcgggactctgacaaagaaagtgaggacggggaagatgaagtgagctgtgagactgtgaagatggggagaaaggattctcttgacttggaggaagaggcagcttcaggtgcctccagtgccctggaggctggaggttcctcaggcttggaggatgtgctgcccctcctgcagcaggccgacgagctgcacaggggtgatgagcaaggcaagcgggagggcttccagctgctgctcaacaacaagctggtgtatggaagccggcaggactttctctggcgcctggcccgagcctacagtgacatgtgtgagctcactgaggaggtgagcgagaagaagtcatatgccctagatggaaaagaagaagcagaggctgctctggagaagggggatgagagtgctgactgtcacctgtggtatgcggtgctttgtggtcagctggctgagcatgagagcatccagaggcgcatccagagtggctttagcttcaaggagcatgtggacaaagccattgctctccagccagaaaaccccatggctcactttcttcttggcaggtggtgctatcaggtctctcacctgagctggctagaaaaaaaaactgctacagccttgcttgaaagccctctcagtgccactgtggaagatgccctccagagcttcctaaaggctgaagaactacagccaggattttccaaagcaggaagggtatatatttccaagtgctacagagaactagggaaaaactctgaagctagatggtggatgaagttggccctggagctgccagatgtcacgaaggaggatttggctatccagaaggacctggaagaactggaagtcattttacgagactaaccacgtttcactggccttcatgacttgatgccactatttaaggtgggggggcggggaggcttttttccttagaccttgctgagatcaggaaaccacacaaatctgtctcctgggtctgactgctacccactaccactccccattagttaatttattctaacctctaacctaatctagaattggggcagtactcatggcttccgtttctgttgttctctcccttgagtaatctcttaaaaaaatcaagattcacacctgccccaggattacacatgggtagagcctgcaagacctgagaccttccaattgctggtgaggtggatgaacttcaaagctataggaacaaagcacataacttgtcactttaatctttttcactgactaataggactcagtacatatagtcttaagatcataccttacctaccaaggtaaaaagagggatcagagtggcccacagacattgctttcttatcacctatcatgtgaattctacctgtattcctgggctggaccacttgataacttccagtgtcctggcagcttttggaatgacagcagtggtatggggtttatgatgctataaaacaatgtctgaaaagttgcctagaatatattttgttacaaacttgaaataaaccaaatttgatgtta

SEQ ID NO: 62549 - DNA, 2099 bp, Homo sapiens
tgacgtcacggtcactgacagcgtgagcccgcggcggctgctgccatggtggctggcggccgggtaagggtctgagtggatctcctgccaggccagagcgccttcgggggccgcggcggaaggccaggagtttgcagccagggcgccgggtttgtggtctgcagtgtcgtgaggctgaggtgcagcatgtctagactgggagccctgggtggtgcccgtgccgggctgggactgttgctgggtaccgccgccggccttggattcctgtgcctcctttacagccagcgatggaaacggacccagcgtcatggccgcagccagagcctgcccaactccctggactatacgcagacttcagatcccggacgccacgtgatgctcctgcgggctgtcccaggtggggctggagatgcctcagtgctgcccagccttccacgggaaggacaggagaaggtgctggaccgcctggactttgtgctgaccagccttgtggcgctgcggcgggaggtggaggagctgagaagcagcctgcgagggcttgcgggggagattgttggggaggtccgatgccacatggaagagaaccagagagtggctcggcggcgaaggtttccgtttgtccgggagaggagtgactccactggctccagctctgtctacttcacggcctcctcgggagccacgttcacagatgctgagagtgaagggggttacacaacagccaatgcggagtctgacaatgagcgggactctgacaaagaaagtgaggacggggaagatgaagtgagctgtgagactgtgaagatggggagaaaggattctcttgacttggaggaagaggcagcttcaggtgcctccagtgccctggaggctggaggttcctcaggcttggaggatgtgctgcccctcctgcagcaggccgacgagctgcacaggggtgatgagcaaggcaagcgggagggcttccagctgctgctcaacaacaagctggtgtatggaagccggcaggactttctctggcgcctggcccgagcctacagtgacatgtgtgagctcactgaggaggtgagcgagaagaagtcatatgccctagatggaaaagaagaagcagaggctgctctggagaagggggatgagagtgctgactgtcacctgtggtctctcacctgagctggctagaaaaaaaaactgctacagccttgcttgaaagccctctcagtgccactgtggaagatgccctccagagcttcctaaaggctgaagaactacagccaggattttccaaagcaggaagggtatatatttccaagtgctacagagaactagggaaaaactctgaagctagatggtggatgaagttggccctggagctgccagatgtcacgaaggaggatttggctatccagaaggacctggaagaactggaagtcattttacgagactaaccacgtttcactggccttcatgacttgatgccactatttaaggtgggggggcggggaggcttttttccttagaccttgctgagatcaggaaaccacacaaatctgtctcctgggtctgactgctacccactaccactccccattagttaatttattctaacctctaacctaatctagaattggggcagtactcatggcttccgtttctgttgttctctcccttgagtaatctcttaaaaaaatcaagattcacacctgccccaggattacacatgggtagagcctgcaagacctgagaccttccaattgctggtgaggtggatgaacttcaaagctataggaacaaagcacataacttgtcactttaatctttttcactgactaataggactcagtacatatagtcttaagatcataccttacctaccaaggtaaaaagagggatcagagtggcccacagacattgctttcttatcacctatcatgtgaattctacctgtattcctgggctggaccacttgataacttccagtgtcctggcagcttttggaatgacagcagtggtatggggtttatgatgctataaaacaatgtctgaaaagttgcctagaatatattttgttacaaacttgaaataaaccaaatttgatgtta

SEQ ID NO: 62550 - DNA, 1240 bp, Homo sapiens
ctgatgttagtttatatttacattttccccttaggagcatgtggacaaagccattgctctccagccagaaaaccccatggctcactttcttcttggcaggtggtgctatcaggtaagctgcgtttcagtgcttgacataatggtcctaaatgcaacaagatcctcagccttctctggctcaggtgcccttggtggttcgacccagccccgtttgaccctattttcaatatatccccaaagatttaaagaaaaaaaaccttttaaaacctcttatacacaccttgatctttttgtggcagtctctcacctgagctggctagaaaaaaaaactgctacagccttgcttgaaagccctctcagtgccactgtggaagatgccctccagagcttcctaaaggctgaagaactacagccaggattttccaaagcaggaagggtatatatttccaagtgctacagagaactagggaaaaactctgaagctagatggtggatgaagttggccctggagctgccagatgtcacgaaggaggatttggctatccagaaggacctggaagaactggaagtcattttacgagactaaccacgtttcactggccttcatgacttgatgccactatttaaggtgggggggcggggaggcttttttccttagaccttgctgagatcaggaaaccacacaaatctgtctcctgggtctgactgctacccactaccactccccattagttaatttattctaacctctaacctaatctagaattggggcagtactcatggcttccgtttctgttgttctctcccttgagtaatctcttaaaaaaatcaagattcacacctgccccaggattacacatgggtagagcctgcaagacctgagaccttccaattgctggtgaggtggatgaacttcaaagctataggaacaaagcacataacttgtcactttaatctttttcactgactaataggactcagtacatatagtcttaagatcataccttacctaccaaggtaaaaagagggatcagagtggcccacagacattgctttcttatcacctatcatgtgaattctacctgtattcctgggctggaccacttgataacttccagtgtcctggcagcttttggaatgacagcagtggtatggggtttatgatgctataaaacaatgtctgaaaagttgcctagaatatattttgttacaaacttgaaataaaccaaatttgatgtta

SEQ ID NO: 62551 - DNA, 1614 bp, Homo sapiens
tgacgtcacggtcactgacagcgtgagcccgcggcggctgctgccatggtggctggcggccgggtaagggtctgagtggatctcctgccaggccagagcgccttcgggggccgcggcggaaggccaggagtttgcagccagggcgccgggtttgtggtctgcagtgtcgtgaggctgaggtgcagcatgtctagactgggagccctgggtggtgcccgtgccgggctgggactgttgctgggtaccgccgccggccttggattcctgtgcctcctttacagccagcgatggaaacggacccagcgtcatggccgcagccagagcctgcccaactccctggactatacgcagacttcagatcccggacgccacgtgatgctcctgcgggctgtcccaggtggggctggagatgcctcagtgctgcccagccttccacgggaaggacaggagaaggtgctggaccgcctggactttgtgctgaccagccttgtggcgctgcggcgggaggtggaggagctgagaagcagcctgcgagggcttgcgggggagattgttggggaggtccgatgccacatggaagagaaccagagagtggctcggcggcgaaggtttccgtttgtccgggagaggagtgactccactggctccagctctgtctacttcacggcctcctcgggagccacgttcacagatgctgagagtgaaggggggtgagttgtctctcttggaggcagttatggctacagccaggttgtgttttgtaaaagtattatcaatggaaaattcaaaccaagctgctgcaaatgatttttggaacaggtaagagtataataaatacagaagagttgaaacaaaaaacccatccaatttatgtcattcagacaaatgtagatgttaatagcagttattgcttgcatctgttatcttagtttattacatagttatgatatattatttgggcatttttctgtgttatcacaaggacttgataagcattgtttgactttgttcctttccttgggtggctgagctggtatacggagatgtctaagcacgaagcatgctcctccctgggagtcaccctcttcccacaggggagccttgcctgtgatcctttgcatttttacaggtgggaggtggatgtcctgagttctcagtggcccaggagggctgacgataggcctttctgtgaggcggggcagctggcaggagtctggtggacagcctcctccaagtctggtcatgctaagggtgttttgagtttaaaccactagcaccactttgaaactctggtcccaaggatagagtgtgatgtcagtagcagcatctgacccatctgaccttatctgctgctagctccagttattcaggtagcctgtgtgaggcctagaggccgatttctccttgtccagcctttattcttcttaagggaaagactggtgtagagaacagccaagttttatgctggatcagaggaattagctataagcaggtacatggaaactagaagttaaaatcagtccaggtgtggtggtggctcatgggtaatcccagcactttgggaggccgagacaggaggattgcttgagttcaggagcttgagaccatcctgga

SEQ ID NO: 62552 - DNA, 456 bp, Homo sapiens
agcggaactgaatttacctccccttgagtatgggctgtacttagtgactcacttctaacaaagtcggacgtgatggcatgtggcttccaaccgtaggtcttaaaagacactgcaagctccgacctgggctccctctttgatcactagctctggggaagccagctgccatgctataaagacactcaagcagccccacggagaggtccacaaggcaaggagctgagtcctcccaccaacagccagtgaggagccaaggcttcccacctacaaccagtgaggagctgaggcctcctgccacagtcacgggagtgagccttggaagcggatcctgcagtgtcagtcgagccttcagagactgcagcccctgccgacatcttgactgaaacttcaaaatcatccagctaagctgcttccaaattcccagctgggagacgataaatgtttcaagctgctaag

SEQ ID NO: 62553 - DNA, 306 bp, Homo sapiens
atttacatgacctggtaaaatttaaaatatccattctgactaacaggcagtgatgagaacaataaataaaatatatcttggtttaaattctaagtaaatatatttgacaatataaatataaacatactcatatgagtgaattgcttctaattctggcttttagctaaataagcacttaatgctagtaagaaaaatacattatttcataaagataacaaattctttcagaaatagtaattatatttttaaagagtttggggaaaatagaagtgtatactctaatcttatagcaaagtttctgctaag

SEQ ID NO: 62554 - DNA, 207 bp, Homo sapiens
cactgtttcatatcatatagaaaaattcactgaaaatagatcaacaacctaaatataagggctaaatcatgaaactcttagaaaaaaataaagggaaatcttcatgaccttggatctggcaatggattcttagatagaaaaccagaagactgagcaacaacataaaaaatagattagttagactttgtcaaattttaaaacatttgt

SEQ ID NO: 62555 - DNA, 2703 bp, Homo sapiens
  misc_feature (2703)..(2703): n is a, c, g, or t
acacaaacagcaaaatcaaaccacaagtgtgttagtgggaatgacccatcttaaatagaatgtaaatgcaaatatgcatgagatgcataatttggtaagatgttttggtaatgcctgcagagttactgatttgttgtttttattttattttaaatatagtatatgcatttaatatatttatttcagtctgtgttcatgtctaactcatacataatagtgcatgaaacagcaacatactgaaatagagtaaatggcctaatgagaacattaatgaaacacttaagattaagtgattatagggatgtgtgttttccttgtctgttttgatggcacagttgcagcatctatagtatcactgattggcaagactattcgtgtgcatcatgtgtgctctgtttgtattgaatggcaaagctttgttgtgagatgtagtctagtggatgagagtacactgaggggatgaattttggagaccaagagatcaaaaatggtacactgcaattctaaacatgtccaaagcctacttggagagtgagaatgtactggaaccttcaccagccaacatattgcaggataacttcctgaaggtttatcttagccatcttagtactttgagggattggaaatgtggtcagtcctccatttatgactctactaagccagtaacatggtcaacatttaaaacttgcttctacaatcacacgtatggtttattttagccctgttcgctgtcagctttaccagattatttataggatgaaggaaactgtcttgtaccttcaatttttcccacggtaatggaatataactatttatcaatttatcactgcaactgacatagccagggaaatgtttaagaaatgaataaatagaagtttattccctgcaggtagtcgattgagtccaccaaaatcttaagctaaattttatgttgtttcatggtagctgttatgaaaatggaccatctaagagaaaatccattgtttctcaaattcaaatgcattctgtgtgactaggttgttcccgtgataatgctatgtgacattgctgttctcttctattcaccagtttgccttcctaataacctcttctcatatacattctttagggaaaagaccagtgccctcagtctgagcaacgttgctggagtattctacatccttgtcgggggccttggtttggcaatgctggtggctttgattgagttctgttacaagtcaagggccgaggcgaaacgaatgaaggtggcaaagaatgcacagaatattaacccatcttcctcgcagaattcacagaattttgcaacttataaggaaggttacaacgtatatggcatcgaaagtgttaaaatttaggggatgaccttgaatgatgccatgaggaacaaggcaaggctgtcaattacaggaagtactggagaaaatggacgtgttatgactccagaatttcccaaagcagtgcatgctgtcccttacgtgagtcctggcatgggaatgaatgtcagtgtgactgatctctcgtgattgataagaaccttttgagtgccttacacaatggttttcttgtgtgtttattgtcaaagtggtgagaggcatccagtatcttgaagacttttctttcagccaagaattcttaaatatgtggagttcatcttgaattgtaaggaatgattaattaaaacacaacatctttttctactcgagttacagacaaagcgtggtggacatgcacagctaacatggaagtactataatttacctgaagtctttgtacagacaacaaacctgtttctgcagccactattgttagtctcttgattcataatgacttaagcacacttgacatcaactgcatcaagatgtgacatgttttataaaaaaaggaaaaaaaacatttaaaactaaaaaatatttttaggtattttcacaaacaaactggcttttaaataaatttgcttccatattggttgaataagacaaaaacaattaaactgagtgggaagtgaataaaaaaaggctttaggtatcgattccatatttttcaaagccaaatatgtaaatgctaaggaaagtaaacaaagaggagattccaatcttgtaatttaatattgttattaaaactttaatgtatcctattctttaacatttggtgttaatataaaattacttggcaatgcttgacatttgaaataaacatttttctattgttttattgcaagtggtccaattaattttgcttagctacagtttggtcataaatcaagtgagtttaaagacactaccaagttgttaggtgcccagagaaaatttctcccttttaacaaaggccaggtgatttcttcaaatgtaatcttgcccccaaagtaactactctgaatatctttttgacatgtctaaatatatactactatactacaagaacactatttgttaacacaaaagcattcgatctatgtacgataaatgctcaatagatttaaaaagctaatattaacaaataccagaatacgtgaagttccatttttaaagtgtttgagcttacagaagagaaacattcattttaaatgacagtaaacaaatgccttgtaaagtaatatctttagatagcttgcccaattgattaacattccaacaaacctaacatatgtctctcagctttaaacattatacaaagcctgtcatcacactttactatattatgaan

SEQ ID NO: 62556 - DNA, 1953 bp, Homo sapiens
  misc_feature (1953)..(1953): n is a, c, g, or t
ctaaaattgcagtgtttgataaaatgtggacctacatgcggagtgcggagccctctgtgtttgtgaggactacggccgaaggggtggctagagtgcggaagtccaaagggaaatatgcctacttgttggagtccacgatgaacgagtacattgagcaaaggaagccttgcgacaccatgaaagttggtggaaacctggattccaaaggctatggcatcgcaacacctaaaggatcctcattaagaaatgcggttaacctcgcagtactaaaactgaatgaacaaggcctgttggacaaattgaaaaacaaatggtggtacgacaaaggagagtgcggcagcgggggaggtgattccaaggaaaagaccagtgccctcagtctgagcaacgttgctggagtattctacatccttgtcgggggccttggtttggcaatgctggtggctttgattgagttctgttacaagtcaagggccgaggcgaaacgaatgaaggtggcaaagaatgcacagaatattaacccatcttcctcgcagaattcacagaattttgcaacttataaggaaggttacaacgtatatggcatcgaaagtgttaaaatttaggggatgaccttgaatgatgccatgaggaacaaggcaaggctgtcaattacaggaagtactggagaaaatggacgtgttatgactccagaatttcccaaagcagtgcatgctgtcccttacgtgagtcctggcatgggaatgaatgtcagtgtgactgatctctcgtgattgataagaaccttttgagtgccttacacaatggttttcttgtgtgtttattgtcaaagtggtgagaggcatccagtatcttgaagacttttctttcagccaagaattcttaaatatgtggagttcatcttgaattgtaaggaatgattaattaaaacacaacatctttttctactcgagttacagacaaagcgtggtggacatgcacagctaacatggaagtactataatttacctgaagtctttgtacagacaacaaacctgtttctgcagccactattgttagtctcttgattcataatgacttaagcacacttgacatcaactgcatcaagatgtgacatgttttataaaaaaaggaaaaaaaacatttaaaactaaaaaatatttttaggtattttcacaaacaaactggcttttaaataaatttgcttccatattggttgaataagacaaaaacaattaaactgagtgggaagtgaataaaaaaaggctttaggtatcgattccatatttttcaaagccaaatatgtaaatgctaaggaaagtaaacaaagaggagattccaatcttgtaatttaatattgttattaaaactttaatgtatcctattctttaacatttggtgttaatataaaattacttggcaatgcttgacatttgaaataaacatttttctattgttttattgcaagtggtccaattaattttgcttagctacagtttggtcataaatcaagtgagtttaaagacactaccaagttgttaggtgcccagagaaaatttctcccttttaacaaaggccaggtgatttcttcaaatgtaatcttgcccccaaagtaactactctgaatatctttttgacatgtctaaatatatactactatactacaagaacactatttgttaacacaaaagcattcgatctatgtacgataaatgctcaatagatttaaaaagctaatattaacaaataccagaatacgtgaagttccatttttaaagtgtttgagcttacagaagagaaacattcattttaaatgacagtaaacaaatgccttgtaaagtaatatctttagatagcttgcccaattgattaacattccaacaaacctaacatatgtctctcagctttaaacattatacaaagcctgtcatcacactttactatattatgaan

SEQ ID NO: 62557 - DNA, 2048 bp, Homo sapiens
  misc_feature (2048)..(2048): n is a, c, g, or t
ctaaaattgcagtgtttgataaaatgtggacctacatgcggagtgcggagccctctgtgtttgtgaggactacggccgaaggggtggctagagtgcggaagtccaaagggaaatatgcctacttgttggagtccacgatgaacgagtacattgagcaaaggaagccttgcgacaccatgaaagttggtggaaacctggattccaaaggctatggcatcgcaacacctaaaggatcctcattaagaaatgcggttaacctcgcagtactaaaactgaatgaacaaggcctgttggacaaattgaaaaacaaatggtggtacgacaaaggagagtgcggcagcgggggaggtgattccaagtattgaaactcagtgagcaaggcgtcttagacaagctgaaaaacaaatggtggtacgataaaggtgaatgtggagccaaggactctggaagtaaggaaaagaccagtgccctcagtctgagcaacgttgctggagtattctacatccttgtcgggggccttggtttggcaatgctggtggctttgattgagttctgttacaagtcaagggccgaggcgaaacgaatgaaggtggcaaagaatgcacagaatattaacccatcttcctcgcagaattcacagaattttgcaacttataaggaaggttacaacgtatatggcatcgaaagtgttaaaatttaggggatgaccttgaatgatgccatgaggaacaaggcaaggctgtcaattacaggaagtactggagaaaatggacgtgttatgactccagaatttcccaaagcagtgcatgctgtcccttacgtgagtcctggcatgggaatgaatgtcagtgtgactgatctctcgtgattgataagaaccttttgagtgccttacacaatggttttcttgtgtgtttattgtcaaagtggtgagaggcatccagtatcttgaagacttttctttcagccaagaattcttaaatatgtggagttcatcttgaattgtaaggaatgattaattaaaacacaacatctttttctactcgagttacagacaaagcgtggtggacatgcacagctaacatggaagtactataatttacctgaagtctttgtacagacaacaaacctgtttctgcagccactattgttagtctcttgattcataatgacttaagcacacttgacatcaactgcatcaagatgtgacatgttttataaaaaaaggaaaaaaaacatttaaaactaaaaaatatttttaggtattttcacaaacaaactggcttttaaataaatttgcttccatattggttgaataagacaaaaacaattaaactgagtgggaagtgaataaaaaaaggctttaggtatcgattccatatttttcaaagccaaatatgtaaatgctaaggaaagtaaacaaagaggagattccaatcttgtaatttaatattgttattaaaactttaatgtatcctattctttaacatttggtgttaatataaaattacttggcaatgcttgacatttgaaataaacatttttctattgttttattgcaagtggtccaattaattttgcttagctacagtttggtcataaatcaagtgagtttaaagacactaccaagttgttaggtgcccagagaaaatttctcccttttaacaaaggccaggtgatttcttcaaatgtaatcttgcccccaaagtaactactctgaatatctttttgacatgtctaaatatatactactatactacaagaacactatttgttaacacaaaagcattcgatctatgtacgataaatgctcaatagatttaaaaagctaatattaacaaataccagaatacgtgaagttccatttttaaagtgtttgagcttacagaagagaaacattcattttaaatgacagtaaacaaatgccttgtaaagtaatatctttagatagcttgcccaattgattaacattccaacaaacctaacatatgtctctcagctttaaacattatacaaagcctgtcatcacactttactatattatgaan

SEQ ID NO: 62558 - DNA, 2388 bp, Homo sapiens
  misc_feature (2388)..(2388): n is a, c, g, or t
acacaaacagcaaaatcaaaccacaagtgtgttagtgggaatgacccatcttaaatagaatgtaaatgcaaatatgcatgagatgcataatttggtaagatgttttggtaatgcctgcagagttactgatttgttgtttttattttattttaaatatagtatatgcatttaatatatttatttcagtctgtgttcatgtctaactcatacataatagtgcatgaaacagcaacatactgaaatagagtaaatggcctaatgagaacattaatgaaacacttaagattaagtgattatagggatgtgtgttttccttgtctgttttgatggcacagttgcagcatctatagtatcactgattggcaagactattcgtgtgcatcatgtgtgctctgtttgtattgaatggcaaagctttgttgtgagatgtagtctagtggatgagagtacactgaggggatgaattttggagaccaagagatcaaaaatggtacactgcaattctaaacatgtccaaagcctacttggagagtgagaatgtactggaaccttcaccagccaacatattgcaggataacttcctgaaggtttatcttagccatcttagtactttgagggattggaaatgtggtcagtcctccatttatgactctactaagccagtaacatggtcaacatttaaaacttgcttctacaatcacacgtatggtttattttagccctgttcgctgtcagctttaccagattatttataggatgaaggaaactgtcttgtaccttcaatttttcccacggaaaagaccagtgccctcagtctgagcaacgttgctggagtattctacatccttgtcgggggccttggtttggcaatgctggtggctttgattgagttctgttacaagtcaagggccgaggcgaaacgaatgaaggtggcaaagaatgcacagaatattaacccatcttcctcgcagaattcacagaattttgcaacttataaggaaggttacaacgtatatggcatcgaaagtgttaaaatttaggggatgaccttgaatgatgccatgaggaacaaggcaaggctgtcaattacaggaagtactggagaaaatggacgtgttatgactccagaatttcccaaagcagtgcatgctgtcccttacgtgagtcctggcatgggaatgaatgtcagtgtgactgatctctcgtgattgataagaaccttttgagtgccttacacaatggttttcttgtgtgtttattgtcaaagtggtgagaggcatccagtatcttgaagacttttctttcagccaagaattcttaaatatgtggagttcatcttgaattgtaaggaatgattaattaaaacacaacatctttttctactcgagttacagacaaagcgtggtggacatgcacagctaacatggaagtactataatttacctgaagtctttgtacagacaacaaacctgtttctgcagccactattgttagtctcttgattcataatgacttaagcacacttgacatcaactgcatcaagatgtgacatgttttataaaaaaaggaaaaaaaacatttaaaactaaaaaatatttttaggtattttcacaaacaaactggcttttaaataaatttgcttccatattggttgaataagacaaaaacaattaaactgagtgggaagtgaataaaaaaaggctttaggtatcgattccatatttttcaaagccaaatatgtaaatgctaaggaaagtaaacaaagaggagattccaatcttgtaatttaatattgttattaaaactttaatgtatcctattctttaacatttggtgttaatataaaattacttggcaatgcttgacatttgaaataaacatttttctattgttttattgcaagtggtccaattaattttgcttagctacagtttggtcataaatcaagtgagtttaaagacactaccaagttgttaggtgcccagagaaaatttctcccttttaacaaaggccaggtgatttcttcaaatgtaatcttgcccccaaagtaactactctgaatatctttttgacatgtctaaatatatactactatactacaagaacactatttgttaacacaaaagcattcgatctatgtacgataaatgctcaatagatttaaaaagctaatattaacaaataccagaatacgtgaagttccatttttaaagtgtttgagcttacagaagagaaacattcattttaaatgacagtaaacaaatgccttgtaaagtaatatctttagatagcttgcccaattgattaacattccaacaaacctaacatatgtctctcagctttaaacattatacaaagcctgtcatcacactttactatattatgaan

SEQ ID NO: 62559 - DNA, 709 bp, Homo sapiens
ctaaaattgcagtgtttgataaaatgtggacctacatgcggagtgcggagccctctgtgtttgtgaggactacggccgaaggggtggctagagtgcggaagtccaaagggaaatatgcctacttgttggagtccacgatgaacgagtacattgagcaaaggaagccttgcgacaccatgaaagttggtggaaacctggattccaaaggctatggcatcgcaacacctaaaggatcctcattaagaaatgcggttaacctcgcagtactaaaactgaatgaacaaggcctgttggacaaattgaaaaacaaatggtggtacgacaaaggagagtgcggcagcgggggaggtgattccaaggtcagccccagtgagaaaagtaatgggtaactcaatgcaaaacaaagtaagcagcagctatgcacagtgtgggcactccgtccagccaagtttccaacgctaagctgaagagtgcaattggatgaccaggacacttgacttcttctttctttcttcctctacttctctttccctctctttctccatatctcaaggaaaaatttgtaactaatggatttgttgcaaactgttgcacctgctggttacttccagcgatacattaatgctcatttggctctgcaaatcttaccgtttgcttaggccaaatggcgcatcaatgactatcgctcttacaaagctcttgaatcagt

SEQ ID NO: 62560 - DNA, 741 bp, Homo sapiens
  misc_feature (631)..(631): n is a, c, g, or t
  misc_feature (720)..(720): n is a, c, g, or t
  misc_feature (731)..(731): n is a, c, g, or t
ctaaaattgcagtgtttgataaaatgtggacctacatgcggagtgcggagccctctgtgtttgtgaggactacggccgaaggggtggctagagtgcggaagtccaaagggaaatatgcctacttgttggagtccacgatgaacgagtacattgagcaaaggaagccttgcgacaccatgaaagttggtggaaacctggattccaaaggctatggcatcgcaacacctaaaggatcctcattaagaaatgcggttaacctcgcagtactaaaactgaatgaacaaggcctgttggacaaattgaaaaacaaatggtggtacgacaaaggagagtgcggcagcgggggaggtgattccaagtattgaaactcagtgagcaaggcgtcttagacaagctgaaaaacaaatggtggtacgataaaggtgaatgtggagccaaggactctggaagtaaggaaaagaccagtgccctcagtctgagcaacgttgctggagtattctacatccttgtcgggggccttggtttggcaatgctggtggctttgattgagttctgttacaagtcaagggccgaggcgaaacgaatgaaggtggcaaagaatgcacagaatattaacccatcttcctcgcanaatcacagaattttgccacttataaggaagtaccacgtatatgcatcaaagtgtattaagggatacttgaatgatccatagacaagcangctgcaattcngggtctgttg

SEQ ID NO: 62561 - DNA, 257 bp, Homo sapiens
accttacccaaagtttcagatttttagtagctcatagtaacatattattgtggcctttttcccacttcatttttttgtgacaagagttgccacagaagccaaagaaaaacaaattaaaacaaaacaaacaaaaagtctaaaatttgctcaccctgtctgacaagtatgttttatcgtttcaagaaatgcggttaacctcgcagtactaaaactgaatgaacaaggcctgttggacaaattgaaaaacaaatggtggt

SEQ ID NO: 62562 - DNA, 1717 bp, Homo sapiens
  misc_feature (1)..(1): n is a, c, g, or t
  misc_feature (3)..(3): n is a, c, g, or t
  misc_feature (5)..(5): n is a, c, g, or t
  misc_feature (7)..(7): n is a, c, g, or t
  misc_feature (1717)..(1717): n is a, c, g, or t
ncntnangaaccccagtaaatcttgcagtattgaaactcagtgagcaaggcgtcttagacaagctgaaaaacaaatggtggtacgataaaggtgaatgtggagccaaggactctggaagtaaggaaaagaccagtgccctcagtctgagcaacgttgctggagtattctacatccttgtcgggggccttggtttggcaatgctggtggctttgattgagttctgttacaagtcaagggccgaggcgaaacgaatgaaggtggcaaagaatgcacagaatattaacccatcttcctcgcagaattcacagaattttgcaacttataaggaaggttacaacgtatatggcatcgaaagtgttaaaatttaggggatgaccttgaatgatgccatgaggaacaaggcaaggctgtcaattacaggaagtactggagaaaatggacgtgttatgactccagaatttcccaaagcagtgcatgctgtcccttacgtgagtcctggcatgggaatgaatgtcagtgtgactgatctctcgtgattgataagaaccttttgagtgccttacacaatggttttcttgtgtgtttattgtcaaagtggtgagaggcatccagtatcttgaagacttttctttcagccaagaattcttaaatatgtggagttcatcttgaattgtaaggaatgattaattaaaacacaacatctttttctactcgagttacagacaaagcgtggtggacatgcacagctaacatggaagtactataatttacctgaagtctttgtacagacaacaaacctgtttctgcagccactattgttagtctcttgattcataatgacttaagcacacttgacatcaactgcatcaagatgtgacatgttttataaaaaaaggaaaaaaaacatttaaaactaaaaaatatttttaggtattttcacaaacaaactggcttttaaataaatttgcttccatattggttgaataagacaaaaacaattaaactgagtgggaagtgaataaaaaaaggctttaggtatcgattccatatttttcaaagccaaatatgtaaatgctaaggaaagtaaacaaagaggagattccaatcttgtaatttaatattgttattaaaactttaatgtatcctattctttaacatttggtgttaatataaaattacttggcaatgcttgacatttgaaataaacatttttctattgttttattgcaagtggtccaattaattttgcttagctacagtttggtcataaatcaagtgagtttaaagacactaccaagttgttaggtgcccagagaaaatttctcccttttaacaaaggccaggtgatttcttcaaatgtaatcttgcccccaaagtaactactctgaatatctttttgacatgtctaaatatatactactatactacaagaacactatttgttaacacaaaagcattcgatctatgtacgataaatgctcaatagatttaaaaagctaatattaacaaataccagaatacgtgaagttccatttttaaagtgtttgagcttacagaagagaaacattcattttaaatgacagtaaacaaatgccttgtaaagtaatatctttagatagcttgcccaattgattaacattccaacaaacctaacatatgtctctcagctttaaacattatacaaagcctgtcatcacactttactatattatgaan

SEQ ID NO: 62563 - DNA, 201 bp, Homo sapiens
  misc_feature (2)..(2): n is a, c, g, or t
  misc_feature (5)..(7): n is a, c, g, or t
  misc_feature (9)..(9): n is a, c, g, or t
  misc_feature (12)..(12): n is a, c, g, or t
gnagnnngnggnctccctgcccagcaaccggtagtggtacctgagaacaaaggaggagaaggaggctttggacacaggtgtggagaagcccaaggaggaagaagaagacttggactatgggatgctggatggcctcaaggaccccctcccagaaaaggaactttgaggctgagatgaaagtgctccctatttctatcctgg

SEQ ID NO: 62564 - DNA, 467 bp, Homo sapiens
gttttaatttaatgactatagcctgtactacactcattatataatagggtgacaaatactttaataatagattacatattacatccaataacaatacgttattgatttattagaaaataaatgggtatataactccatttgtcaaatcagttcagccggaaccataggttggctatggattgcaaaagttctgcaaaaatcaatgaaagcagtctgtaggaaccaatagtaaaatttacaaatagtaaattgtgtgtaacaatcttttatatcagaaaaatttataataaatatgtatgtatataaatgcatgcgtttttctttaagagtcagttgttgaacatttaccagcacaccactggagctatctaatggataatatatatttaagtttcttttgtgatgagaacctattttatatcttatcacaaagtctttaataaaatatcaatttttctttaaatttg

SEQ ID NO: 62565 - DNA, 403 bp, Homo sapiens
gtttcgccattttagccaggctggtcttgaactcctaaccccaagtgatccacctgcctcggcctcccaaagtgctgggattaaaggtatgagccattgcttccagccagaaaacattttaaaacagctgaagaatattccactaatggatatattatttatagaaccaatttatattgtgttcacacttagagcgtttattaatttctgattattataaaacacaatgaatattgctaaatatgactttcagtatttctgtattctcaaaatagattattgtaagtggaattatcaagtcaaagtgtattaacatttctagagctctcaggagagcaaaacattgcacagttgctttctagaatggctgtacaagtttacatttccattaacagtgtatgag

SEQ ID NO: 62566 - DNA, 860 bp, Homo sapiens
ctaccactgtctgatgacagtacagcctgtgccacttcttcctacaagagctagtaccaagaggggcattctcatgtagtcatgtaatgagggtgatggcaatcttacgaagcagaaaacactgataaaccataggattcatttttgaactttttgtatctatgtgtcacacacccaaattcacttagaaaacaggtataatgcagaagtgttccatagcttagcattaggtgactagaacagactgctcttcttctcacaaaaataatctgaatagaccatcagtttctaattttctgtaaaattcatttttttgtacccagaatcatctcattaaaatagggttttactgagtaacagtgttcctacctaatttgcagaggaatactaaaattctaggtaatagacctaaaagagaaaatccttgtcatctgtatcatttacttgccaacagttaatttttcttaggtattcagtgattatactatattttgcaaaggccatgaaaatattcaacagatttttttaaagaaaggatctaagcagatttttagaagtgtgtttggtttcatcttattatatgcacaaatttctcctttttttctgaaaatgaaaggaaggggaggggagaagagagggaagaaaagagagagacgtttctttgaaaactgttaagatttttttcctcaatgaacttttttttttttttcagacagagtctcactttgtcgcccaggctggagtacagtggcacaatctcagttcactgcaacctctgcctttcagattcaagtgattctcctgcctcaacctcccgatgttgagcatctggtcatggtgttggtcatcagacaaggtat

SEQ ID NO: 62567 - DNA, 360 bp, Homo sapiens
cagacagagtctcactttgtcgcccaggctggagtacagtggcacaatctcagttcactgcaacctctgcctttcagattcaagtgattctcctgcctcaacctcccaagtagctgggatcacaggcatgtgctaccacacccggctaatttttgtatttttagtagagacagggttttgccaagttggccagtctggtcttgaactcgtgacctcaggtgatccacccatctcagcctcccaaagtgctggaattacaggcttgagccacggtgccgggcccctccatgaccttttatgcctccaccaagcctacagataccaccataataaagttaaaactggttctagttgttacat

SEQ ID NO: 62568 - DNA, 163 bp, Homo sapiens
tttttttaagcaaattacttactgtatttttatggcaggagggagaaaaagtgttacaacggtttctaatgaagtccggtatttaaatgataaatgactaatgtgtttagtagagacaaaataaaccaataaatgattgttctttgccatttaaaacaggaaa

SEQ ID NO: 62569 - DNA, 402 bp, Homo sapiens
tgctaaatgatagaagacagattcaaagttgtagttactgcgtaactttatttatgaggcattttagaataggcaaaactgatctgttgtggtagaagtaagaagtggggtaccctctggaggaagagaatttactttgaagtggcatgagaggatttgtttggctaatgaaattatttttatatctgagtagggttgtgggttacacagtttaggcatttgtcaaaactcatggaaccattcatccaagtcctgtgcattttactgtgtgaaaattatatctcgacttttttcaaaaaagaaaaaaatacttaattataatatagcatttatgaattaaaataatccctttatgtaaaaatattttattggattggtcaagattcatgattgcaaacaaca

SEQ ID NO: 62570 - DNA, 785 bp, Homo sapiens
acctggccaacatggtgaaaccctatctctactaaaaaaataaaaataaaaaaaattagccaagcatggtttggaagactgaggcaggagaatcacttgaacctggaaggcagaggttacagtgagccaagatcgtgccacttcactgcagcctgggcgacagagcgagactatctcaaaagaaaaaaaatccaaggagaaaaaaatatcttagggtattctggaagtggttgttgagtatatatatgtgtatgtgtactcaatttaatgtaaaaaattgttttcagtttcttaaatatgtgattgattatattgctcaaccctgtttattatacgcagattcctttggacgaggtgttctaacagtcttagaacatctgatatatgggatcaaaagttaccttgaaaaatgacttctagtgtatacctttaacagcctcctttttgtgaattttcactgttcttaccaagaaacttaagtgtttttgagatgggacctgttggcaatggaactgtgttcaccctctcaaagatcattaaaatcaacgttatctaagacagctgtatcacatttttgggatacatcatggtacagtcagaagcatataaaattatggttctgcttgtcagtcacatacagaatccaatacattttgacaaactgcccattcctgcaagttaatgccctttttgaagcttcatttcctcttgtaaagtacagataggaatcattattttgtggagttgctgtaaagattaaataaaggtgaatgaaaataaaagta

SEQ ID NO: 62571 - DNA, 364 bp, Homo sapiens
acgaaactgtttagtacgggaaacttgaggagtcagctgtactcgttcagaaatccttttatgtttcacatgtttatttggttagaaacgtgttttcagaaaattgctaatttggtatcctacatgtatgtgagggcagtgaggaaaagttgaggtttataaaaaatattgctggtaatagatatttttcttcctataaaaattgttatttttttatttttagaaactcatgcattaaaaagtaaatgtttatccataccttcaaagtgttaattttttctggtctttcagtaattttgaaatatttctgtaattgcttacaaagaatatattacttaaatgtctcaataaaattttctttttg

SEQ ID NO: 62572 - DNA, 347 bp, Homo sapiens
caatgaactccttaagctttgttaatatgagaatgtctttatctcttctttatttccaaaggacagctttgctggttaaaatattcttggttaagttttgtttttagtacttagcatatatcattccactctctcctggcctgtaaagcctctgctgaaagatccacttctagccttattgaaactcccttctatgttattcgtttcttcctcttgctgcttccaacatcctgtctttgtccataatttgtaacagattgaatataatatgaattagtcctctttagactgaatctcattggagacttttcaccttcttgtttttggatatttatttcttttcacag

SEQ ID NO: 62573 - DNA, 418 bp, Homo sapiens
gctacagctagctatggttgcaccactgcacttcagcctggacaagagagagagaccctatctccaaaacaaacaggccgggtgaagtgagtcacgcctgtactcccaaagtgctgggattacaggcgtgagccaccgcgcccgaccggtgggatacttcttattacaaagaaaaacagaggctgggtgcggtgacccctgcctataagcccagcactttgggaagcctacacaggtgaatctcttgagtccaggagttccagaccaggctaagtaacatggcgaaaccctgtctgtacaaaaaatacgaaaataagccaggtgtagtggtacgcgcctgtcatcccagctacccgggaggttgaggtgggaggactgattgaacccaggaggtcgaggctgcagtgagccatgatcg

SEQ ID NO: 62574 - DNA, 295 bp, Homo sapiens
atgaggcgaggcctgcgaagtggctggcatgcagcaggtgctaatgagtgttgcaaaggtgatgtcacgcaggcagcttcccgtggccagagaaacattgcagagaagggataagtagggcttagtgactttgacgggtcaatggaagaatgacccaaagaaggcttcaaggccaggcctgcagttctccaccacaaaggccctcactgatagcacccactcccccacactcagctttggggcctaggtctggtcacccagctagaagccacaggaccctgaggcgtccgagggt

SEQ ID NO: 62575 - DNA, 342 bp, Homo sapiens
tcgagaaattcgagtaagctacaagagaagagacgagatgcaagagaaaaatccactgccttccaaagaaacgattgaacaggagaagcaagcaggcgaatcgtaatgaggcgtgcgccgccaatatgcactgtacattccacaagcattgccttcttattttacttcttttagctgtttaactttgtaagatgcaaagaggttggatcaagtttaaatgactgtgctgcccctttcacatcaaagaactactgacaacgaaggccgcgcctgcctttcccatctcgtctcttctctgtacatctcgtctcttctcttgtgaggggatacctctgagagtcg

SEQ ID NO: 62576 - DNA, 525 bp, Homo sapiens
tcgagaaattcgagtaagctacaagagaagagacgagatgcaagagaaaaatccactgccttccaaagaaacgattgaacaggagaagcaagcaggcgaatcgtaatgaggcgtgcgccgccaatatgcactgtacattccacaagcattgccttcttattttacttcttttagctgtttaactttgtaagatgcaaagaggttggatcaagtttaaatgactgtgctgcccctttcacatcaaagaactactgacaacgaaggccgcgcctgcctttcccatctcgtctatctggctggcagggaaggaaagaacttgcatgttggtgaaggaagaagtggggtggaagaagtggggtgggacgacagtgaaatctagagtaaaaccaagctggcccaaggtgtcctgcaggctgtaatgcagtttaatcagagtgccattttttttttgttcaaatgattttaattattggaatgcacaatttttttaatatgcaaataaaaagtttaaaaacttaaaaaaaa

SEQ ID NO: 62577 - DNA, 1197 bp, Homo sapiens
tcgagaaattcgagtaagctacaagagaagagacgagatgcaagagaaaaatccactgccttccaaagaaacgattgaacaggagaagcaagcaggcgaatcgtaatgaggcgtgcgccgccaatatgcactgtacattccacaagcattgccttcttattttacttcttttagctgtttaactttgtaagatgcaaagaggttggatcaagtttaaatgactgtgctgcccctttcacatcaaagaactactgacaacgaaggccgcgcctgcctttcccatctcgtctatctggctggcagggaaggaaagaacttgcatgttggtgaaggaagaagtggggtggaagaagtggggtgggacgacagtgaaatctagagtaaaaccaagctggcccaaggtgtcctgcaggctgtaatgcagtttaatcagagtgccattttttttttgttcaaatgattttaattattggaatgcacaatttttttaatatgcaaataaaaagtttaaaaacttaaaaaaaaaaaaaaaaaaaaaaaaaaaaaaaaaaaaaaaaaaaaaaaaaaaaaaataaaaaaaaaaaaaaaaaaaaaaaaaaaaaaaaaaaaaaaaaaaaaaaaaaaaaaaagacaaaagaaaaaaaaaaaaaaaaaaaaaatcttttttctcggcgtgggacccatggcattttaaattgaaaaaaattttgttttgggccccaatttggaaataatttagaaattccccttttttgggaggaattataaaaaacacggggcccgtttaaaaaatgcatgaggggaaaaaaaccaagcctcccaaaaaaaaaactgattaaaaaaataccctttttcctttttggggtaaaaaaaaaaaaagccaaacctaaaaccctttcaaaaaagaaaaacctcattaaaggaaaaaaaaataggaaaagggaaaatttttctataaaagcgtggaaaaattgggaaaaaacgaaaatttttaaaaaaaaacaaaaaaggaaaaaaatttataaaaaaaaaaaaaacccgaaccggggtgggttttttccctttgcacaaaaaaccccttttaataaacggggccccgcccaaaaggagaaaacccattattagggatagggccctccgcggaaacagccctaaaaagttttggggcgggggggggaaaagaccttgaggcgcctt

SEQ ID NO: 62578 - DNA, 339 bp, Homo sapiens
tcgagaaattcgagtaagctacaagagaagagacgagatgcaagagaaaaatccactgccttccaaagaaacgattgaacaggagaagcaagcaggcgaatcgtaatgaggcgtgcgccgccaatatgcactgtacattccacaagcattgccttcttattttacttcttttagctgtttaactttgtaagatgcaaagaggttggatcaagtttaaatgactgtgctgcccctttcacatcaaagaactactgacaacgaagacactgacccagtcaagccgaatttcagtacaatggaggcggttactaggggatccgagctcgggaccaagcttgg

SEQ ID NO: 62579 - DNA, 196 bp, Homo sapiens
tcagcacactgctgcagagactcgtgtagaatgtgaatgtgacgacagtgaatctagagtaacagctgtgcagtgtcctgcaggctgtaatgcagtttaatcagagtgccattttttttttgttcaaatgattttaattattggaatgcacaatttttttaatatgcaaataaaaagtttaaaaacttaaaaaaaa

SEQ ID NO: 62580 - DNA, 321 bp, Homo sapiens
  misc_feature (308)..(308): n is a, c, g, or t
aagtgaaagcaagtttattaagaaagtaaaggaataaaagaatggctactccagaggcagagcagcagcatgggttgctcaactctgatatttctttaacaagttaattagtttgtttattcaactaatatttactgagcatcctaatatgtgccaggcactctgtaatactctggagatatcaggagaatcacttgaacctgggaggtggaggttgcagtgagcctaggcagattattttgtacctctttaagactcagtttcctcatctgtaaaatgtgggaaatagtctcctgggaaggttggtntaaggattaaatg

SEQ ID NO: 62581 - DNA, 3081 bp, Homo sapiens
  misc_feature (1)..(4): n is a, c, g, or t
nnnngagatcgggaatcctctcagtccttagttacaaggctccatcctcactttgttcgctcctcagtcgtccaggcggattcctttttcgccaggcaccaaggcacagcttagagtagacccgagtcctgctctgcggagttcgtcttcccagcgaaggtacagaggcggatgaactgctgagacttgattgacgtattttaagatttttttaacttctgaagtctagcaggcctgtaagaacaaaaatcattctgtaggaattaaaaacagaatccagtcttgacaacatatccacaatgtctgatgtatctactagtgtacaatcaaaatttgctagacttgcaaagaaaaaggaaaatatcacctatatgaaaagagagcagttaacagaaactgataaggacatagctccggtattagatttaaaatgcaaggacgtatcagcaattatgaataagtttaaggtcttaatggaaattcaagacctgatgtttgaggagatgagggaaactcttaaaaatgacctaaaagcagttttaggaggaaaagctacaatacctgaggtaaagaattcagagaactccagtagtaggacagagtttcagcaaataatcaatttagcattacaaaaaacagggatggtagggaaaatagaaggagaaaactctaaaataggtgatgataatgaaaatttaacctttaaattagaagtaaatgagctgagtggtaaattagacaacactaacgaatacaatagtaatgatggtaagaaattaccccagggtgaatcacgaagttacgaagtcatgggaagtatggaagaaaccttatgcaatatagatgacagagatggaaatcgcaatgtccatttagaatttacagaaagagagagtaggaaggatggagaggatgaatttgtcaaagaaatgagagaggaaagaaaatttcagaaattgaagaataaagaggaggttttaaaagcctccagagaagaaaaagtgttgatggatgaaggagcagtacttaccctggtagccgacctttcatcagcaacactggatattagtaagcaatggagtaatgtcttcaacattctgagagaaaatgattttgaacctaaatttctgtgtgaagttaaattagcatttaaatgtgatggtgaaataaagacattttcagatctgcaaagccttagaaaatttgccagccaaaaatcttctatgaaagaattactgaaagatgtactcccacaaaaggaagaaataaatcaaggaggaagaaaatatggaattcaagaaaaaagggataaaaccctaatagactcaaagcatagagctggagaaataaccagtgatggcttgagcttcctatttcttaaagaagtaaaagttgctaagccagaggagatgaaaaacttagagactcaagaggaagagttttccgagctagaggagctggatgaagaggcctcagggatggaggatgatgaagatacctcagggctggaggaggaggaggaagagccctcagggctggaggaggaagaagaagaagaggcttcagggttggaggaggatgaggcctcagggctagaggaggaagaggaacagacttcagaacaggactcaacctttcagggtcatactttggtagatgcaaagcatgaagttgagataaccagtgatggcatggaaactactttcattgactctgtagaggattctgaatcagaggaggaagaagaaggaaagagctctgaaacaggaaaggtaaagactacctccctgactgagaaaaaagcctcacgtagacaaaaagaaattccctttagttatttggttggggactctgggaagaaaaagttggtgaaacaccaggtggtgcacaaaacccaggaggaagaggaaacagctgtgcccacaagtcaaggaactggcacaccctgtctgaccttatgtttggcctctccctcaaagtcactagagatgagtcatgatgagcataaaaagcattcacatacaaatttgagtatttcaacaggagtcaccaaacttaagaaaacagaagaaaagaaacacagaactctgcacacagaagaactaacatccaaagaagcagacttaacagaggaaacagaagaaaacttgagaagtagtgtgattaatagcatcagagagataaaagaggagattggaaatttgaaaagttcccattcaggtgtcttggaaattgaaaattcagtagatgatctgagtagcagaatggacatacttgaagaaagaatagacagtctagaagatcaaattgaagaattctctaaggatacaatgcaaatgaccaaacagataattagtaaagaaaggcaaagagatatagaggagagatctagaagttgcaacattcgtttgataggaattccagaaaaggagagttatgagaatagggcagaggacataattaaagaaataattgatgaaaactttgcagaactaaagaaaggttcaagtcttgagattgtcagtgcttgtcgagtacctagtaaaattgatgaaaagagactgactcctagacacatcttggtgaaattttggaattctagtgataaagagaaaataataagggcttctagagagagaagagaaattacctaccaaggaacaagaatcaggttgacagcagacttatcactggacacactggatgctagaagtaaatggagcaatgtcttcaaagttctgctggaaaaaggctttaatcctagaatcctatatccagccaaaatggcatttgattttaggggtaaaacaaaggtatttcttagtattgaagaatttagagattatgttttgcatatgcccaccttgagagaattactggggaataatataccttagcactccagggtgactacaaacaatatgctttcctcccccagcatgcatccaaaaatcaacaagtaaaacgaaaatacacttctacccagaaggatggacagctaatagcgtacttggggatgaggagcaaggaatattacagatattacctagatgttaataaagggtatgtttaaaaaaaata

SEQ ID NO: 62582 - DNA, 1617 bp, Homo sapiens
  misc_feature (1470)..(1470): n is a, c, g, or t
agcagccaaggcttactgaggctggtggagggagccactgctgggctcaccatggaccgccggatgtggggggcccacgtcttctgcgtgttgagcccgttaccgaccgtattgggccacatgcacccagaatgtgacttcatcacccagctgagagaggatgagagtgcctgtctacaagcagcagaggagatgcccaacaccaccctgggctgccctgcgacctgggatgggctgctgtgctggccaacggcaggctctggcgagtgggtcaccctcccctgcccggatttcttctctcacttcagctcagagtcaggggctgtgaaacgggattgtactatcactggctggtctgagccctttccaccttaccctgtggcctgccctgtgcctctggagctgctggctgaggaggaatcttacttctccacagtgaagattatctacaccgtgggccatagcatctctattgtagccctcttcgtggccatcaccatcctggttgctctcaggaggctccactgcccccggaactacgtccacacccagctgttcaccacttttatcctcaaggcgggagctgtgttcctgaaggatgctgcccttttccacagcgacgacactgaccactgcagcttctccactgttctatgcaaggtctctgtggccgcctcccatttcgccaccatgaccaacttcagctggctgttggcagaagccgtctacctgaactgcctcctggcctccacctcccccagctcaaggagagccttctggtggctggttctcgctggctgggggctgcccgtgctcttcactggcacgtgggtgagctgcaaactggccttcgaggacatcgcgtgctgggacctggacgacacctccccctactggtggatcatcaaagggcccattgtcctctcggtcggggtgaactttgggctttttctcaatattatccgcatcctggtgaggaaactggagccagctcagggcagcctccatacccagtctcagtattggcgtctctccaagtcgacacttttcctgatcccactctttggaattcactacatcatcttcaacttcctgccagacaatgctggcctgggcatccgcctccccctggagctgggactgggttccttccagggcttcattgttgccatcctctactgcttcctcaaccaagaggtgaggactgagatctcacggaagtggcatggccatgaccctgagcttctgccagcctggaggacccgtgctaagtggaccacgccttcccgctcggcggcaaaggtgctgacatctatgtgctaggctgcctcatcacgccactggagtccacacttgaatttgggcagctaccacgggtctgccatgctctggaggagcaagggggccacatccccaccccagctgttacccagcccggggcaggtgcagcccttcctccctgtctctgcntctgactctcttttgaggtccctgtatgtctacctctgacttctgtggtccctctgtgtctgctctcatccattcctcttactggggcctggggctctagcccaaggctcagaggagccaataaacctgtaaatgaaaaaaaaaaaa

SEQ ID NO: 62583 - DNA, 1478 bp, Homo sapiens
  misc_feature (1331)..(1331): n is a, c, g, or t
tcacttccctggcctaggtgctgggacagtgagggcctcttttctccctactgcccttaggatgctggcagcccagctcaccactcctcacccctcaggggaataatcctctttgtgaagagatggcacctttgaagccagagaaggaaggccccatagtgtgtccctgggcaggctagacctgggccccaggcctctggagccaccctctctgttgctcagaggagctgtccatgcaaaccctgccagggtcacttgatggtccctggcacccccagccccctcctggggagagggaaggagttgtggctagagagtcttgcttgcctcccaggggctgtgaaacgggattgtactatcactggctggtctgagccctttccaccttaccctgtggcctgccctgtgcctctggagctgctggctgaggaggaatcttacttctccacagtgaagattatctacaccgtgggccatagcatctctattgtagccctcttcgtggccatcaccatcctggttgctctcaggaggctccactgcccccggaactacgtccacacccagctgttcaccacttttatcctcaaggcgggagctgtgttcctgaaggatgctgcccttttccacagcgacgacactgaccactgcagcttctccactggctgcccgtgctcttcactggcacgtgggtgagctgcaaactggccttcgaggacatcgcgtgctgggacctggacgacacctccccctactggtggatcatcaaagggcccattgtcctctcggtcggggtgaactttgggctttttctcaatattatccgcatcctggtgaggaaactggagccagctcagggcagcctccatacccagtctcagtattggcgtctctccaagtcgacacttttcctgatcccactctttggaattcactacatcatcttcaacttcctgccagacaatgctggcctgggcatccgcctccccctggagctgggactgggttccttccagggcttcattgttgccatcctctactgcttcctcaaccaagaggtgaggactgagatctcacggaagtggcatggccatgaccctgagcttctgccagcctggaggacccgtgctaagtggaccacgccttcccgctcggcggcaaaggtgctgacatctatgtgctaggctgcctcatcacgccactggagtccacacttgaatttgggcagctaccacgggtctgccatgctctggaggagcaagggggccacatccccaccccagctgttacccagcccggggcaggtgcagcccttcctccctgtctctgcntctgactctcttttgaggtccctgtatgtctacctctgacttctgtggtccctctgtgtctgctctcatccattcctcttactggggcctggggctctagcccaaggctcagaggagccaataaacctgtaaatgaaaaaaaaaaaa

SEQ ID NO: 62584 - DNA, 1247 bp, Homo sapiens
  misc_feature (1100)..(1100): n is a, c, g, or t
tcacttccctggcctaggtgctgggacagtgagggcctcttttctccctactgcccttaggatgctggcagcccagctcaccactcctcacccctcaggggaataatcctctttgtgaagagatggcacctttgaagccagagaaggaaggccccatagtgtgtccctgggcaggctagacctgggccccaggcctctggagccaccctctctgttgctcagaggagctgtccatgcaaaccctgccagggtcacttgatggtccctggcacccccagccccctcctggggagagggaaggagttgtggctagagagtcttgcttgcctcccaggggctgtgaaacgggattgtactatcactggctggtctgagccctttccaccttaccctgtggcctgccctgtgcctctggagctgctggctgaggagggctgcccgtgctcttcactggcacgtgggtgagctgcaaactggccttcgaggacatcgcgtgctgggacctggacgacacctccccctactggtggatcatcaaagggcccattgtcctctcggtcggggtgaactttgggctttttctcaatattatccgcatcctggtgaggaaactggagccagctcagggcagcctccatacccagtctcagtattggcgtctctccaagtcgacacttttcctgatcccactctttggaattcactacatcatcttcaacttcctgccagacaatgctggcctgggcatccgcctccccctggagctgggactgggttccttccagggcttcattgttgccatcctctactgcttcctcaaccaagaggtgaggactgagatctcacggaagtggcatggccatgaccctgagcttctgccagcctggaggacccgtgctaagtggaccacgccttcccgctcggcggcaaaggtgctgacatctatgtgctaggctgcctcatcacgccactggagtccacacttgaatttgggcagctaccacgggtctgccatgctctggaggagcaagggggccacatccccaccccagctgttacccagcccggggcaggtgcagcccttcctccctgtctctgcntctgactctcttttgaggtccctgtatgtctacctctgacttctgtggtccctctgtgtctgctctcatccattcctcttactggggcctggggctctagcccaaggctcagaggagccaataaacctgtaaatgaaaaaaaaaaaa

SEQ ID NO: 62585 - DNA, 1632 bp, Homo sapiens
  misc_feature (1485)..(1485): n is a, c, g, or t
tcacttccctggcctaggtgctgggacagtgagggcctcttttctccctactgcccttaggatgctggcagcccagctcaccactcctcacccctcaggggaataatcctctttgtgaagagatggcacctttgaagccagagaaggaaggccccatagtgtgtccctgggcaggctagacctgggccccaggcctctggagccaccctctctgttgctcagaggagctgtccatgcaaaccctgccagggtcacttgatggtccctggcacccccagccccctcctggggagagggaaggagttgtggctagagagtcttgcttgcctcccaggggctgtgaaacgggattgtactatcactggctggtctgagccctttccaccttaccctgtggcctgccctgtgcctctggagctgctggctgaggaggaatcttacttctccacagtgaagattatctacaccgtgggccatagcatctctattgtagccctcttcgtggccatcaccatcctggttgctctcaggaggctccactgcccccggaactacgtccacacccagctgttcaccacttttatcctcaaggcgggagctgtgttcctgaaggatgctgcccttttccacagcgacgacactgaccactgcagcttctccactgttctatgcaaggtctctgtggccgcctcccatttcgccaccatgaccaacttcagctggctgttggcagaagccgtctacctgaactgcctcctggcctccacctcccccagctcaaggagagccttctggtggctggttctcgctggctgggggctgcccgtgctcttcactggcacgtgggtgagctgcaaactggccttcgaggacatcgcgtgctgggacctggacgacacctccccctactggtggatcatcaaagggcccattgtcctctcggtcggggtgaactttgggctttttctcaatattatccgcatcctggtgaggaaactggagccagctcagggcagcctccatacccagtctcagtattggcgtctctccaagtcgacacttttcctgatcccactctttggaattcactacatcatcttcaacttcctgccagacaatgctggcctgggcatccgcctccccctggagctgggactgggttccttccagggcttcattgttgccatcctctactgcttcctcaaccaagaggtgaggactgagatctcacggaagtggcatggccatgaccctgagcttctgccagcctggaggacccgtgctaagtggaccacgccttcccgctcggcggcaaaggtgctgacatctatgtgctaggctgcctcatcacgccactggagtccacacttgaatttgggcagctaccacgggtctgccatgctctggaggagcaagggggccacatccccaccccagctgttacccagcccggggcaggtgcagcccttcctccctgtctctgcntctgactctcttttgaggtccctgtatgtctacctctgacttctgtggtccctctgtgtctgctctcatccattcctcttactggggcctggggctctagcccaaggctcagaggagccaataaacctgtaaatgaaaaaaaaaaaa

SEQ ID NO: 62586 - DNA, 1302 bp, Homo sapiens
  misc_feature (1155)..(1155): n is a, c, g, or t
tcacttccctggcctaggtgctgggacagtgagggcctcttttctccctactgcccttaggatgctggcagcccagctcaccactcctcacccctcaggggaataatcctctttgtgaagagatggcacctttgaagccagagaaggaaggccccatagggctgtgaaacgggattgtactatcactggctggtctgagccctttccaccttaccctgtggcctgccctgtgcctctggagctgctggctgaggaggaatcttacttctccacagtgaagattatctacaccgtgggccatagcatctctattgtagccctcttcgtggccatcaccatcctggttgctctcaggaggctccactgcccccggaactacgtccacacccagctgttcaccacttttatcctcaaggcgggagctgtgttcctgaaggatgctgcccttttccacagcgacgacactgaccactgcagcttctccactggctgcccgtgctcttcactggcacgtgggtgagctgcaaactggccttcgaggacatcgcgtgctgggacctggacgacacctccccctactggtggatcatcaaagggcccattgtcctctcggtcggggtgaactttgggctttttctcaatattatccgcatcctggtgaggaaactggagccagctcagggcagcctccatacccagtctcagtattggcgtctctccaagtcgacacttttcctgatcccactctttggaattcactacatcatcttcaacttcctgccagacaatgctggcctgggcatccgcctccccctggagctgggactgggttccttccagggcttcattgttgccatcctctactgcttcctcaaccaagaggtgaggactgagatctcacggaagtggcatggccatgaccctgagcttctgccagcctggaggacccgtgctaagtggaccacgccttcccgctcggcggcaaaggtgctgacatctatgtgctaggctgcctcatcacgccactggagtccacacttgaatttgggcagctaccacgggtctgccatgctctggaggagcaagggggccacatccccaccccagctgttacccagcccggggcaggtgcagcccttcctccctgtctctgcntctgactctcttttgaggtccctgtatgtctacctctgacttctgtggtccctctgtgtctgctctcatccattcctcttactggggcctggggctctagcccaaggctcagaggagccaataaacctgtaaatgaaaaaaaaaaaa

SEQ ID NO: 62587 - DNA, 693 bp, Homo sapiens
ggttgttgtaaaaacaattctttatgtgtccttgaacatgatacttcttcagtttccattgtgattgccaaaggggtatattcatacccttttgaaatgaagaaatggattctctattgggtttggcttttgtgtttcttaaacctgttagcatcatgcatagagcagaaatatattaattgaactctatgaaaatacttcctaactcatagtctaactcaggtttcaaatgactacagtggctagggaagttagaattttttttccctagaagacatgtctcatgatcttttcctctctcctcctaagatggccttttcaatagctcttcacctccccactcccatctcttccatgtgccatagccttgcccctctgcttgagccacaggcactaacgtgtatttaattaggtggaagcaggcccccagccttgcaaggcaaatgtttgtatgtggtagagggtctatattaggtgtagaccctctttctgtatgaacatgtcttagactctcttcctatatgaatgagaacgtaatgatggacctctgatacacggtgtagagtaagggagtgggggctacaattgcacttgttactttttttcggggattagcatcctaggcaacaatgcaagttcttctggagtcagagcagacggaaatatgtcttccattctgattcatgtttcaaa

SEQ ID NO: 62588 - DNA, 430 bp, Homo sapiens
ggttgttgtaaaaacaattctttatgtgtccttgaacatgatacttcttcagtttccattgtgattgccaaaggggtatattcatacccttttgaaatgaagaaatggattctctattgggtttggcttttgtgtttcttaaacctgttagcatcatgcatagagcagaaatatattaattgaactctatgaaaatacttcctaactcatagtctaactcaggtttcaaatgactacagtggctagggaagttagaattttttttccctagaagacatgtctcatgatcttttcctctctctctctcatatatatatatgagggctgtatatgggggtggggggtacaattgcatttgttactttttttcggggattatcagcctaggcaacagtgcaagttcttccggagtcagagcagaaggaaatat

SEQ ID NO: 62589 - DNA, 1247 bp, Homo sapiens
ctcagcttaatagcaggacgctggcaacaggcactccctgctccagtccagcctgcgcgctccaccgccgctatggtctccgtgcctaccacctggtgctccgttgcgctagccctgctcgtggccctgcatgaagggaagggccaggctgctgccaccctggagcagccagcgtcctcatctcatgcccaaggcacccaccttcggcttcgccgttgctcctgcagctcctggctcgacaaggagtgcgtctacttctgccacttggacatcatctgggtgaacactcctgaacagacagctccttacggcctgggaaacccgccaagacgccggcgccgctccctgccaaggcgctgtcagtgctccagtgccagggaccccgcctgtgccaccttctgccttcgaaggccctggactgaagccggggcagtcccaagccggaagtcccctgcagacgtgttccagactggcaagacaggggccactacaggagagcttctccaaaggctgagggacatttccacagtcaagagcctctttgccaagcgacaacaggaggccatgcgggagcctcggtccacacattccaggtggaggaagagatagtgtcgtgagctggaggaacattgggaaggaagcccgcggggagagaggaggagagaagtggccagggcttgtggactctctgcctgcttcctggaccggggccttggtcccagacagctggacccatttgccaggattggcacaagctccctggtgagggagcctcgtccaaggcagttctgtgtcctcgcactgcccagggaagccctcggcctccagactgcggagcagcctccagtgctggctgctggcccacagctctgctggaagaactgcatggggagtacattcatctggaggctgcgtcctgaggagtgtcctgtctgctgggctacaaaccaggagcaaccgtgcagccacgaacacgcatgcctcagccagccctggaggctggatggctcccctgaggctggcatcctggctggctgtgtcctctccagctttccctccccagagttcttgcaccctcattccctcgggaccctcccagtgagaagggcctgctctgcttttcctgtctgtatataacttatttgccctaagaactttgagaatcccaattatttattttaatgtattttttagaccctctatttacctgcgaacttgtgtttataataaatgaggaaacataatct

SEQ ID NO: 62590 - DNA, 1299 bp, Homo sapiens
ctcagcttaatagcaggacgctggcaacaggcactccctgctccagtccagcctgcgcgctccaccgccgctatggtctccgtgcctaccacctggtgctccgttgcgctagccctgctcgtggccctgcatgaagggaagggccaggctgctgccaccctggagcagccagcgtcctcatctcatgcccaaggcacccaccttcggcttcgccgttgctcctgcagctcctggctcgacaaggagtgcgtctacttctgccacttggacatcatctgggtgaacactcctgaattcaggtgctgaggctcagagagcttaagcgcctcccccaagatcacacagacagacagctccttacggcctgggaaacccgccaagacgccggcgccgctccctgccaaggcgctgtcagtgctccagtgccagggaccccgcctgtgccaccttctgccttcgaaggccctggactgaagccggggcagtcccaagccggaagtcccctgcagacgtgttccagactggcaagacaggggccactacaggagagcttctccaaaggctgagggacatttccacagtcaagagcctctttgccaagcgacaacaggaggccatgcgggagcctcggtccacacattccaggtggaggaagagatagtgtcgtgagctggaggaacattgggaaggaagcccgcggggagagaggaggagagaagtggccagggcttgtggactctctgcctgcttcctggaccggggccttggtcccagacagctggacccatttgccaggattggcacaagctccctggtgagggagcctcgtccaaggcagttctgtgtcctcgcactgcccagggaagccctcggcctccagactgcggagcagcctccagtgctggctgctggcccacagctctgctggaagaactgcatggggagtacattcatctggaggctgcgtcctgaggagtgtcctgtctgctgggctacaaaccaggagcaaccgtgcagccacgaacacgcatgcctcagccagccctggaggctggatggctcccctgaggctggcatcctggctggctgtgtcctctccagctttccctccccagagttcttgcaccctcattccctcgggaccctcccagtgagaagggcctgctctgcttttcctgtctgtatataacttatttgccctaagaactttgagaatcccaattatttattttaatgtattttttagaccctctatttacctgcgaacttgtgtttataataaatgaggaaacataatct

SEQ ID NO: 62591 - DNA, 1367 bp, Homo sapiens
ctcagcttaatagcaggacgctggcaacaggcactccctgctccagtccagcctgcgcgctccaccgccgctatggtctccgtgcctaccacctggtgctccgttgcgctagccctgctcgtggccctgcatgaagggaagggccaggctgctgccaccctggagcagccagcgtcctcatctcatgcccaaggcacccaccttcggcttcgccgttgctcctgcagctcctggctcgacaaggagtgcgtctacttctgccacttggacatcatctgggtgaacactcctgaattcaggtgctgaggctcagagagcttaagcgcctcccccaagatcacacaggcaagtggggaccagatgggggcagcttagctatagcctgtgtttacttctgtgagatggagtggccgcccttctccagagctagctgagagccttctttgagaacagggggaccagcctgtctgagaggggagagagactaggaggttcccaattcccaacttcagacagacagctccttacggcctgggaaacccgccaagacgccggcgccgctccctgccaaggcgctgtcagtgctccagtgccagggaccccgcctgtgccaccttctgccttcgaaggccctgggacatttccacagtcaagagcctctttgccaagcgacaacaggaggccatgcgggagcctcggtccacacattccaggtggaggaagagatagtgtcgtgagctggaggaacattgggaaggaagcccgcggggagagaggaggagagaagtggccagggcttgtggactctctgcctgcttcctggaccggggccttggtcccagacagctggacccatttgccaggattggcacaagctccctggtgagggagcctcgtccaaggcagttctgtgtcctcgcactgcccagggaagccctcggcctccagactgcggagcagcctccagtgctggctgctggcccacagctctgctggaagaactgcatggggagtacattcatctggaggctgcgtcctgaggagtgtcctgtctgctgggctacaaaccaggagcaaccgtgcagccacgaacacgcatgcctcagccagccctggaggctggatggctcccctgaggctggcatcctggctggctgtgtcctctccagctttccctccccagagttcttgcaccctcattccctcgggaccctcccagtgagaagggcctgctctgcttttcctgtctgtatataacttatttgccctaagaactttgagaatcccaattatttattttaatgtattttttagaccctctatttacctgcgaacttgtgtttataataaatgaggaaacataatct

SEQ ID NO: 62592 - DNA, 1124 bp, Homo sapiens
ctcagcttaatagcaggacgctggcaacaggcactccctgctccagtccagcctgcgcgctccaccgccgctatggtctccgtgcctaccacctggtgctccgttgcgctagccctgctcgtggccctgcatgaagggaagggccaggctgctgccaccctggagcagccagcgtcctcatctcatgcccaaggcacccaccttcggcttcgccgttgctcctgcagctcctggctcgacaaggagtgcgtctacttctgccacttggacatcatctgggtgaacactcctgagactgaagccggggcagtcccaagccggaagtcccctgcagacgtgttccagactggcaagacaggggccactacaggagagcttctccaaaggctgagggacatttccacagtcaagagcctctttgccaagcgacaacaggaggccatgcgggagcctcggtccacacattccaggtggaggaagagatagtgtcgtgagctggaggaacattgggaaggaagcccgcggggagagaggaggagagaagtggccagggcttgtggactctctgcctgcttcctggaccggggccttggtcccagacagctggacccatttgccaggattggcacaagctccctggtgagggagcctcgtccaaggcagttctgtgtcctcgcactgcccagggaagccctcggcctccagactgcggagcagcctccagtgctggctgctggcccacagctctgctggaagaactgcatggggagtacattcatctggaggctgcgtcctgaggagtgtcctgtctgctgggctacaaaccaggagcaaccgtgcagccacgaacacgcatgcctcagccagccctggaggctggatggctcccctgaggctggcatcctggctggctgtgtcctctccagctttccctccccagagttcttgcaccctcattccctcgggaccctcccagtgagaagggcctgctctgcttttcctgtctgtatataacttatttgccctaagaactttgagaatcccaattatttattttaatgtattttttagaccctctatttacctgcgaacttgtgtttataataaatgaggaaacataatct

SEQ ID NO: 62593 - DNA, 1025 bp, Homo sapiens
ctcagcttaatagcaggacgctggcaacaggcactccctgctccagtccagcctgcgcgctccaccgccgctatggtctccgtgcctaccacctggtgctccgttgcgctagccctgctcgtggccctgcatgaagggaagggccaggctgctgccaccctggagcagccagcgtcctcatctcatgcccaaggcacccaccttcggcttcgccgttgctcctgcagctcctggctcgacaaggagtgcgtctacttctgccacttggacatcatctgggtgaacactcctgaggacatttccacagtcaagagcctctttgccaagcgacaacaggaggccatgcgggagcctcggtccacacattccaggtggaggaagagatagtgtcgtgagctggaggaacattgggaaggaagcccgcggggagagaggaggagagaagtggccagggcttgtggactctctgcctgcttcctggaccggggccttggtcccagacagctggacccatttgccaggattggcacaagctccctggtgagggagcctcgtccaaggcagttctgtgtcctcgcactgcccagggaagccctcggcctccagactgcggagcagcctccagtgctggctgctggcccacagctctgctggaagaactgcatggggagtacattcatctggaggctgcgtcctgaggagtgtcctgtctgctgggctacaaaccaggagcaaccgtgcagccacgaacacgcatgcctcagccagccctggaggctggatggctcccctgaggctggcatcctggctggctgtgtcctctccagctttccctccccagagttcttgcaccctcattccctcgggaccctcccagtgagaagggcctgctctgcttttcctgtctgtatataacttatttgccctaagaactttgagaatcccaattatttattttaatgtattttttagaccctctatttacctgcgaacttgtgtttataataaatgaggaaacataatct

SEQ ID NO: 62594 - DNA, 1156 bp, Homo sapiens
ctcagcttaatagcaggacgctggcaacaggcactccctgctccagtccagcctgcgcgctccaccgccgctatggtctccgtgcctaccacctggtgctccgttgcgctagccctgctcgtggccctgcatgaagctcctggctcgacaaggagtgcgtctacttctgccacttggacatcatctgggtgaacactcctgaacagacagctccttacggcctgggaaacccgccaagacgccggcgccgctccctgccaaggcgctgtcagtgctccagtgccagggaccccgcctgtgccaccttctgccttcgaaggccctggactgaagccggggcagtcccaagccggaagtcccctgcagacgtgttccagactggcaagacaggggccactacaggagagcttctccaaaggctgagggacatttccacagtcaagagcctctttgccaagcgacaacaggaggccatgcgggagcctcggtccacacattccaggtggaggaagagatagtgtcgtgagctggaggaacattgggaaggaagcccgcggggagagaggaggagagaagtggccagggcttgtggactctctgcctgcttcctggaccggggccttggtcccagacagctggacccatttgccaggattggcacaagctccctggtgagggagcctcgtccaaggcagttctgtgtcctcgcactgcccagggaagccctcggcctccagactgcggagcagcctccagtgctggctgctggcccacagctctgctggaagaactgcatggggagtacattcatctggaggctgcgtcctgaggagtgtcctgtctgctgggctacaaaccaggagcaaccgtgcagccacgaacacgcatgcctcagccagccctggaggctggatggctcccctgaggctggcatcctggctggctgtgtcctctccagctttccctccccagagttcttgcaccctcattccctcgggaccctcccagtgagaagggcctgctctgcttttcctgtctgtatataacttatttgccctaagaactttgagaatcccaattatttattttaatgtattttttagaccctctatttacctgcgaacttgtgtttataataaatgaggaaacataatct

SEQ ID NO: 62595 - DNA, 1421 bp, Homo sapiens
  misc_feature (614)..(614): n is a, c, g, or t
ctcagcttaatagcaggacgctggcaacaggcactccctgctccagtccagcctgcgcgctccaccgccgctatggtctccgtgcctaccacctggtgctccgttgcgctagccctgctcgtggccctgcatgaagggaagggccaggctgctgccaccctggagcagccagcgtcctcatctcatgcccaaggcacccaccttcggcttcgccgttgctcctgcagctcctggctcgacaaggagtgcgtctacttctgccacttggacatcatctgggtgaacactcctgaacagacagctccttacggcctgggaaacccgccaagacgccggcgccgctccctgccaaggcgctgtcagtgctccagtgccagggaccccgcctgtgccaccttctgccttcgaaggccctggactgaagccggggcagtcccaagccggaagtcccctgcagacgtgttccagactggcaagacaggggccactacaggagagcttctccaaaggctgaggcctggaagtggactttttagagggtttgaaggctcatgactgggaaggaccacagttgttcgttcaggctgtgctgaatggagcatctcacacatgcnggggtccagaggggccaactgcccagcctgctccctctctgctgcccagttgcatctcctccctggtgcctcagtggacatttccacagtcaagagcctctttgccaagcgacaacaggaggccatgcgggagcctcggtccacacattccaggtggaggaagagatagtgtcgtgagctggaggaacattgggaaggaagcccgcggggagagaggaggagagaagtggccagggcttgtggactctctgcctgcttcctggaccggggccttggtcccagacagctggacccatttgccaggattggcacaagctccctggtgagggagcctcgtccaaggcagttctgtgtcctcgcactgcccagggaagccctcggcctccagactgcggagcagcctccagtgctggctgctggcccacagctctgctggaagaactgcatggggagtacattcatctggaggctgcgtcctgaggagtgtcctgtctgctgggctacaaaccaggagcaaccgtgcagccacgaacacgcatgcctcagccagccctggaggctggatggctcccctgaggctggcatcctggctggctgtgtcctctccagctttccctccccagagttcttgcaccctcattccctcgggaccctcccagtgagaagggcctgctctgcttttcctgtctgtatataacttatttgccctaagaactttgagaatcccaattatttattttaatgtattttttagaccctctatttacctgcgaacttgtgtttataataaatgaggaaacataatct

SEQ ID NO: 62596 - DNA, 1148 bp, Homo sapiens
ctcagcttaatagcaggacgctggcaacaggcactccctgctccagtccagcctgcgcgctccaccgccgctatggtctccgtgcctaccacctggtgctccgttgcgctagccctgctcgtggccctgcatgaagggaagggccaggctgctgccaccctggagcagccagcgtcctcatctcatgcccaaggcacccaccttcggcttcgccgttgctcctgcagctcctggctcgacaaggagtgcgtctacttctgccacttggacatcatctgggtgaacactcctgaacagacagctccttacggcctgggaaacccgccaagacgccggcgccgctccctgccaaggcgctgtcagtgctccagtgccagggaccccgcctgtgccaccttctgccttcgaaggccctgggacatttccacagtcaagagcctctttgccaagcgacaacaggaggccatgcgggagcctcggtccacacattccaggtggaggaagagatagtgtcgtgagctggaggaacattgggaaggaagcccgcggggagagaggaggagagaagtggccagggcttgtggactctctgcctgcttcctggaccggggccttggtcccagacagctggacccatttgccaggattggcacaagctccctggtgagggagcctcgtccaaggcagttctgtgtcctcgcactgcccagggaagccctcggcctccagactgcggagcagcctccagtgctggctgctggcccacagctctgctggaagaactgcatggggagtacattcatctggaggctgcgtcctgaggagtgtcctgtctgctgggctacaaaccaggagcaaccgtgcagccacgaacacgcatgcctcagccagccctggaggctggatggctcccctgaggctggcatcctggctggctgtgtcctctccagctttccctccccagagttcttgcaccctcattccctcgggaccctcccagtgagaagggcctgctctgcttttcctgtctgtatataacttatttgccctaagaactttgagaatcccaattatttattttaatgtattttttagaccctctatttacctgcgaacttgtgtttataataaatgaggaaacataatct

SEQ ID NO: 62597 - DNA, 920 bp, Homo sapiens
ctcagcttaatagcaggacgctggcaacaggcactccctgctccagtccagcctgcgcgctccaccgccgctatggtctccgtgcctaccacctggtgctccgttgcgctagccctgctcgtggccctgcatgaagggaagggccaggctgctgccaccctggagcagccagcgtcctcatctcatgcccaaggcacccaccttcggcttcgccgttgctcctgcagctcctggctcgacaaggagtgcgtctacttctgccacttggacatcatctgggtgaacactcctgaattcaggtgctgaggctcagagagcttaagcgcctcccccaagatcacacaggtaattgtaagggtaggcaccatcctcggttggggaatgccggagctcacagtctctgtcatgctgcctctgcatgctcttccaataataatacgattagtgacagcacccgtgctttgactatgccaggctctttgccaagcactgcacgtgcatgatcatctcaggagcccccccatcctccccataaggcaggatagtccctcaaacgacagatgagaacctgccctgtgctactggctacacccgggtgggagccccgtgctgtctgttccgcctgcacccgcactgcctccaggccactgcataccttcagttgaagtttctgtgtgtgtttgtgattttttcccctccccaaattgcaaaaggcaagagaagccctgcacgtaagcgtgtgtgaagctaatccgcatccaaacacttgcttagggcgggaaccctgccagtccctgcgtgctgagtctacctggagtcactgcgactccaaccacaccatctaaaattagctctgtcactcgaaagtgctggtctagccagccacagggcccctgccattcccctggcccgcttgatca

SEQ ID NO: 62598 - DNA, 970 bp, Homo sapiens
  misc_feature (824)..(824): n is a, c, g, or t
  misc_feature (876)..(876): n is a, c, g, or t
  misc_feature (907)..(907): n is a, c, g, or t
  misc_feature (930)..(930): n is a, c, g, or t
  misc_feature (949)..(949): n is a, c, g, or t
aaatgtcttcctttgagaagtgtctgttcatatccttcacccactccatcaaaaagtgggtgaagtgccaatttactgagcacgagacaaatacatcattgacttcttttgtcttgtggattcaaggatgtgtccacgcccgccctccttcccctccagctcctccccttgaaatactgaagccctcaacatcatctttggaggaaggtacagagttggctctcacgcgcacatccttaaccttggcctaataaacctctaaggtggctgagacctgtctcagatacttgttggcttacaaattgaccaccatgcagggactcagagtggaggtggccctgccctttggcaggtttcctcctggtgcttaggaccagtttgggccttctttattgctcaggacagtaggacaatttgctgagatccgggagccctaccaccctccagagaatctctgatctcccgaaacttggttgaggtcgaaagtttattttgcgcacaatgccttttccttttccggtgttttacttgcttccaacaaagaaggcgagttttcctgcttccgtgatgatggggagcaggagacttccctggagtttcagctcggaaacaactcgagtttttcctgattccacgatgggggagagcagtctaaagcctgggccccattcctagtctttttcccgttggatttgacgaattctgttagacttggtcaaatctgaagcaaacttccaagttgtgggaaacaagcctctgaattagctgaattcccacagctgggaaaaaggaaaaaaagccagaaaaagggaaaaaagattttnaccacgtgatgggctttatttgcataacgaggccacgtttttccagccaagncacactcgaggtaagtgccgtcacctcacgntgcagttcgggccataggggccncttacatttttttacccanggctttgacctggaatgggat

SEQ ID NO: 62599 - DNA, 361 bp, Homo sapiens
cggtttgactatctgatgagccatcacaacattcccatctgttcgtcagggagggagttggaatgtaaacagacccagccactgctttctgactgcctgagttttctggccatcttgtctaccttgtcactagcatcctattcatgaaagccttagcgctctcttgagtcctgcttaacactggtcggccccatctctatgtctctgcacccagatatgattgctccatgtcatcacattgcatcattcatgccacatgtgtttactgagcatctagtttatgccaggcactattctaggcactggggatacaacaaagaacaaactagagtaaaatccccgagccttgcattctagagga

SEQ ID NO: 62600 - DNA, 664 bp, Homo sapiens
acatgtgaatagatattaagtgccatatataattagttctcagaagaagggagaaatgatcataggactgggaattgttttgcaaacgttctaggagatgtgagagaaaatatgtaaccacatcttagtggcccaagaaaatacaggcctgaagggataagattgtgtctctatagagcttcaaagcatacaggtcaattaagaaagcccctctctctccagagccgtttccctagcttttggcacctggatgccacagtcctccattaggctgatgactccaaagatgtaactctagcctcttgcctgagcttcagactcgcgtcccactgcccacaggacacatccacctggatgtgactcacaggtacctccaacccatcatgtggagatacccatcctgttccccctagagctgctcttcctgctgcattctctctctcaattactgggaccaccaagctaggaacctgggagtcatccttgatactttctcttcctccttaatcctgtgtattcagcaagtaactaaaggttggtgttggccaggcatggtggctcatgcctgtaatcccagcattttgggaggccaaggcgggcggatcacttgaggtcaggagctcaagaccagcctggccaacatggtgaaaccccatctctacta

SEQ ID NO: 62601 - DNA, 1134 bp, Homo sapiens
aacctttcaagtgccccctcctttccttaaagtcttttataggggtccccttcttggccatctccatcctgtgagtcaggactgaaagggcacagacaggtcactgccagcattgttggggcaagcctgcaagcacgcatcactggggatctgacatgacaatggccgcctgccccctctgagggctacaggacttaccccagtgggaagcagctaagcaggtctgaccagccgacctggacctggccaagggtcctgtcatccctcatggccaccccgccattccggctgataaggaagatgttttccttcaaggtgagcagatggatggggcttgcctgcttccggtccctggcggcatcctctcccagtattcgccagaagaaactaatgcacaagctgcaggaggaaaaggcttttcgcgaagagatgaaaatttttcgtgaaaaaatagaggacttcagggaagagatgtggactttccgaggcaagatccatgctttccggggccagatcctgggtttttgggaagaggagagacctttctgggaagaggagaaaaccttctggaaagaggaaaaatccttctgggaaatggaaaagtctttcagggaggaagagaaaactttctggaaaaagtaccgcactttctggaaggaggataaggccttctggaaagaggacaatgccttatgggaaagagaccggaaccttcttcaggaggacaaggccctgtgggaggaagaaaaggccctgtgggtagaggaaagagccctccttgagggggagaaagccctgtgggaagataaaacgtccctctgggaggaagagaatgccctctgggaggaagagagggccttctggatggagaacaatggccacattgccggagagcagatgctcgaagatgggccccacaacgccaacagagggcagcgcttgctggccttctcccgaggcagggcgtagccagcatgcaggtgcagggccctgtggtccagactcccctgggttgggattcaagtccagggtgagcccatgtgctggagaaaatacacactcattggtctccttgctttgaaagatccaataaagtcctgaggcaaggtttggaaaaccaacttaaaaaaaaaa

SEQ ID NO: 62602 - DNA, 256 bp, Homo sapiens
gtattttaaaatccatggacaggtcaaaacatgttaagcaagaagaagatatatctaagagataactttgtaaaagtcttcaattatttgaagggcctgttagagagtggctggctgtgaggaacctggctgggaacacatgccagcaaagacctaaggacggcctgagaaatttggaggaagggggaactttccttcagagttattaagcactaaaaccagtcactagtgtttttagagaacctttacataattt

SEQ ID NO: 62603 - DNA, 586 bp, Homo sapiens
  misc_feature (235)..(235): n is a, c, g, or t
aaaaagcacaatgtgtcccaacaaggctcccataatagacacatatcaattcgaagcaccaaaaggcaacaagtgaacattattcttatgtttaactgtgtgtagccttttgagattttgtgcttgaagtgggtgattatggaagttgatataagacttaaacttggtatttaaagcctggtcaagatttccctgtcctgtgtctagtgtgagttcttgacaagagtgtcccttnccgtcacagagtgggcccaacgacctacctcgtgccgaattcggcacgaggttaaaatgaactgttgctattgtgagatggattttaactgacctattaagggtttctttcgaatggcactactttagggacattctagtatttgcttctattgtttgggccttgtggataatgtacagatttaaaaacaaatcttgttgctgatttgtccatttctttccctgcactttgttacatctgggatacagtctaactcatctgatttaatatgcatttaaaaaaatgccataactattaaacaccttgtttacagacagatgaaataaatttattccaaccaaaaaaaaaaag

SEQ ID NO: 62604 - DNA, 335 bp, Homo sapiens
tagaggatcccctccgactagccgacagccaacatacaatgtggctgtcggcagagctggtagagtcttggtctttgtaatgggaaaagaaggggtccatggaggcggattgaataagaaggcatactcaatggcaaaatacttgagagactctgggttctagctgctaggcagactgttaagtattaggggaaaattgctcttaaactttcctagctataagcttaagtcttaattctggaaattttattagcaatgcagggtgatggggtatgaacctgtgtctcctttgtatccctctgtcgggctagtcggtaaggatcctgctagatcga

SEQ ID NO: 62605 - DNA, 2118 bp, Homo sapiens
cgccccgcctccccccgcgccgccgccgcccgctaccgccgccgccgccgctgcgcctgctgctcctcgccgtccgcgctgcagtgcgaagggctcgaagatggccggttggcagagctacgtggataacctgatgtgcgatggctgctgccaggaggccgccattgtcggctactgcgacgccaaatacgtctgggcagccacggccgggggcgtctttcagagcattacgccaatagaaatagatatgattgtaggaaaagaccgggaaggtttctttaccaacggtttgactcttggcgcgaagaaatgctcagtgatcagagatagtctatacgtcgatggtgactgcacaatggacatccggacaaagagtcaaggtggggagccaacatacaatgtggctgtcggcagagctggtagagtcttggtctttgtaatgggaaaagaaggggtccatggaggcggattgaataagaaggcatactcaatggcaaaatacttgagagactctgggttctagctgctaggcagactgttaagtattaggggaaaattgctcttaaactttcctagctataagcttaagtcttaattctggaaattttattagcaatgcagggtgatggggtatgaacctgtgtctcctttgtatccctctgttggtggggaaaggtgtctttctttctgccctccccccccaaaataattctgttcacttttgttttgtttccttgtgtactccagcattggttatagtcatgggaaaggaaggtgtccacggaggcacacttaacaagaaagcatatgaactcgctttatacctgaggaggtctgatgtgtaagcagcctctccccatctacctagcaactgtcttcatcaacaaccctaattatggtcacaatgctaccaaactgtagatggtagctaatttttctttacctattttctaatgtcatgattcctgtttgcccaatggatcatttgtatgttaaccactgtatgtaaccaacccttatctggcaacataattgcagcacaataatgatttgcatgataccttgaaattggggggagggggcatgccaagttgggcatcactttgtcttagcaattaatgggatattgattactaaaataagttaatattaagcaaggtgccggttgtacaatctctgatcagtgtcttttcagcactttgagcatttacttggctcatttagtcttccttttgtagcgcatggttgggaggaaaaagtgcatgcatcattccttcactcttctctttttcccgcccccccctcccttcgcacataggcatttggtttgcttccatctttttttatgcagtgcctgtttttttttaaccaattaaaatcccttttgttgatgagctattgagagctgcagtagtttgcttttagtattgttgttgcacttgagcagagacaaacctttattcatagtgtctacaggacatatgaagagtgcaatggcaaaacaagagcaaaaagcacttcctcccatgaccttacagtaaccatactgattgaatccccagggacattccatcattgcaatagctcagatttttcttcctttttctttgcacaccagctctactctttagtaaaattgtaaaaggctgccattatggacattaggtatcccaacataaccatctggagtgtgtccagtttgttcttcataggaccaatttttatttgcagcttgagtttttatatgaagttgcattattgtggacttggctgtcttgtgatgaatttttttcatatgtattctgtgccatactattgttaaaatgaactgttgctattgtgagatggattttaactgacctattaagggtttctttcgaatggcactactttagggacattctagtatttgcttctattgtttgggccttgtggataatgtacagatttaaaaacaaatcttgttgctgatttgtccatttctttccctgcactttgttacatctgggatacagtctaactcatctgatttaatatgcatttaaaaaaatgccataactattaaacaccttgtttacagacagatgaaataaatttattccaaccaaaaaaaaaaag

SEQ ID NO: 62606 - DNA, 2103 bp, Homo sapiens
gactaatcgaaccatctagtagctggttcccgccgctgcgcctgctgctcctcgccgtccgcgctgcagtgcgaagggctcgaagatggccggttggcagagctacgtggataacctgatgtgcgatggctgctgccaggaggccgccattgtcggctactgcgacgccaaatacgtctgggcagccacggccgggggcgtctttcagagcattacgccaatagaaatagatatgattgtaggaaaagaccgggaaggtttctttaccaacggtttgactcttggcgcgaagaaatgctcagtgatcagagatagtctatacgtcgatggtgactgcacaatggacatccggacaaagagtcaaggtggggagccaacatacaatgtggctgtcggcagagctggtagagtcttggtctttgtaatgggaaaagaaggggtccatggaggcggattgaataagaaggcatactcaatggcaaaatacttgagagactctgggttctagctgctaggcagactgttaagtattaggggaaaattgctcttaaactttcctagctataagcttaagtcttaattctggaaattttattagcaatgcagggtgatggggtatgaacctgtgtctcctttgtatccctctgttggtggggaaaggtgtctttctttctgccctccccccccaaaataattctgttcacttttgttttgtttccttgtgtactccagcattggttatagtcatgggaaaggaaggtgtccacggaggcacacttaacaagaaagcatatgaactcgctttatacctgaggaggtctgatgtgtaagcagcctctccccatctacctagcaactgtcttcatcaacaaccctaattatggtcacaatgctaccaaactgtagatggtagctaatttttctttacctattttctaatgtcatgattcctgtttgcccaatggatcatttgtatgttaaccactgtatgtaaccaacccttatctggcaacataattgcagcacaataatgatttgcatgataccttgaaattggggggagggggcatgccaagttgggcatcactttgtcttagcaattaatgggatattgattactaaaataagttaatattaagcaaggtgccggttgtacaatctctgatcagtgtcttttcagcactttgagcatttacttggctcatttagtcttccttttgtagcgcatggttgggaggaaaaagtgcatgcatcattccttcactcttctctttttcccgcccccccctcccttcgcacataggcatttggtttgcttccatctttttttatgcagtgcctgtttttttttaaccaattaaaatcccttttgttgatgagctattgagagctgcagtagtttgcttttagtattgttgttgcacttgagcagagacaaacctttattcatagtgtctacaggacatatgaagagtgcaatggcaaaacaagagcaaaaagcacttcctcccatgaccttacagtaaccatactgattgaatccccagggacattccatcattgcaatagctcagatttttcttcctttttctttgcacaccagctctactctttagtaaaattgtaaaaggctgccattatggacattaggtatcccaacataaccatctggagtgtgtccagtttgttcttcataggaccaatttttatttgcagcttgagtttttatatgaagttgcattattgtggacttggctgtcttgtgatgaatttttttcatatgtattctgtgccatactattgttaaaatgaactgttgctattgtgagatggattttaactgacctattaagggtttctttcgaatggcactactttagggacattctagtatttgcttctattgtttgggccttgtggataatgtacagatttaaaaacaaatcttgttgctgatttgtccatttctttccctgcactttgttacatctgggatacagtctaactcatctgatttaatatgcatttaaaaaaatgccataactattaaacaccttgtttacagacagatgaaataaatttattccaaccaaaaaaaaaaag

SEQ ID NO: 62607 - DNA, 2064 bp, Homo sapiens
cgccccgcctccccccgcgccgccgccgcccgctaccgccgccgccgccgctgcgcctgctgctcctcgccgtccgcgctgcagtgcgaagggctcgaagatggccggttggcagagctacgtggataacctgatgtgcgatggctgctgccaggaggccgccattgtcggctactgcgacgccaaatacgtctgggcagccacggccgggggcgtctttcagagcattacgccaatagaaatagatatgattgtaggaaaagaccgggaaggtttctttaccaacggtttgactcttggcgcgaagaaatgctcagtgatcagagatagtctatacgtcgatggtgactgcacaatggacatccggacaaagagtcaaggtggggagccaacatacaatgtggctgtcggcagagctggtagagtcttggtctttgtaatgggaaaagaaggggtccatggaggcggattgaataagaaggcatactcaatggcaaaatacttgagagactctgggttctagctgctaggcagactgttaagtattaggggaaaattgctcttaaactttcctagctataagcttaagtcttaattctggaaattttattagcaatgcagggtgatggggtatgaacctgtgtctcctttgtatccctctgttggtggggaaaggtgtctttctttctgccctccccccccaaaataattctgttcacttttgttttgtttccttgtgtactccagcattggttatagtcatgggaaaggaaggtgtccacggaggcacacttaacaagaaagcatatgaactcgctttatacctgaggaggtctgatgtgtaagcagcctctccccatctacctagcaactgtcttcatcaacaaccctaattatggtcacaatgctaccaaactgtagatggtagctaatttttctttacctattttctaatgtcatgattcctgtttgcccaatggatcatttgtatgttaaccactgtatgtaaccaacccttatctggcaacataattgcagcacaataatgatttgcatgataccttgaaattggggggagggggcatgccaagttgggcatcactttgtcttagcaattaatgggatattgattactaaaataagttaatattaagcaaggtgccggttgtacaatctctgatcagtgtcttttcagcactttgagcatttacttggctcatttagtcttccttttgtagcgcatggttgggaggatcgcacataggcatttggtttgcttccatctttttttatgcagtgcctgtttttttttaaccaattaaaatcccttttgttgatgagctattgagagctgcagtagtttgcttttagtattgttgttgcacttgagcagagacaaacctttattcatagtgtctacaggacatatgaagagtgcaatggcaaaacaagagcaaaaagcacttcctcccatgaccttacagtaaccatactgattgaatccccagggacattccatcattgcaatagctcagatttttcttcctttttctttgcacaccagctctactctttagtaaaattgtaaaaggctgccattatggacattaggtatcccaacataaccatctggagtgtgtccagtttgttcttcataggaccaatttttatttgcagcttgagtttttatatgaagttgcattattgtggacttggctgtcttgtgatgaatttttttcatatgtattctgtgccatactattgttaaaatgaactgttgctattgtgagatggattttaactgacctattaagggtttctttcgaatggcactactttagggacattctagtatttgcttctattgtttgggccttgtggataatgtacagatttaaaaacaaatcttgttgctgatttgtccatttctttccctgcactttgttacatctgggatacagtctaactcatctgatttaatatgcatttaaaaaaatgccataactattaaacaccttgtttacagacagatgaaataaatttattccaaccaaaaaaaaaaag

SEQ ID NO: 62608 - DNA, 1758 bp, Homo sapiens
gactaatcgaaccatctagtagctggttcccgccgctgcgcctgctgctcctcgccgtccgcgctgcagtgcgaagggctcgaagatggccggttggcagagctacgtggataacctgatgtgcgatggctgctgccaggaggccgccattgtcggctactgcgacgccaaatacgtctgggcagccacggccgggggcgtctttcagagcattacgaggaaaagaccgggaaggtttctttaccaacggtttgactcttggcgcgaagaaatgctcagtgatcagagatagtctatacgtcgatggtgactgcacaatggacatccggacaaagagtcaaggtggggagccaacatacaatgtggctgtcggcagagctggtagagcattggttatagtcatgggaaaggaaggtgtccacggaggcacacttaacaagaaagcatatgaactcgctttatacctgaggaggtctgatgtgtaagcagcctctccccatctacctagcaactgtcttcatcaacaaccctaattatggtcacaatgctaccaaactgtagatggtagctaatttttctttacctattttctaatgtcatgattcctgtttgcccaatggatcatttgtatgttaaccactgtatgtaaccaacccttatctggcaacataattgcagcacaataatgatttgcatgataccttgaaattggggggagggggcatgccaagttgggcatcactttgtcttagcaattaatgggatattgattactaaaataagttaatattaagcaaggtgccggttgtacaatctctgatcagtgtcttttcagcactttgagcatttacttggctcatttagtcttccttttgtagcgcatggttgggaggaaaaagtgcatgcatcattccttcactcttctctttttcccgcccccccctcccttcgcacataggcatttggtttgcttccatctttttttatgcagtgcctgtttttttttaaccaattaaaatcccttttgttgatgagctattgagagctgcagtagtttgcttttagtattgttgttgcacttgagcagagacaaacctttattcatagtgtctacaggacatatgaagagtgcaatggcaaaacaagagcaaaaagcacttcctcccatgaccttacagtaaccatactgattgaatccccagggacattccatcattgcaatagctcagatttttcttcctttttctttgcacaccagctctactctttagtaaaattgtaaaaggctgccattatggacattaggtatcccaacataaccatctggagtgtgtccagtttgttcttcataggaccaatttttatttgcagcttgagtttttatatgaagttgcattattgtggacttggctgtcttgtgatgaatttttttcatatgtattctgtgccatactattgttaaaatgaactgttgctattgtgagatggattttaactgacctattaagggtttctttcgaatggcactactttagggacattctagtatttgcttctattgtttgggccttgtggataatgtacagatttaaaaacaaatcttgttgctgatttgtccatttctttccctgcactttgttacatctgggatacagtctaactcatctgatttaatatgcatttaaaaaaatgccataactattaaacaccttgtttacagacagatgaaataaatttattccaaccaaaaaaaaaaag

SEQ ID NO: 62609 - DNA, 1651 bp, Homo sapiens
ggtaccctggtccctgcaccggagcggggtggccggccgcgggggcaccgcagcgcggggctggaacactgagggccgagcccgcagccaatagaaatagatatgattgtaggaaaagaccgggaaggtttctttaccaacggtttgactcttggcgcgaagaaatgctcagtgatcagagatagtctatacgtcgatggtgactgcacaatggacatccggacaaagagtcaaggtggggagccaacatacaatgtggctgtcggcagagctggtagagcattggttatagtcatgggaaaggaaggtgtccacggaggcacacttaacaagaaagcatatgaactcgctttatacctgaggaggtctgatgtgtaagcagcctctccccatctacctagcaactgtcttcatcaacaaccctaattatggtcacaatgctaccaaactgtagatggtagctaatttttctttacctattttctaatgtcatgattcctgtttgcccaatggatcatttgtatgttaaccactgtatgtaaccaacccttatctggcaacataattgcagcacaataatgatttgcatgataccttgaaattggggggagggggcatgccaagttgggcatcactttgtcttagcaattaatgggatattgattactaaaataagttaatattaagcaaggtgccggttgtacaatctctgatcagtgtcttttcagcactttgagcatttacttggctcatttagtcttccttttgtagcgcatggttgggaggaaaaagtgcatgcatcattccttcactcttctctttttcccgcccccccctcccttcgcacataggcatttggtttgcttccatctttttttatgcagtgcctgtttttttttaaccaattaaaatcccttttgttgatgagctattgagagctgcagtagtttgcttttagtattgttgttgcacttgagcagagacaaacctttattcatagtgtctacaggacatatgaagagtgcaatggcaaaacaagagcaaaaagcacttcctcccatgaccttacagtaaccatactgattgaatccccagggacattccatcattgcaatagctcagatttttcttcctttttctttgcacaccagctctactctttagtaaaattgtaaaaggctgccattatggacattaggtatcccaacataaccatctggagtgtgtccagtttgttcttcataggaccaatttttatttgcagcttgagtttttatatgaagttgcattattgtggacttggctgtcttgtgatgaatttttttcatatgtattctgtgccatactattgttaaaatgaactgttgctattgtgagatggattttaactgacctattaagggtttctttcgaatggcactactttagggacattctagtatttgcttctattgtttgggccttgtggataatgtacagatttaaaaacaaatcttgttgctgatttgtccatttctttccctgcactttgttacatctgggatacagtctaactcatctgatttaatatgcatttaaaaaaatgccataactattaaacaccttgtttacagacagatgaaataaatttattccaaccaaaaaaaaaaag

SEQ ID NO: 62610 - DNA, 1659 bp, Homo sapiens
gtgggaggcgatctagaggatccctcgctattcgtcggcacacttgagagactctgggttctagctgctaggcagactgttaagtattaggggaaaattgctcttaaactttcctagctataagcttaagtcttaattctggaaattttattagcaatgcagggtgatggggtatgaacctgtgtctcctttgtatccctctgttggtggggaaaggtgtctttctttctgccctccccccccaaaataattctgttcacttttgttttgtttccttgtgtactccagcattggttatagtcatgggaaaggaaggtgtccacggaggcacacttaacaagaaagcatatgaactcgctttatacctgaggaggtctgatgtgtaagcagcctctccccatctacctagcaactgtcttcatcaacaaccctaattatggtcacaatgctaccaaactgtagatggtagctaatttttctttacctattttctaatgtcatgattcctgtttgcccaatggatcatttgtatgttaaccactgtatgtaaccaacccttatctggcaacataattgcagcacaataatgatttgcatgataccttgaaattggggggagggggcatgccaagttgggcatcactttgtcttagcaattaatgggatattgattactaaaataagttaatattaagcaaggtgccggttgtacaatctctgatcagtgtcttttcagcactttgagcatttacttggctcatttagtcttccttttgtagcgcatggttgggaggaaaaagtgcatgcatcattccttcactcttctctttttcccgcccccccctcccttcgcacataggcatttggtttgcttccatctttttttatgcagtgcctgtttttttttaaccaattaaaatcccttttgttgatgagctattgagagctgcagtagtttgcttttagtattgttgttgcacttgagcagagacaaacctttattcatagtgtctacaggacatatgaagagtgcaatggcaaaacaagagcaaaaagcacttcctcccatgaccttacagtaaccatactgattgaatccccagggacattccatcattgcaatagctcagatttttcttcctttttctttgcacaccagctctactctttagtaaaattgtaaaaggctgccattatggacattaggtatcccaacataaccatctggagtgtgtccagtttgttcttcataggaccaatttttatttgcagcttgagtttttatatgaagttgcattattgtggacttggctgtcttgtgatgaatttttttcatatgtattctgtgccatactattgttaaaatgaactgttgctattgtgagatggattttaactgacctattaagggtttctttcgaatggcactactttagggacattctagtatttgcttctattgtttgggccttgtggataatgtacagatttaaaaacaaatcttgttgctgatttgtccatttctttccctgcactttgttacatctgggatacagtctaactcatctgatttaatatgcatttaaaaaaatgccataactattaaacaccttgtttacagacagatgaaataaatttattccaaccaaaaaaaaaaag

SEQ ID NO: 62611 - DNA, 1729 bp, Homo sapiens
gactaatcgaaccatctagtagctggttcccgccgctgcgcctgctgctcctcgccgtccgcgctgcagtgcgaagggctcgaagatggccggttggcagagctacgtggataacctgatgtgcgatggctgctgccaggaggccgccattgtcggctactgcgacgccaaatacgtctgggcagccacggccgggggcgtctttcagagcattacgccaatagaaatagatatgattgtaaatgctcagtgatcagagatagtctatacgtcgatggtgactgcacaatggacatccggacaaagagtcaaggtggggagccaacatacaatgtggctgtcggcagagctggtagagcattggttatagtcatgggaaaggaaggtgtccacggaggcacacttaacaagaaagcatatgaactcgctttatacctgaggaggtctgatgtgtaagcagcctctccccatctacctagcaactgtcttcatcaacaaccctaattatggtcacaatgctaccaaactgtagatggtagctaatttttctttacctattttctaatgtcatgattcctgtttgcccaatggatcatttgtatgttaaccactgtatgtaaccaacccttatctggcaacataattgcagcacaataatgatttgcatgataccttgaaattggggggagggggcatgccaagttgggcatcactttgtcttagcaattaatgggatattgattactaaaataagttaatattaagcaaggtgccggttgtacaatctctgatcagtgtcttttcagcactttgagcatttacttggctcatttagtcttccttttgtagcgcatggttgggaggaaaaagtgcatgcatcattccttcactcttctctttttcccgcccccccctcccttcgcacataggcatttggtttgcttccatctttttttatgcagtgcctgtttttttttaaccaattaaaatcccttttgttgatgagctattgagagctgcagtagtttgcttttagtattgttgttgcacttgagcagagacaaacctttattcatagtgtctacaggacatatgaagagtgcaatggcaaaacaagagcaaaaagcacttcctcccatgaccttacagtaaccatactgattgaatccccagggacattccatcattgcaatagctcagatttttcttcctttttctttgcacaccagctctactctttagtaaaattgtaaaaggctgccattatggacattaggtatcccaacataaccatctggagtgtgtccagtttgttcttcataggaccaatttttatttgcagcttgagtttttatatgaagttgcattattgtggacttggctgtcttgtgatgaatttttttcatatgtattctgtgccatactattgttaaaatgaactgttgctattgtgagatggattttaactgacctattaagggtttctttcgaatggcactactttagggacattctagtatttgcttctattgtttgggccttgtggataatgtacagatttaaaaacaaatcttgttgctgatttgtccatttctttccctgcactttgttacatctgggatacagtctaactcatctgatttaatatgcatttaaaaaaatgccataactattaaacaccttgtttacagacagatgaaataaatttattccaaccaaaaaaaaaaag

SEQ ID NO: 62612 - DNA, 1644 bp, Homo sapiens
cgccccgcctccccccgcgccgccgccgcccgctaccgccgccgccgccgctgcgcctgctgctcctcgccgtccgcgctgcagtgcgaagggctcgaagatggccggttggcagagctacgtggataacctgatgtgcgatggctgctgccaggaggccgccattgtcggctactgcgacgccaaatacgtctgggcagccacggccgggggcgtctttcagagcattacgccaatagaaatagatatgattgtaggaaaagaccgggaaggtttctttaccaacggtttgactcttggcgcgaagaaatgctcagtgatcagagatagtctatacgtcgatggtgactgcacaatggacatccggacaaagagtcaaggtggggagccaacatacaatgtggctgtcggcagagctggtagagtcttggtctttgtaatgggaaaagaaggggtccatggaggcggattgaataagaaggcatactcaatggcaaaatacttgagagactctgggttctagctgctaggcagactgttaagtattaggggaaaattgctcttaaactttcctagctataagcttaagtcttaattctggaaattttattagcaatgcagggtgatggggtatgaacctgtgtctcctttgtatccctctgttggtggggaaaggtgtctttctttctgccctccccccccaaaataattctgttcacttttgttttgtttccttgtgtactccagcattggttatagtcatgggaaaggaaggtgtccacggaggcacacttaacaagaaagcatatgaactcgctttatacctgaggaggtctgatgtgtaagcagcctctccccatctacctagcaactgtcttcatcaacaaccctaattatggtcacaatgctaccaaactgtagatggtagctaatttttctttacctattttctaatgtcatgattcctgtttgcccaatggatcatttgtatgttaaccactgtatgtaaccaacccttatctggcaacataattgcagcacaataatgatttgcatgataccttgaaattggggggagggggcatgccaagttgggcatcactttgtcttagcaattaatgggatattgattactaaaataagttaatattaagcaaggtgccggttgtacaatctctgatcagtgtcttttcagcactttgagcatttacttggctcatttagtcttccttttgtagcgcatggttgggaggaaaaagtgcatgcatcattccttcactcttctctttttcccgcccccccctcccttcgcacataggcatttggtttgcttccatctttttttatgcagtgcctgtttttttttaaccaattaaaatcccttttgttgatgagctattgagagctgcagtagtttgcttttagtattgttgttgcacttgagcagagacaaacctttattcatagtgtctacaggacatatgaagagtgcaatggcaaaacaagagcaaaaagcacttcctcccatgaccttacagtaaccatactgattgaatccccagggacattccatcattgcaatagctcagatttttcttcctttttctttgcacaccgtgtttatctcaatccgggtacgagctc

SEQ ID NO: 62613 - DNA, 1285 bp, Homo sapiens
cgccccgcctccccccgcgccgccgccgcccgctaccgccgccgccgccgctgcgcctgctgctcctcgccgtccgcgctgcagtgcgaagggctcgaagatggccggttggcagagctacgtggataacctgatgtgcgatggctgctgccaggaggccgccattgtcggctactgcgacgccaaatacgtctgggcagccacggccgggggcgtctttcagagcattacgccaatagaaatagatatgattgtaggaaaagaccgggaaggtttctttaccaacggtttgactcttggcgcgaagaaatgctcagtgatcagagatagtctatacgtcgatggtgactgcacaatggacatccggacaaagagtcaaggtggggagccaacatacaatgtggctgtcggcagagctggtagagtcttggtctttgtaatgggaaaagaaggggtccatggaggcggattgaataagaaggcatactcaatggcaaaatacttgagagactctgggttctagctgctaggcagactgttaagtattaggggaaaattgctcttaaactttcctagctataagcttaagtcttaattctggaaattttattagcaatgcagggtgatggggtatgaacctgtgtctcctttgtatccctctgttggtggggaaaggtgtctttctttctgccctccccccccaaaataattctgttcacttttgttttgtttccttgtgtactccagcattggttatagtcatgggaaaggaaggtgtccacggaggcacacttaacaagaaagcatatgaactcgctttatacctgaggaggtatcccaacataaccatctggagtgtgtccagtttgttcttcataggaccaatttttatttgcagcttgagtttttatatgaagttgcattattgtggacttggctgtcttgtgatgaatttttttcatatgtattctgtgccatactattgttaaaatgaactgttgctattgtgagatggattttaactgacctattaagggtttctttcgaatggcactactttagggacattctagtatttgcttctattgtttgggccttgtggataatgtacagatttaaaaacaaatcttgttgctgatttgtccatttctttccctgcactttgttacatctgggatacagtctaactcatctgatttaatatgcatttaaaaaaatgccataactattaaacaccttgtttacagacagatgaaataaatttattccaaccaaaaaaaaaaag

SEQ ID NO: 62614 - DNA, 948 bp, Homo sapiens
gactaatcgaaccatctagtagctggttcccgccgctgcgcctgctgctcctcgccgtccgcgctgcagtgcgaagggctcgaagatggccggttggcagagctacgtggataacctgatgtgcgatggctgctgccaggaggccgccattgtcggctactgcgacgccaaatacgtctgggcagccacggccgggggcgtctttcagagcattacgccaatagaaatagatatgattgtaggaaaagaccgggaaggtttctttaccaacggtttgactcttggcgcgaagaaatgctcagtgatcagagatagtctatacgtcgatggtgactgcacaatggacatccggacaaagagtcaaggtggggagccaacatacaatgtggctgtcggcagagctggtagagcattggttatagtcatgggaaaggaaggtgtccacggaggcacacttaacaagaaagcatatgaactcgctttatacctgaggaggtatcccaacataaccatctggagtgtgtccagtttgttcttcataggaccaatttttatttgcagcttgagtttttatatgaagttgcattattgtggacttggctgtcttgtgatgaatttttttcatatgtattctgtgccatactattgttaaaatgaactgttgctattgtgagatggattttaactgacctattaagggtttctttcgaatggcactactttagggacattctagtatttgcttctattgtttgggccttgtggataatgtacagatttaaaaacaaatcttgttgctgatttgtccatttctttccctgcactttgttacatctgggatacagtctaactcatctgatttaatatgcatttaaaaaaatgccataactattaaacaccttgtttacagacagatgaaataaatttattccaaccaaaaaaaaaaag

SEQ ID NO: 62615 - DNA, 344 bp, Homo sapiens
aagatgcagtcaagtttactattttctgtttagtatattactagtttgaaagttctttttggaaacctacttgacttcagtgcttggcagttcatggaaaactaacttaatgttaacttattaatccgggttctgtctgctaaaacttatgtgactttcttgattaacacttcttttgaaacacttttcttctttctctttcagtcttggtctttgtaatgggaaaagaaggggtccatggaggcggattgaataagaaggcatactcaatggcaaaatacttgagagactctgggttctagctgctaggcagactgttaagtattaggggaaaattgctctta

SEQ ID NO: 62616 - DNA, 375 bp, Homo sapiens
tatataggattaaataattatttagaaaagactgaatcttggttttacattagtgaaatgtggctatctggcagtggtagcataagcctagctacagcccttcctgttacatcaagccctaaaaggagttaactacaacttaatgtgtgtgtttttttttttttctttttggtggggggcagccaatagaaatagatatgattgtaggaaaagaccgggaaggtttctttaccaacggtttgactcttggcgcgaagaaatgctcagtgatcagagatagtctatacgtcgatggtgactgcacaatggacatccggacaaagagtcaaggtggggagccaacatacaatgtggctgtcggcagagctggtagag

SEQ ID NO: 62617 - DNA, 1796 bp, Homo sapiens
cgccccgcctccccccgcgccgccgccgcccgctaccgccgccgccgccgctgcgcctgctgctcctcgccgtccgcgctgcagtgcgaagggctcgaagatggccggttggcagagctacgtggataacctgatgtgcgatggctgctgccaggaggccgccattgtcggctactgcgacgccaaatacgtctgggcagccacggccgggggcgtctttcagagcattacgccaatagaaatagatatgattgtaggaaaagaccgggaaggtttctttaccaacggtttgactcttggcgcgaagaaatgctcagtgatcagagatagtctatacgtcgatggtgactgcacaatggacatccggacaaagagtcaaggtggggagccaacatacaatgtggctgtcggcagagctggtagagcattggttatagtcatgggaaaggaaggtgtccacggaggcacacttaacaagaaagcatatgaactcgctttatacctgaggaggtctgatgtgtaagcagcctctccccatctacctagcaactgtcttcatcaacaaccctaattatggtcacaatgctaccaaactgtagatggtagctaatttttctttacctattttctaatgtcatgattcctgtttgcccaatggatcatttgtatgttaaccactgtatgtaaccaacccttatctggcaacataattgcagcacaataatgatttgcatgataccttgaaattggggggagggggcatgccaagttgggcatcactttgtcttagcaattaatgggatattgattactaaaataagttaatattaagcaaggtgccggttgtacaatctctgatcagtgtcttttcagcactttgagcatttacttggctcatttagtcttccttttgtagcgcatggttgggaggaaaaagtgcatgcatcattccttcactcttctctttttcccgcccccccctcccttcgcacataggcatttggtttgcttccatctttttttatgcagtgcctgtttttttttaaccaattaaaatcccttttgttgatgagctattgagagctgcagtagtttgcttttagtattgttgttgcacttgagcagagacaaacctttattcatagtgtctacaggacatatgaagagtgcaatggcaaaacaagagcaaaaagcacttcctcccatgaccttacagtaaccatactgattgaatccccagggacattccatcattgcaatagctcagatttttcttcctttttctttgcacaccagctctactctttagtaaaattgtaaaaggctgccattatggacattaggtatcccaacataaccatctggagtgtgtccagtttgttcttcataggaccaatttttatttgcagcttgagtttttatatgaagttgcattattgtggacttggctgtcttgtgatgaatttttttcatatgtattctgtgccatactattgttaaaatgaactgttgctattgtgagatggattttaactgacctattaagggtttctttcgaatggcactactttagggacattctagtatttgcttctattgtttgggccttgtggataatgtacagatttaaaaacaaatcttgttgctgatttgtccatttctttccctgcactttgttacatctgggatacagtctaactcatctgatttaatatgcatttaaaaaaatgccataactattaaacaccttgtttacagacagatgaaataaatttattccaaccaaaaaaaaaaag

SEQ ID NO: 62618 - DNA, 2046 bp, Homo sapiens
gctagtagggcccgcgggttaatcggcaacgagcggttggcagagctacgtggataacctgatgtgcgatggctgctgccaggaggccgccattgtcggctactgcgacgccaaatacgtctgggcagccacggccgggggcgtctttcagagcattacgccaatagaaatagatatgattgtaggaaaagaccgggaaggtttctttaccaacggtttgactcttggcgcgaagaaatgctcagtgatcagagatagtctatacgtcgatggtgactgcacaatggacatccggacaaagagtcaaggtggggagccaacatacaatgtggctgtcggcagagctggtagagtcttggtctttgtaatgggaaaagaaggggtccatggaggcggattgaataagaaggcatactcaatggcaaaatacttgagagactctgggttctagctgctaggcagactgttaagtattaggggaaaattgctcttaaactttcctagctataagcttaagtcttaattctggaaattttattagcaatgcagggtgatggggtatgaacctgtgtctcctttgtatccctctgttggtggggaaaggtgtctttctttctgccctccccccccaaaataattctgttcacttttgttttgtttccttgtgtactccagcattggttatagtcatgggaaaggaaggtgtccacggaggcacacttaacaagaaagcatatgaactcgctttatacctgaggaggtctgatgtgtaagcagcctctccccatctacctagcaactgtcttcatcaacaaccctaattatggtcacaatgctaccaaactgtagatggtagctaatttttctttacctattttctaatgtcatgattcctgtttgcccaatggatcatttgtatgttaaccactgtatgtaaccaacccttatctggcaacataattgcagcacaataatgatttgcatgataccttgaaattggggggagggggcatgccaagttgggcatcactttgtcttagcaattaatgggatattgattactaaaataagttaatattaagcaaggtgccggttgtacaatctctgatcagtgtcttttcagcactttgagcatttacttggctcatttagtcttccttttgtagcgcatggttgggaggaaaaagtgcatgcatcattccttcactcttctctttttcccgcccccccctcccttcgcacataggcatttggtttgcttccatctttttttatgcagtgcctgtttttttttaaccaattaaaatcccttttgttgatgagctattgagagctgcagtagtttgcttttagtattgttgttgcacttgagcagagacaaacctttattcatagtgtctacaggacatatgaagagtgcaatggcaaaacaagagcaaaaagcacttcctcccatgaccttacagtaaccatactgattgaatccccagggacattccatcattgcaatagctcagatttttcttcctttttctttgcacaccagctctactctttagtaaaattgtaaaaggctgccattatggacattaggtatcccaacataaccatctggagtgtgtccagtttgttcttcataggaccaatttttatttgcagcttgagtttttatatgaagttgcattattgtggacttggctgtcttgtgatgaatttttttcatatgtattctgtgccatactattgttaaaatgaactgttgctattgtgagatggattttaactgacctattaagggtttctttcgaatggcactactttagggacattctagtatttgcttctattgtttgggccttgtggataatgtacagatttaaaaacaaatcttgttgctgatttgtccatttctttccctgcactttgttacatctgggatacagtctaactcatctgatttaatatgcatttaaaaaaatgccataactattaaacaccttgtttacagacagatgaaataaatttattccaaccaaaaaaaaaaag

SEQ ID NO: 62619 - DNA, 2080 bp, Homo sapiens
gactaatcgaaccatctagtagctggttcccgccgctgcgcctgctgctcctcgccgtccgcgctgcagtgcgaagggctcgaagatggccggttggcagagctacgtggataacctgatgtgcgatggctgctgccaggaggccgccattgtcggctactgcgacgccaaatacgtctgggcagccacggccgggggcgtctttcagagcattacgaggaaaagaccgggaaggtttctttaccaacggtttgactcttggcgcgaagaaatgctcagtgatcagagatagtctatacgtcgatggtgactgcacaatggacatccggacaaagagtcaaggtggggagccaacatacaatgtggctgtcggcagagctggtagagtcttggtctttgtaatgggaaaagaaggggtccatggaggcggattgaataagaaggcatactcaatggcaaaatacttgagagactctgggttctagctgctaggcagactgttaagtattaggggaaaattgctcttaaactttcctagctataagcttaagtcttaattctggaaattttattagcaatgcagggtgatggggtatgaacctgtgtctcctttgtatccctctgttggtggggaaaggtgtctttctttctgccctccccccccaaaataattctgttcacttttgttttgtttccttgtgtactccagcattggttatagtcatgggaaaggaaggtgtccacggaggcacacttaacaagaaagcatatgaactcgctttatacctgaggaggtctgatgtgtaagcagcctctccccatctacctagcaactgtcttcatcaacaaccctaattatggtcacaatgctaccaaactgtagatggtagctaatttttctttacctattttctaatgtcatgattcctgtttgcccaatggatcatttgtatgttaaccactgtatgtaaccaacccttatctggcaacataattgcagcacaataatgatttgcatgataccttgaaattggggggagggggcatgccaagttgggcatcactttgtcttagcaattaatgggatattgattactaaaataagttaatattaagcaaggtgccggttgtacaatctctgatcagtgtcttttcagcactttgagcatttacttggctcatttagtcttccttttgtagcgcatggttgggaggaaaaagtgcatgcatcattccttcactcttctctttttcccgcccccccctcccttcgcacataggcatttggtttgcttccatctttttttatgcagtgcctgtttttttttaaccaattaaaatcccttttgttgatgagctattgagagctgcagtagtttgcttttagtattgttgttgcacttgagcagagacaaacctttattcatagtgtctacaggacatatgaagagtgcaatggcaaaacaagagcaaaaagcacttcctcccatgaccttacagtaaccatactgattgaatccccagggacattccatcattgcaatagctcagatttttcttcctttttctttgcacaccagctctactctttagtaaaattgtaaaaggctgccattatggacattaggtatcccaacataaccatctggagtgtgtccagtttgttcttcataggaccaatttttatttgcagcttgagtttttatatgaagttgcattattgtggacttggctgtcttgtgatgaatttttttcatatgtattctgtgccatactattgttaaaatgaactgttgctattgtgagatggattttaactgacctattaagggtttctttcgaatggcactactttagggacattctagtatttgcttctattgtttgggccttgtggataatgtacagatttaaaaacaaatcttgttgctgatttgtccatttctttccctgcactttgttacatctgggatacagtctaactcatctgatttaatatgcatttaaaaaaatgccataactattaaacaccttgtttacagacagatgaaataaatttattccaaccaaaaaaaaaaag

SEQ ID NO: 62620 - DNA, 1756 bp, Homo sapiens
cgccccgcctccccccgcgccgccgccgcccgctaccgccgccgccgccgctgcgcctgctgctcctcgccgtccgcgctgcagtgcgaagggctcgaagatggccggttggcagagctacgtggataacctgatgtgcgatggctgctgccaggaggccgccattgtcggctactgcgacgccaaatacgtctgggcagccacggccgggggcgtctttcagagcattacgccaatagaaatagatatgattgtaggaaaagaccgggaaggtttctttaccaacggtttgactcttggcgcgaagaaatgctcagtgatcagagatagtctatacgtcgatggtgactgcacaatggacatccggacaaagagtcaaggtggggagccaacatacaatgtggctgtcggcagagctggtagagcattggttatagtcatgggaaaggaaggtgtccacggaggcacacttaacaagaaagcatatgaactcgctttatacctgaggaggtctgatgtgtaagcagcctctccccatctacctagcaactgtcttcatcaacaacctaatttttctttacctattttctaatgtcatgattcctgtttgcccaatggatcatttgtatgttaaccactgtatgtaaccaacccttatctggcaacataattgcagcacaataatgatttgcatgataccttgaaattggggggagggggcatgccaagttgggcatcactttgtcttagcaattaatgggatattgattactaaaataagttaatattaagcaaggtgccggttgtacaatctctgatcagtgtcttttcagcactttgagcatttacttggctcatttagtcttccttttgtagcgcatggttgggaggaaaaagtgcatgcatcattccttcactcttctctttttcccgcccccccctcccttcgcacataggcatttggtttgcttccatctttttttatgcagtgcctgtttttttttaaccaattaaaatcccttttgttgatgagctattgagagctgcagtagtttgcttttagtattgttgttgcacttgagcagagacaaacctttattcatagtgtctacaggacatatgaagagtgcaatggcaaaacaagagcaaaaagcacttcctcccatgaccttacagtaaccatactgattgaatccccagggacattccatcattgcaatagctcagatttttcttcctttttctttgcacaccagctctactctttagtaaaattgtaaaaggctgccattatggacattaggtatcccaacataaccatctggagtgtgtccagtttgttcttcataggaccaatttttatttgcagcttgagtttttatatgaagttgcattattgtggacttggctgtcttgtgatgaatttttttcatatgtattctgtgccatactattgttaaaatgaactgttgctattgtgagatggattttaactgacctattaagggtttctttcgaatggcactactttagggacattctagtatttgcttctattgtttgggccttgtggataatgtacagatttaaaaacaaatcttgttgctgatttgtccatttctttccctgcactttgttacatctgggatacagtctaactcatctgatttaatatgcatttaaaaaaatgccataactattaaacaccttgtttacagacagatgaaataaatttattccaaccaaaaaaaaaaag

SEQ ID NO: 62621 - DNA, 460 bp, Homo sapiens
ctagaaggcagaaatggtttccgttcagcaaatccacaccagcaatcctcttacagcaaatttccaagaaacatggttggataacagtgctggacctaaaaaaggtgttggcccacgagtgcctctctctccctgcctgagctccctgaccagcatgcgtgtggcctccaggtgtgttgtctaccccccaggacctgccaagcacggtggctcatgcctgtaatcccagcactttgggaggccgaggagggaagatcacgagctcaagatatcaagaccatcctggccaacatggtgaaaccctgtctctactaaaaatacaaaaattagctgggcgtggtggtgcatgcctgtagtcccagctactcgggaggctgaggcagcagaatcgcttgaacctgggaggtgcaggttgcaacacactactaactccagcctgggcgacagagcaagactgtct

SEQ ID NO: 62622 - DNA, 290 bp, Homo sapiens
tgatgtcactcattagacccaatttattccatacaaattttcttctcatgtgcaaaagtaaaaaaaaaaaattacacagatatagagggtaatccctctaaggaacatttgctgttgaaataaaaggtaaatttgatttgtaaggcatgggatgcaccatgtctggtgtaagtcaaggagacagatttcaaaacccaagttgttacctgctcacattttgagaatgttactatctccagaagcacagcaaataccattagcatggtattctttaaccagctactaatttg

SEQ ID NO: 62623 - DNA, 1655 bp, Homo sapiens
ctggtaatttgtagagatctgttggcatctctgcttcacaaactggaaaaaatcatttgtaagtcttgctaattacttttcttggagaagaaaaaaaatgctacagttgcaaacaaatgtatagttttcaaaaagaagcaacttttttgctccccagtttattcttagtttccagcccacgccttgcgatagcgataggcatagtgatggcctcaattctttctctcttgcatccataccttttgctgtgatagcagtgatggcctcagttctttccctctcttgcatccgtaccttttgctgtgtgactttgcagctcctctcattaaagaggcagagccccctctcccacccataggagcaggttttgagagtaacagaatgaagtgaaaatgacactgtgccagttctaagaccagccctcaaaggttcatgtgtttctgcttgctttcactgtatttgaaatgttgctgtcagaaagacatctctgaaacagctgaatggtcctaagaaaaggatgagagatgcagggagcagagctcccaactgaggccagcctagatcacctaagagccaggcccccagtttactctgatgtgtaagcaataaatgcttaccccagcaataccaccaaggtttgtggttggtttatatacagcattaatgtggcaataggtgcaatacaccctgttaaacaaaccatacacatatgactctaaccctaatcataaattgattcagtctgttcagttccacaacgctgtttcctccagaatctcacagatgacttactaaatccaacacaaatacacctcagactttctgtctagctcccaaccagttaaaagcaattctaaatattttttttcttagtcgtagtgcaaaagtatattctctccctttctctatagttttctctcatttgtcttcagacctagaagcatgagagcccagctgtcaaagtcatctagacccccttcagaaggtcattaaatttgtctatttcacaggattgcaagataaaatacagaatgcccagttaaatttgaacttcggataaacaacaaatttttttttagtataagcatatcccatacaatatttgggatatacttatatttttatattgtttatctgacgttcaagctgactgggcatcctgtatttttcttagctaaatctggcaactgtgctatttcattgaaaacctgaaagtgtacaaagaaggaagaagcagaatctgccatatgagtaatagaagtgagcaggcccaggactccctaagtcaagaaaccaagaggcgtcattacggaaaagagtaactcaccctgtgtgctccttggtagttctccctcagcgatgcccccatgttatgaatggggaaaagttcactgaagggttcatagtgaagaaactttttggatgatttctgttggtgggttttggataccttcaagggatcagaaaataatatacttaggaaattttggtaatgtcatcattactctctacattattattatgacggttacaattgttaaatctaggtggtgggtatgtgggttatattgtacatgatttttaacttgtctgcatgtttgaaattataataaagtcaataaataaattattgagacactcctgttaaaaagacc

SEQ ID NO: 62624 - DNA, 322 bp, Homo sapiens
taaatgagaaaaccaactaagtggataattagccatttgagtggttcacttatctagtaaatggcaatgaaaagtctgaatcactctgctatagtcttaacaaacatcaattgaggctcttagagaatcactatgtccactgtaacattttcttaaacctcatgtgatattttgaggttaatgtgaccaattcattgacctgtcataagtctattataagttttgcaccttttgccccccctttttaatttgaattaaatggatgacattttaaaaagacaggcataaataggtacaattggtgagaaatgtttttcttctg

SEQ ID NO: 62625 - DNA, 502 bp, Homo sapiens
agaggcagaggcaggggcaggggcagggtagcaaatcttttttctagataggactccccagcttctctgtgcttttaagtctctgaagttgttttcacattatcaacataacaaactcattggcagtggggagtggtttagagtctggtttctttgtttctattatttaaagcataagcattttattagtctcaattccattgtgaactgctgaattttcatccctagtgtgagaaggtcacaatagtatttgtttcaatagataactctttctccctgtgctgtttctcactgagctgtggtgtttatgccttaagtacctgtgttatatgctacatgttgctttgaattctggtatttatgcatatctgtatatgtaagtatgttaatgtacactgatattttgctgtatttgccagtatgtttatgtgaaaattttggtcttggaaaatggtgggtgatgtgtagcttgttatttgggtgtgtgtatttatttgtatat

SEQ ID NO: 62626 - DNA, 230 bp, Homo sapiens
gtctttacccctaagtaggactttcatcaccagacctagtatgagctggttggttcctcaatacccgggccacaggccagcagcagtccatggttaggaactgggccacaccgcaagatgtgagcagcaggcaaacgagcaaagctgtatatttacagccactccctattgcttgcattaccacctgagctccacctgtcagatcagcagtggcattagattcttacagg

SEQ ID NO: 62627 - DNA, 3183 bp, Homo sapiens
ggtagcggcagcagcagcggcggtgcggagagcttggactgggagcccaaagctcggctgggcagcgggagaggaggagccgcaggagctgcagctctgccagcttgggccgagcctagagacaccggcctggctggtccacgccagccgcagaccgtggctgagcatggagctgtccccccgcagtcctccggagatgctggaggagtcggattgcccgtcacccctggagctgaagtcagcccccagcaagaagatgtggattaagcttcggtctctgctgcgctacatggtgaagcagttggagaatggggagataaacattgaggagctgaagaaaaatctggagtacacagcttctctgctggaagccgtctacatagatgagacacggcaaatcttggacacggaggacgagctgcaggagctgcggtcagatgccgtgccttcggaggtgcgggactggctggcctccaccttcacccagcaggcccgggccaaaggccgccgagcagaggagaagcccaagttccgaagcattgtgcacgctgtgcaggctgggatcttcgtggaacggatgttccggagaacatacacctctgtgggccccacttactctactgcggttctcaactgtctcaagaacctggatctctggtgctttgatgtcttttccttgaaccaggcagcagatgaccatgccctgaggaccattgtttttgagttgctgactcggcataacctcatcagccgcttcaagattcccactgtgtttttgatgagtttcctggatgccttggagacaggctatgggaagtacaagaatccttaccacaaccagatccacgcagccgatgttacccagacagtccattgcttcttgctccgcacagggatggtgcactgcctgtcggagattgagctcctggccatcatctttgctgcagctatccatgattatgagcacacgggcactaccaacagcttccacatccagaccaagtcagaatgtgccatcgtgtacaatgatcgttcagtgctggagaatcaccacatcagctctgttttccgattgatgcaggatgatgagatgaacattttcatcaacctcaccaaggatgagtttgtagaactccgagccctggtcattgagatggtgttggccacagacatgtcctgccatttccagcaagtgaagaccatgaagacagccttgcaacagctggagaggattgacaagcccaaggccctgtctctactgctccatgctgctgacatcagccacccaaccaagcagtggttggtccacagccgttggaccaaggccctcatggaggaattcttccgtcagggtgacaaggaggcagagttgggcctgcccttttctccactctgtgaccgcacttccactctagtggcacagtctcagatagggttcatcgacttcattgtggagcccacattctctgtgctgactgacgtggcagagaagagtgttcagcccctggcggatgaggactccaagtctaaaaaccagcccagctttcagtggcgccagccctctctggatgtggaagtgggagaccccaaccctgatgtggtcagctttcgttccacctgggtcaagcgcattcaggagaacaagcagaaatggaaggaacgggcagcaagtggcatcaccaaccagatgtccattgacgagctgtccccctgtgaagaagaggcccccccatcccctgccgaagatgaacacaaccagaatgggaatctggattagccctggggctggcccaggtcttcattgagtccaaagtgtttgatgtcatcagcaccatccatcaggactggctcccccatctgctccaagggagcgtggtcgtggaagaaacaacccacctgaaggccaaatgccagagatttggggttggggaaagggcccctccccacctgacacccactggggtgcactttaatgttccggcagcaagactggggaacttcaggctcccagtggtcactgtgcccatccctcagcctctggattctcttcatggccaggtggctgccagggagcggggagcttcctggaggcttcccagggccttggggaagggtcagagatgccagccccctgggacctcccccatcctttttgcctccaagtttctaagcaatacattttgggggttccctcagccccccaccccagatcttagctggcaggtctgggtgccccttttcctcccctgggaagggctggaataggatagaaagctgggggttttcagagccctatgtgtggggaggggagtggattccttcagggcatggtacctttctaggatctgggaatggggtggagaggacatcctcttcaccccagaattgcgctgcttcagccccatctccagcctgatcctctgaatcttccttccctccctttctgatacagtgactggggcaaaaggagccattgtgaccaggggctgcgggaggcctttcctgggaccttccttgggactggtctgggcccctggggcttgtcgcctgccctgagtccggagccctttgcctccttcctctcccctggggctgggaggctccatccgaccaatgtctgtaaagtgctttgaggatctccccagcaaagcaccttcagaatgtatcgacaccagctgggttagggtcaagggtgcctggggagggtgagtaatcctgcattgctaaaagagagggtctgtcccctcctctccacgtcccagaactggcccagctgcaggcactaagaagctcctcccctgagacaagtgaggggtagtcggtgaaaggcagatggacaaggggctcagggctgctgccttcctgtcctctggagagaacccagccaggcgcggtgccccttcctctcctcaggctcctccttgcccccaccttgccccaggaaaggccaaagtccaggtgactgccctccttctttcttgtaaataccaaccatgcatttgtacagtgggccctgttcatgcgaaatccacatccatggtctcctagacctgctaccctggtacttccaccctaccccaccccgagaagggcagagacgcatgtgactcacccctgcccttggtttcccagacccctgctatagccagagaacaataaagaagggagaccaggaaaaaaaaa

SEQ ID NO: 62628 - DNA, 2030 bp, Homo sapiens
ggtagcggcagcagcagcggcggtgcggagagcttggactgggagcccaaagctcggctgggcagcgggagaggaggagccgcaggagctgcagctctgccagcttgggccgagcctagagacaccggcctggctggtccacgccagccgcagaccgtggctgagcatggagctgtccccccgcagtcctccggagatgctggaggagtcggattgcccgtcacccctggagctgaagtcagcccccagcaagaagatgtggattaagcttcggtctctgctgcgctacatggtgaagcagttggagaatggggagataaacattgaggagctgaagaaaaatctggagtacacagcttctctgctggaagccgtctacatagatgagacacggcaaatcttggacacggaggacgagctgcaggagctgcggtcagatgccgtgccttcggaggtgcgggactggctggcctccaccttcacccagcaggcccgggccaaaggccgccgagcagaggagaagcccaagttccgaagcattgtgcacgctgtgcaggctgggatcttcgtggaacggatgttccggagaacatacacctctgtgggccccacttactctactgcggttctcaactgtctcaagaacctggatctctggtgctttgatgtcttttccttgaaccaggcagcagatgaccatgccctgaggaccattgtttttgagttgctgactcggcataacctcatcagccgcttcaagattcccactgtgtttttgatgagtttcctggatgccttggagacaggctatgggaagtacaagaatccttaccacaaccagatccacgcagccgatgttacccagacagtccattgcttcttgctccgcacagggatggtgcactgcctgtcggagattgagctcctggccatcatctttgctgcagctatccatgattatgagcacacgggcactaccaacagcttccacatccagaccaagtcagaatgtgccatcgtgtacaatgatcgttcagtgctggagaatcaccacatcagctctgttttccgattgatgcaggatgatgagatgaacattttcatcaacctcaccaaggatgagtttgtagaactccgagccctggtcattgagatggtgttggccacagacatgtcctgccatttccagcaagtgaagaccatgaagacagccttgcaacagctggagaggattgacaagcccaaggccctgtctctactgctccatgctgctgacatcagccacccaaccaagcagtggttggtccacagccgttggaccaaggccctcatggaggaattcttccgtcagggtgacaaggaggcagagttgggcctgcccttttctccactctgtgaccgcacttccactctagtggcacagtctcagatagggttcatcgacttcattgtggagcccacattctctgtgctgactgacgtggcagagaagagtgttcagcccctggcggatgaggactccaagtctaaaaaccagcccagctttcagtggcgccagccctctctggatgtggaagtgggagaccccaaccctgatgtggtcagctttcgttccacctgggtcaagcgcattcaggagaacaagcagaaatggaaggaacgggcagcaagtggcatcaccaaccagatgtccattgacgagtgccttcctgtcctctggagagaacccagccaggcgcggtgccccttcctctcctcaggctcctccttgcccccaccttgccccaggaaaggccaaagtccaggtgactgccctccttctttcttgtaaataccaaccatgcatttgtacagtgggccctgttcatgcgaaatccacatccatggtctcctagacctgctaccctggtacttccaccctaccccaccccgagaagggcagagacgcatgtgactcacccctgcccttggtttcccagacccctgctatagccagagaacaataaagaagggagaccaggaaaaaaaaa

SEQ ID NO: 62629 - DNA, 3056 bp, Homo sapiens
aggaaggcaggggccaaagaggaagttgtcccctcttgggggccctggggctcctggggtcaggattttgatactctgaagcaggaaactttgattcccatggcaaaccctgttcctgttcagaggagccacctccagggccccattctcaggctgcgctacatggtgaagcagttggagaatggggagataaacattgaggagctgaagaaaaatctggagtacacagcttctctgctggaagccgtctacatagatgagacacggcaaatcttggacacggaggacgagctgcaggagctgcggtcagatgccgtgccttcggaggtgcgggactggctggcctccaccttcacccagcaggcccgggccaaaggccgccgagcagaggagaagcccaagttccgaagcattgtgcacgctgtgcaggctgggatcttcgtggaacggatgttccggagaacatacacctctgtgggccccacttactctactgcggttctcaactgtctcaagaacctggatctctggtgctttgatgtcttttccttgaaccaggcagcagatgaccatgccctgaggaccattgtttttgagttgctgactcggcataacctcatcagccgcttcaagattcccactgtgtttttgatgagtttcctggatgccttggagacaggctatgggaagtacaagaatccttaccacaaccagatccacgcagccgatgttacccagacagtccattgcttcttgctccgcacagggatggtgcactgcctgtcggagattgagctcctggccatcatctttgctgcagctatccatgattatgagcacacgggcactaccaacagcttccacatccagaccaagtcagaatgtgccatcgtgtacaatgatcgttcagtgctggagaatcaccacatcagctctgttttccgattgatgcaggatgatgagatgaacattttcatcaacctcaccaaggatgagtttgtagaactccgagccctggtcattgagatggtgttggccacagacatgtcctgccatttccagcaagtgaagaccatgaagacagccttgcaacagctggagaggattgacaagcccaaggccctgtctctactgctccatgctgctgacatcagccacccaaccaagcagtggttggtccacagccgttggaccaaggccctcatggaggaattcttccgtcagggtgacaaggaggcagagttgggcctgcccttttctccactctgtgaccgcacttccactctagtggcacagtctcagatagggttcatcgacttcattgtggagcccacattctctgtgctgactgacgtggcagagaagagtgttcagcccctggcggatgaggactccaagtctaaaaaccagcccagctttcagtggcgccagccctctctggatgtggaagtgggagaccccaaccctgatgtggtcagctttcgttccacctgggtcaagcgcattcaggagaacaagcagaaatggaaggaacgggcagcaagtggcatcaccaaccagatgtccattgacgagctgtccccctgtgaagaagaggcccccccatcccctgccgaagatgaacacaaccagaatgggaatctggattagccctggggctggcccaggtcttcattgagtccaaagtgtttgatgtcatcagcaccatccatcaggactggctcccccatctgctccaagggagcgtggtcgtggaagaaacaacccacctgaaggccaaatgccagagatttggggttggggaaagggcccctccccacctgacacccactggggtgcactttaatgttccggcagcaagactggggaacttcaggctcccagtggtcactgtgcccatccctcagcctctggattctcttcatggccaggtggctgccagggagcggggagcttcctggaggcttcccagggccttggggaagggtcagagatgccagccccctgggacctcccccatcctttttgcctccaagtttctaagcaatacattttgggggttccctcagccccccaccccagatcttagctggcaggtctgggtgccccttttcctcccctgggaagggctggaataggatagaaagctgggggttttcagagccctatgtgtggggaggggagtggattccttcagggcatggtacctttctaggatctgggaatggggtggagaggacatcctcttcaccccagaattgcgctgcttcagccccatctccagcctgatcctctgaatcttccttccctccctttctgatacagtgactggggcaaaaggagccattgtgaccaggggctgcgggaggcctttcctgggaccttccttgggactggtctgggcccctggggcttgtcgcctgccctgagtccggagccctttgcctccttcctctcccctggggctgggaggctccatccgaccaatgtctgtaaagtgctttgaggatctccccagcaaagcaccttcagaatgtatcgacaccagctgggttagggtcaagggtgcctggggagggtgagtaatcctgcattgctaaaagagagggtctgtcccctcctctccacgtcccagaactggcccagctgcaggcactaagaagctcctcccctgagacaagtgaggggtagtcggtgaaaggcagatggacaaggggctcagggctgctgccttcctgtcctctggagagaacccagccaggcgcggtgccccttcctctcctcaggctcctccttgcccccaccttgccccaggaaaggccaaagtccaggtgactgccctccttctttcttgtaaataccaaccatgcatttgtacagtgggccctgttcatgcgaaatccacatccatggtctcctagacctgctaccctggtacttccaccctaccccaccccgagaagggcagagacgcatgtgactcacccctgcccttggtttcccagacccctgctatagccagagaacaataaagaagggagaccaggaaaaaaaaa

SEQ ID NO: 62630 - DNA, 2474 bp, Homo sapiens
ggtagcggcagcagcagcggcggtgcggagagcttggactgggagcccaaagctcggctgggcagcgggagaggaggagccgcaggagctgcagctctgccagcttgggccgagcctagagacaccggcctggctggtccacgccagccgcagaccgtggctgagcatggagctgtccccccgcagtcctccggagatgctggaggagtcggattgcccgtcacccctggagctgaagtcagcccccagcaagaagatgtggattaagcttcggtctctgctgcgctacatggtgaagcagttggagaatggggagataaacattgaggagctgaagaaaaatctggagtacacagcttctctgctggaagccgtctacatagatgagacacggcaaatcttggacacggaggacgagctgcaggagctgcggtcagatgccgtgccttcggaggtgcgggactggctggcctccaccttcacccagcaggcccgggccaaaggccgccgagcagaggagaagcccaagttccgaagcattgtgcacgctgtgcaggctgggatcttcgtggaacggatgttccggagaacatacacctctgtgggccccacttactctactgcggttctcaactgtctcaagaacctggatctctggtgctttgatgtcttttccttgaaccaggcagcagatgaccatgccctgaggaccattgtttttgagttgctgactcggcataacctcatcagccgcttcaagattcccactgtgtttttgatgagtttcctggatgccttggagacaggctatgggaagtacaagaatccttaccacaaccagatccacgcagccgatgttacccagacagtccattgcttcttgctccgcacagggatggtgcactgcctgtcggagattgagctcctggccatcatctttgctgcagctatccatgattatgagcacacgggcactaccaacagcttccacatccagaccaagtcagaatgtgccatcgtgtacaatgatcgttcagtgctggagaatcaccacatcagctctgttttccgattgatgcaggatgatgagatgaacattttcatcaacctcaccaaggatgagtttgtagaactccgagccctggtcattgagatggtgttggccacagacatgtcctgccatttccagcaagtgaagaccatgaagacagccttgcaacagctggagaggattgacaagcccaaggccctgtctctactgctccatgctgctgacatcagccacccaaccaagcagtggttggtccacagccgttggaccaaggccctcatggaggaattcttccgtcagggtgacaaggaggcagagttgggcctgcccttttctccactctgtgaccgcacttccactctagtggcacagtctcagatagggttcatcgacttcattgtggagcccacattctctgtgctgactgacgtggcagagaagagtgttcagcccctggcggatgaggactccaagtctaaaaaccagcccagctttcagtggcgccagccctctctggatgtggaagtgggagaccccaaccctgatgtggtcagctttcgttccacctgggtcaagcgcattcaggagaacaagcagaaatggaaggaacgggcagcaagtggcatcaccaaccagatgtccattgacgagctgtccccctgtgaagaagaggcccccccatcccctgccgaagatgaacacaaccagaatgggaatctggattagccctggggctggcccaggtcttcattgagtccaaagtgtttgatgtcatcagcaccatccatcaggactggctcccccatctgctccaagggagcgtggtcgtggaagaaacaacccacctgaaggccaaatgccagagatttggggttggggaaagggcccctccccacctgacacccactggggtgcactttaatgttccggcagcaagactggggaacttcaggctcccagtggtcactgtgcccatccctcagcctctggattctcttcatggccaggtggctgccagggagcggggagcttcctggaggcttcccagggccttggggaagggtcagagatgccagccccctgggacctcccccatcctttttgcctccaagtttctaagcaatacattttgggggttccctcagccccccaccccagatcttagctggcaggtctgggtgccccttttcctcccctgggaagggctggaataggatagaaagctgggggttttcagagaggtatgtcagagtcgaggattaggatacatcggaccaaatgacggttccaggcctgctggatggcgctgaaaagaacctcaccatgagcacacaatggcacgatagcgacccccactcatcccgcatgctaatatgaatatctacctgcatccatatctgaaatagacatcggggggcgtctc

SEQ ID NO: 62631 - DNA, 1884 bp, Homo sapiens
gcggccgcgtcgaccggagagcgagatcaaagggattggaaacagactggggactggcggggggagggggccggccagcctgtggagtcctccctgagaagcggagggcccggcttccaccgtgactccagcggcctgcttggggttttaattattattttgaaatttctgaatcgagctagagcgagagagcgagagatctccgtagactgcgactcgctggctttcgctccgagatgatgcagagtgcgactgtccccgcggaaggggctgtcaaggggctcccggagatgctaggtgtgccgatgcaacagattccccagtgcgctggctgcaaccagcacatcctggacaagttcatcctgaaggtcctggacagacactggcacagctcctgcctcaagtgtgcagactgccagatgcagctggcggacaggtgcttctccagggctgggagcgtctactgcaaggaggacttcttcaagcgcttcggcacaaaatgcacggcctgccagcagggtatccccccaacccaggtggtccgcaaggcccaggactttgtctaccacctgcactgctttgcttgcatcatctgcaaccggcagctggccacgggggacgaattctacctcatggaggacgggcggctggtgtgcaaggaagactacgagacagccaagcagaacgatgactcagaggctggagctaagcggccccggaccaccatcacagccaagcagctggagacattaaagaatgcatacaagaactcccccaagcctgcccggcacgtgagggagcagctgtcctcagagacaggcctggacatgagggtcgtacaggtttggtttcagaacagaagggccaaagagaaacgcctgaagaaggatgcagggcggcaccgctgggggcagttctataagagcgtcaagaggagccggggcagcagcaagcaggagaaggagagctctgcagaggactgtggggttagtgacagtgagctgagcttccgagaggatcaaattctctcagaacttggccacaccaataggatttatggcaacgtgggggacgttacaggcggacagttaatgaatgggagcttctccatggacgggacaggacaatcctatcaggacttgagggatgggagcccctatggaatcccccagtctccatcctccatatcgtccctgccatcccacgctcctttgctcaatgggctggattacacggtggacagtaatttgggcatcattgcgcatgcagggcagggagtaagccagacgctgagagccatggctgggggacccacctctgacatctccacaggaagcagtgtaggctatcccgactttccaactagcccaggctcttggctcgatgaaatggatcatcctcctttttaaacttctctcctccccaccctacctgcccccctggcttgagagaatatcttcaaggatcaaaagagacttgccttttaaggatcgaaagtacgccaatgtgaatttccattattttcaatggaagtcctccgctgattcctagaaggctgtgagaccacactagggcattgtttccctggggaagcagtgggagagcagactcatctcagaacacagcacagggggtaatggcctagagctctagggacactggcttgttgggtctctcccctgctgttctgcttaggggcttggctgctcagtgctttggtagcacaaggtgactgtgataggcccccttggcctttgggaactttgctccaactggtgtgtctcacacaatgcctcccaaaacactgctctcaccagaactgagactcctaaggtagaggcctcacagcccttgagtaaaataaaagtgatttctggaccatcc

SEQ ID NO: 62632 - DNA, 1450 bp, Homo sapiens
ccgctttttgtgtctgagttctgtcgttgtgttgctctcgcatgttttcttgtctcctgctctttttctgttttggttctttgttctgccctccgcggttgttgcgttgtcttgctcgctctctcgcttgtttgtggcgtttcttctcctcctgtgtttggttcgttcttcgtactcctctctttggagtggtgctttctgtctcgtgttccccgcgctcgggcgcgctctctccagcttacccttgttttcttgccttgtttcctctttgtttttctcttccccgtttcttctttttgttttcttgttttagctgtttcttattgttggtccttttttcccgttacatatgctgtggtgtgggttcttatgtgtctctctctgcctgccggtgtgagatttgtgcgcgccccgcgccctcctcttttgttttctttttttttttgttttttttttttttttttttttctcttttttgtttttttttttttttttttttttttttttttttttttttttttttttttttttttttttttttttttttttctttgtccccagtgaagagcttattgaatacagacagaaaccaagtcctttgatattgaacctctcttccagatagaccagaaggattttgtacagatgtctaagagtggtcctcagcttccctgaccatatgggcctgcttgcttcccaatcaactaaaccaagccctttctcagcttgaaagctttcagggtaaatgttgtcagcatgtagtttccatttgtgatgtggagacatctgacccacccagccttaggcattcatcctcctcagtgtagccagagtattagtacacgagccacaagggaccaacgagctcaccaaacatttgtccatccttctgggacctgggaatttagtctttgcaggtgtttcttgtttttctccttggcctgggttggcctctggatatcaggctgccatattggtgtgtctgacccatgcttggctgcaaggcagctgccatccttgggcatctttcctggtcatgtgtgttccttttaaggatcgaaagtacgccaatgtgaatttccattattttcaatggaagtcctccgctgattcctagaaggctgtgagaccacactagggcattgtttccctggggaagcagtgggagagcagactcatctcagaacacagcacagggggtaatggcctagagctctagggacactggcttgttgggtctctcccctgctgttctgcttaggggcttggctgctcagtgctttggtagcacaaggtgactgtgataggcccccttggcctttgggaactttgctccaactggtgtgtctcacacaatgcctcccaaaacactgctctcaccagaactgagactcctaaggtagaggcctcacagcccttgagtaaaataaaagtgatttctggaccatcc

SEQ ID NO: 62633 - DNA, 1088 bp, Homo sapiens
ctgttgggtgcaggtgggtccctgggctgacctatcattggtttctctgggaataatttctcaaagactaaaactgctcacctctgttggagagagaaattctttcaagtggcaaagattccattagatccccttaatgaaattctttaagaaaaaagaaggttcatttgccttaatcaagtcaattctttgtccccagtgaagagcttattgaatacagacagaaaccaagtcctttgatattgaacctctcttccagatagaccagaaggattttgtacagatgtctaagagtggtcctcagcttccctgaccatatgggcctgcttgcttcccaatcaactaaaccaagccctttctcagcttgaaagctttcagggtaaatgttgtcagcatgtagtttccatttgtgatgtggagacatctgacccacccagccttaggcattcatcctcctcagtgtagccagagtattagtacacgagccacaagggaccaacgagctcaccaaacatttgtccatccttctgggacctgggaatttagtctttgcaggtgtttcttgtttttctccttggcctgggttggcctctggatatcaggctgccatattggtgtgtctgacccatgcttggctgcaaggcagctgccatccttgggcatctttcctggtcatgtgtgttccttttaaggatcgaaagtacgccaatgtgaatttccattattttcaatggaagtcctccgctgattcctagaaggctgtgagaccacactagggcattgtttccctggggaagcagtgggagagcagactcatctcagaacacagcacagggggtaatggcctagagctctagggacactggcttgttgggtctctcccctgctgttctgcttaggggcttggctgctcagtgctttggtagcacaaggtgactgtgataggcccccttggcctttgggaactttgctccaactggtgtgtctcacacaatgcctcccaaaacactgctctcaccagaactgagactcctaaggtagaggcctcacagcccttgagtaaaataaaagtgatttctggaccatcc

SEQ ID NO: 62634 - DNA, 826 bp, Homo sapiens
cccttaatgaaattctttaagaaaaaagaaggttcatttgccttaatcaagtcaattctttgtccccagtgaagagcttattgaatacagacagaaaccaagtcctttgatattgaacctctcttccagatagaccagaaggattttgtacagatgtctaagagtggtcctcagcttccctgaccatatgggcctgcttgcttcccaatcaactaaaccaagccctttctcagcttgaaagctttcagggtaaatgttgtcagcatgtagtttccatttgtgatgtggagacatctgacccacccagccttaggcattcatcctcctcagtgtagccagagtattagtacacgagccacaagggaccaacgagctcaccaaacatttgtccatccttctgggacctgggaatttagtctttgcaggtgtttcttgtttttctccttggcctgggttggcctctggatatcaggctgccatattggtgtgtctgacccatgcttggctgcaaggcagctgccatccttgggcatctttcctggtcatgtgtgttcctaggttgtgaagagcaggggaccatcagagtcctggcagctgacaataaatctccgttcttttgtccacagaggatcaaattctctcagaacttggccacaccaataggatttatggcaacgtgggggacgttacaggcggacagttaatgaatgggagcttctccatggacgggacaggacaatcctatcaggacttgagggatgggagcccctatggaatcccccagtctccatcctccatatcgtccctgccatcccacgctcctttg

SEQ ID NO: 62635 - DNA, 474 bp, Homo sapiens
agacagagttctgaggcccaccctggggaaaaaggggtggggccgcatcgcactccccaagacctgtgctcccattcaggcttcagtctgcttcccagccgcccgccctagggggtccctgggggctttgggtttgtggtggacgccccctgagtatgtcccttgtgcttgtgtggcaggtttggtttcagaacagaagggccaaagagaaacgcctgaagaaggatgcagggcggcaccgctgggggcagttctataagagcgtcaagaggagccggggcagcagcaagcaggagaaggagagctctgcagaggactgtggggttagtgacagtgagctgagcttccgaggtgagcagggctggaggggccagccgaggccttaggaaagtcccctgggaatctgtaatccctggcactcaggagggatctttcttgaggccttggcaactccctcctgaacacaggcttttc

SEQ ID NO: 62636 - DNA, 271 bp, Homo sapiens
agaagatttgcaggtctaataatttttaaagttgaatgcagttatttgttatgatgagccattttaaagtcaagttacaactatttctcacccaaagagaattggacacacttcggaaaattaggccataaggcagaattttctagggctgtggctcttgcctaaaaatgtcccagagtgtggggctacctacaaatcatgggcaataaccccttgtcctattaacatcattgattaggtcacctgcctatagatatacaacatctccagg

SEQ ID NO: 62637 - DNA, 399 bp, Homo sapiens
ggctatttttttaaattgaagtgagatttacgtaataaaattaactgtttgaaattgcacaattcagtggtatatattacattcacaatgttgtgcaacacctcctctacctaggtccaaaattttggggtccaaaataatgaccccaaaagaaaactccatcctcattagaagttgctcctcatttcttcctcttcccaacttctggcacccaccaatctgggttctgtctctagatttatctattctggatacttcatataaatggaatcataataggtgggtgttgggcatggcttccttcacttagcataatgtttttgaggttcatccattttgtagcatgtatcagtacttcctttcttcttatggctgaataatattccattgtatgtatat

SEQ ID NO: 62638 - DNA, 428 bp, Homo sapiens
cgtagaaataatttcaggatccagttagacttagtctgtgtgaccacaggggccaagagtcttccttgagatttctatacttaatgaaatgacactacggttattaacaacaacaacagtaatgatagtaactagcccttaatgagctgctatgttccaggcattgtgctcagtcctttacatgcattatttaatttaaagctcttgatagccttacaaggtcttattcctatttcaaagacaagaaaatgcagtgagagaggtaaagtgatttgtcagaggctgagccaagatgtgagccctggtctgtgtcccaccagagctcaggctaccccaccgcaccacactgcctcagatgtactttcttgagagagccctgttttaaactcctgccatcagtgaccactccaggagcctctgggcctcgc

SEQ ID NO: 62639 - DNA, 1189 bp, Homo sapiens
ggacttttctttttccgttatccagggaaatgcgtgagttactatgacagatgccaaagacttttggctctggtagtggaaattgggaggcaatggtgaaatgaagtaagaaattccagggccagaaggtggatgcaagtcagcaacggcttttcccaggagcttgctctttttggacagcataaaatagaggatgctgctataacatatgtaagtgaaaatgaagaaattaaacacgaagaaaaacctggaaaaagcatacatcattcaaaatcacatgttggaagaggacgtatatattatgctaaattcattaacacaaatgcaagaacatacaatgaaccatttccctacatagatcccaaaaaagggccagaaatacagggtgactggtggtcacatggtaaagcactggaacctgtcttcctaccaccttacgactctaagagcacccagaggagtgacttccaaaaaccatcgtgtccactggttttgccagtcaaacacagcaagatgcaaaagccttcttgtggaatagtaccacttgcctctcctggtacatcagcagaacttcaaaacaattttatagaatacatctcttttatacatcaatatgatgccagaaaaactccgaatgagcctctccagggaaagagacacggagcttttgtacagagagagataaaaccaggcagtaggccaacagttcctaaaggagcagaggtattactgaacactccagggtcacgttcatcagaacagtccaaaaaaacagagaaaggaaactcagcggaaagcagaatgatctcaccaggtctctgccaacaaaattctcaggagctgttagagcctaaaactcacttatcagaaacagacgtcagacaggcagccaaggcatgccccagcactcttgagagcagagaaaagacctcaggcgccactcaaacaactgtaggagatgctcttttcactacgcacaagcctttaaatccaccaattaaaaaatcagaataaattaccttcttcagataaaaatctaatccctggaatatagggaaatttcacaatcatcatcttggccctcacatttacttttctgttatcagtaacttcagaacatacaatttatgtaaatggaaaaagagaaaaaagacaattaaaatacaaccaaatgttattaataagagtg

SEQ ID NO: 62640 - DNA, 1015 bp, Homo sapiens
ggacttttctttttccgttatccagggaaatgcgtgagttactatgacagatgccaaagacttttggctctggtagtggaaattgggaggcaatggtgaaatgaagtaagaaattccagggccagaaggtggatgcaagtcagcaacggcttttcccaggagcttgctctttttggacagcataaaatagaggatgctgctataacatatggtgactggtggtcacatggtaaagcactggaacctgtcttcctaccaccttacgactctaagagcacccagaggagtgacttccaaaaaccatcgtgtccactggttttgccagtcaaacacagcaagatgcaaaagccttcttgtggaatagtaccacttgcctctcctggtacatcagcagaacttcaaaacaattttatagaatacatctcttttatacatcaatatgatgccagaaaaactccgaatgagcctctccagggaaagagacacggagcttttgtacagagagagataaaaccaggcagtaggccaacagttcctaaaggagcagaggtattactgaacactccagggtcacgttcatcagaacagtccaaaaaaacagagaaaggaaactcagcggaaagcagaatgatctcaccaggtctctgccaacaaaattctcaggagctgttagagcctaaaactcacttatcagaaacagacgtcagacaggcagccaaggcatgccccagcactcttgagagcagagaaaagacctcaggcgccactcaaacaactgtaggagatgctcttttcactacgcacaagcctttaaatccaccaattaaaaaatcagaataaattaccttcttcagataaaaatctaatccctggaatatagggaaatttcacaatcatcatcttggccctcacatttacttttctgttatcagtaacttcagaacatacaatttatgtaaatggaaaaagagaaaaaagacaattaaaatacaaccaaatgttattaataagagtg

SEQ ID NO: 62641 - DNA, 472 bp, Homo sapiens
aagaggacgtatatattatgctaaattcattaacacaaatgcaagaacatacaatgaaccatttccctacatagatcccaaaaaagggccagaaatacaggttggacagatgttcattgtatacaaatagagatttagattcagatgctgttttgcagaataatttggtcacagactataaaggatgagacacatctcagagtagtacttatcataatccaatagttaaaagcagtaacctgaaactattttgccagctgacttttacatataaacaatacggatacagggagggaatctaagtaattgtttccctagattgggtcagattattgccacaaagtagtgctttggggttactaaagaaatttcatgtatttacgatatatattctaatataaaaatgtcccatgatactcagtaattcacataccttctgtaaaataataatcatttattgaaagcatatgaa

SEQ ID NO: 62642 - DNA, 1050 bp, Homo sapiens
cgtagaggcccatggaggaaaaggaagataagcatcaacagcataaaatagaggatgctgctataacatatgtaagtgaaaatgaagaaattaaacacgaagaaaaacctggaaaaagcatacatcattcaaaatcacatgttggaagaggacgtatatattatgctaaattcattaacacaaatgcaagaacatacaatgaaccatttccctacatagatcccaaaaaagggccagaaatacagggtgactggtggtcacatggtaaagcactggaacctgtcttcctaccaccttacgactctaagagcacccagaggagtgacttccaaaaaccatcgtgtccactggttttgccagtcaaacacagcaagatgcaaaagccttcttgtggaatagtaccacttgcctctcctggtacatcagcagaacttcaaaacaattttatagaatacatctcttttatacatcaatatgatgccagaaaaactccgaatgagcctctccagggaaagagacacggagcttttgtacagagagagataaaaccaggcagtaggccaacagttcctaaaggagcagaggtattactgaacactccagggtcacgttcatcagaacagtccaaaaaaacagagaaaggaaactcagcggaaagcagaatgatctcaccaggtctctgccaacaaaattctcaggagctgttagagcctaaaactcacttatcagaaacagacgtcagacaggcagccaaggcatgccccagcactcttgagagcagagaaaagacctcaggcgccactcaaacaactgtaggagatgctcttttcactacgcacaagcctttaaatccaccaattaaaaaatcagaataaattaccttcttcagataaaaatctaatccctggaatatagggaaatttcacaatcatcatcttggccctcacatttacttttctgttatcagtaacttcagaacatacaatttatgtaaatggaaaaagagaaaaaagacaattaaaatacaaccaaatgttattaataagagtg

SEQ ID NO: 62643 - DNA, 425 bp, Homo sapiens
gaattactaagttgaagattatgatttattttttctcccttgacaacaattgcttacatgtacaatgactggatttgctgggcatttgttgcttgttaataaaaggctaaataattatcttaaaacattttaataacttacattgtcaacaggaatatataaatatatctgtttcattgtaatttactagcactgggttttatcattttaatctgttttcttccaattaataggtatgaggtgatagcttatatctgttttcatttgtatacatttataaagttgaccatttcttgaaactttttacaaatctttatatattccagagagtcgcatgttcataatgagcagggttaccttcatatattcatattaacttctctaataataaatataatactttttccatatataataaatctttt

SEQ ID NO: 62644 - DNA, 574 bp, Homo sapiens
atgatgtgctgccagaatttctaagtttccagttctttggggagctcaagattttggaatagctgggataaaaagagaaatctctttcaagctgagtgaaaagcccactctagctctcctgaagagacaggaagagaaaagtggggcagagaacccatcggcaaagctctgggcttggggcacagggtctctgtgacatcctgggcaccttcactgtggccagtgaggaggaagttctgccccagccggcctgcggggactatggggcaagggaggagctcttcctctagaaatacagcagcctcacccttgtggggtagctgtttcaggcaccagaaggactcagcccatggactccggccacctggggcttggtttcctcaatgcagcatttcaatgcctgagcaggtgccccgagcttaacagttcatgactcctgatgacaacaaggaaggattgctccacattttgtccaaggcgatcatcaagttggggaaagcataggtactggaattttcagattcataaagccataggcttgtagagttggaaaatacctcagtattcacaaatt

SEQ ID NO: 62645 - DNA, 2817 bp, Homo sapiens
agcgggtccagcctcggcgcccgggaccgagcgcgtcgctcgccgccgcggagcgcgtagccggagcgcctggggaaggcggagatgaagaccacgccgccgcgcgccgggagctgctgagcctaccgccgccagagtccagttgacacttactttgacaaaggcaaatttggaagcaattacttgaggacagttcatatagcatctggacagtcaacacgggcaccatgaagcacttcctgagaatgttgatccaggtatgcctgtatttttactgtaaatttctgtggcgctgcctgaaatttgtaatgaggaagctaactggaagatgtgaactacaacggatctgttataataccaagccgggagcttctagaaccatgaaaatcgaaacatcactgagggattctaaaagtaagctgttgcagacttctgtgagtgttcaccccgacgctattgaaaaaactatagaagatatcatggaactgaaaaaaattaatcctgacgtaaatccacagctgggaatctctcttcaggcttgccttctgcaaatcgttgggtacaggaaccttattgcagatgtggaaaaactgcgtagagaggcctatgattctgataatccccaacatgaagaaatgcttttgaagttatggaaattcttgaagcccaatactccactggaatctcggatttctaagcagtggtgtgaaattggtttccaaggtgatgatcctaaaacagactttcgaggaatgggacttctgggactgtacaatttgcagtatttcgcggaaagggatgccacagcagctcagcaggtcctgtctgactctcttcatccgaaatgcagggatatcactaaagaagaaataagcaaattcagcaaagcagaatgggagaagaaaaggatggataaggcaattgggtactcatttgcaattgtgggcatcaatataactgacctggcatataatctactggtcagcggagctctaaaaacccatttctacaatatcgccccagaagctccaacattgtctcactttcagcaaacattctgctatttgatgcatgaatttcataagttttggatcgaagaggaccccatggacataatggaatttaatcgtgtgagggagaaattccgcaagaggatcatcaaacagctgcagaacccagacatggcgctgtgcccacattttgctgcctcggaaggtttaatcaacatgtagttgcccacgccggttttaatggataccctggaacactgcctcattgtcttgttagatctctgcttaggtcgcagctcacgcattgaatgcacacagtgattgtatgcatgccttttggtacagtgttttcatctcttggtcataattccgagatccccagagaccactgtttctggagtatctgtcatccagtgactgctcatattgtggcattatgcagtgttacatcttgccttgatacccaggtatggagagagttttctatttttttagactttttttcctctccctcataattcagcattaaagaattgtatttctctagctgtattttgtatgtaagaggtttagctgaatctcattctgtgaaagccttttaatttattgaaatgtttcatgactactgctgctagctcttcaagccaggttcatgcttggacctcattctgataaagtataagactttaaaataatacaaaacagggccgggcgcagtggctcacacctgtaatcccagcactttggggagctgaggcgggcggatcacgaggtcaagagatcgagaccatcctggccaacatggtgaaaccccgtctctactaaaaataacaaaaattagctgggcgtggtggtgggtgcctgtaatcccagctactcgggaggctgaggcaggagaatcgcttgaacccgggaggtggaggttacagtgagccgagatcataccactgcactccagcctggcgacagagcaagactccatctcaaaaataaataaataaataaataaataaataaataaataaataaataaataaaatagtacagacagacacatgataagccaaactgttcctgcaaacatagctatgcttcatgaggcttacaagaagtaactttaggtaggagctgtttttgtttgaagtactgcaaaattatattgtaacttcccctcaccccagttgcaattgtgtcatagtcatctgtatatcaaactattttattcccataacttcattggcttggatgcctaagtgtatgatgcttgaagcctcagaaaagaaataagcatatttcaaaagctgcaaaaggtttttcactgcctgcctcttgcggaactgggttacaccctggcactgttctgatccaagcatatttgcttggggaactaagtgctgactagtttgttttctatgtcaaggggcaatattaaaaaacaatttgcaagaaaatgtgtttcaagagagcaacctaagctaagtcactctgcgatatttcttgaaaataacgaccttgtcttgtatcagtggaagaagtaagttgcttagaaagggaaaagtcaaattgttccagaactgctaaaaatcattttaaaaaccatgatttagtttggaattatgattgtagtctgttgaatagtatttaccatggcatttcatacccatggtattttataccttctgactatcaattttagtattattagatgtttgtgtaaccacttgcttatttaaatgaattttgagtactgcctaattgtcagttatatgaataaattacatgtcattctactgtaacgtatattgga

SEQ ID NO: 62646 - DNA, 239 bp, Homo sapiens
ccccccatcgtgaaaatgtcaaatttattagaattcaagtacgctaaatcaattgttgcttttaacttaagtcttcatatagaagcttaagcaaatgtttgaagcctctatcccagtagatactgattaagcctctggtgttaatgaaaaggaaagtgattaaaacatgttttccagctgttgcagacttctgtgagtgttcaccccgacgctattgaaaaaactatagaagatatcat

SEQ ID NO: 62647 - DNA, 2305 bp, Homo sapiens
ttatggtgtactcagtggctgctacctaaattgtcgttacctaaatggctgttacctaaatggctgttacctaaatggctgttacctaaatggctgttttaggataatccccaacatgaagaaatgcttttgaagttatggaaattcttgaagcccaatactccactggaatctcggatttctaagcagtggtgtgaaattggtttccaaggtgatgatcctaaaacagactttcgaggaatgggacttctgggactgtacaatttgcagtatttcgcggaaagggatgccacagcagctcagcaggtcctgtctgactctcttcatccgaaatgcagggatatcactaaagaagaaataagcaaattcagcaaagcagaatgggagaagaaaaggatggataaggcaattgggtactcatttgcaattgtgggcatcaatataactgacctggcatataatctactggtcagcggagctctaaaaacccatttctacaatatcgccccagaagctccaacattgtctcactttcagcaaacattctgctatttgatgcatgaatttcataagttttggatcgaagaggaccccatggacataatggaatttaatcgtgtgagggagaaattccgcaagaggatcatcaaacagctgcagaacccagacatggcgctgtgcccacattttgctgcctcggaaggtttaatcaacatgtagttgcccacgccggttttaatggataccctggaacactgcctcattgtcttgttagatctctgcttaggtcgcagctcacgcattgaatgcacacagtgattgtatgcatgccttttggtacagtgttttcatctcttggtcataattccgagatccccagagaccactgtttctggagtatctgtcatccagtgactgctcatattgtggcattatgcagtgttacatcttgccttgatacccaggtatggagagagttttctatttttttagactttttttcctctccctcataattcagcattaaagaattgtatttctctagctgtattttgtatgtaagaggtttagctgaatctcattctgtgaaagccttttaatttattgaaatgtttcatgactactgctgctagctcttcaagccaggttcatgcttggacctcattctgataaagtataagactttaaaataatacaaaacagggccgggcgcagtggctcacacctgtaatcccagcactttggggagctgaggcgggcggatcacgaggtcaagagatcgagaccatcctggccaacatggtgaaaccccgtctctactaaaaataacaaaaattagctgggcgtggtggtgggtgcctgtaatcccagctactcgggaggctgaggcaggagaatcgcttgaacccgggaggtggaggttacagtgagccgagatcataccactgcactccagcctggcgacagagcaagactccatctcaaaaataaataaataaataaataaataaataaataaataaataaataaataaaatagtacagacagacacatgataagccaaactgttcctgcaaacatagctatgcttcatgaggcttacaagaagtaactttaggtaggagctgtttttgtttgaagtactgcaaaattatattgtaacttcccctcaccccagttgcaattgtgtcatagtcatctgtatatcaaactattttattcccataacttcattggcttggatgcctaagtgtatgatgcttgaagcctcagaaaagaaataagcatatttcaaaagctgcaaaaggtttttcactgcctgcctcttgcggaactgggttacaccctggcactgttctgatccaagcatatttgcttggggaactaagtgctgactagtttgttttctatgtcaaggggcaatattaaaaaacaatttgcaagaaaatgtgtttcaagagagcaacctaagctaagtcactctgcgatatttcttgaaaataacgaccttgtcttgtatcagtggaagaagtaagttgcttagaaagggaaaagtcaaattgttccagaactgctaaaaatcattttaaaaaccatgatttagtttggaattatgattgtagtctgttgaatagtatttaccatggcatttcatacccatggtattttataccttctgactatcaattttagtattattagatgtttgtgtaaccacttgcttatttaaatgaattttgagtactgcctaattgtcagttatatgaataaattacatgtcattctactgtaacgtatattgga

SEQ ID NO: 62648 - DNA, 583 bp, Homo sapiens
agcgcagaaactctgcttacaggctgcactcgccccgactcctctccagacgtgggatcccatgttatacttggagtgaatctggtcgctcgctccccgtccccgattcccactttgcttgcctcttctccccatccatctaccccacacgcattttccagaaatctccccaactcgacgcccactcaggctactgaaccccaataacgccacccttttactaagaggagcctccgtcgtcccaaccccttgctccgagcgggaagcttggtgcagcgcaccaaggtccggtagaggggggcggcgccccctgcgccgtgggccagcaggccgcggacgcgcagacagcaagtggaccccaagggctggagccgcaacgcaagttccccctgactgggggacgccgcccagctcctggagcctgcgaaggctcttgaagctgagcttcccagggataccagaagggacactctcgtgcaattccggctagggaaagcgagggaaggtggcggctccgggcagggagcgagcgagtgctccacgccgcccgcaggatcgagtgagtcacgcggccgccagacga

SEQ ID NO: 62649 - DNA, 528 bp, Homo sapiens
aaaggaacgatgtggacctgacctcaaagaaatccattggagaatatgacagatttagatttattgatcaactttacttttcctatacagatgggaaaacagcctgcaaaaatgttaagtagcttcctcaggatcaagtactattggagccagcattggtggtcaatcctgtatagaaatgacttcagttgtagatctgtgaccttccttacttaccttcctctaccaaagtgggtcaaccaaaaccgcatggcgtactactctctgaagcctctactaccctgctcctccgtgttgacatgtggtcaggcaagccaggacttactcacatcagctacatcagttactgggatggagaaaattgaagcctagaaagatcaagaaactttctccaggccataaatagaggaatcaggattcaaatcagatagaccccagggcttgttctcttcaacaccacattaccctacattattattcaattattaaataaaaccttgcattagtggcatttccaaatgcataaca

SEQ ID NO: 62650 - DNA, 317 bp, Homo sapiens
gtgaaaccttatagatcccagcaggttttctgccaagagagtcagatgcaatttttaaaaacattttacttgtgggcaaaaatcccataacagcagctaggccttgaccccttctggttgactcttttcacaaataagtgtttgataatcacctttcgtggtaaaatatttgatttattttatgtcagttctttggagggcccttaaaaaaaactgcaaaagcattcactagcagctttagggaaggggaggaaagaacaggaagaattatgaacacacacccttagaatcgttatcatattaaacctgtgttcctt

SEQ ID NO: 62651 - DNA, 169 bp, Homo sapiens
cctcatggtgggtcgcctgacctatgagcagagatggaaggaagaatgccaatttggaggcagatgtgggaagtaggagtgctgtggcaacacggtgtggaaatagggagttctcttcaggcgtgatgctcacagtttacataaatctattgatctatgtatttacctg

SEQ ID NO: 62652 - DNA, 123 bp, Homo sapiens
cttcattagcatgctgacttgagactgaaactggcctccttgggaaattaggctgctatttctctcgcctgatttcttgggaagtcagataacaactcagtgttggtttgctgagcacgggtg

SEQ ID NO: 62653 - DNA, 2588 bp, Homo sapiens
acagtctgcattgagcttggctcaggaaagaagggaaatccaggcggggcctgttgggcccaggtcttgagctcttttggctccagagttcccagcacagtcatggatcaaaactcagtgcctgaaaaggctcagaatgaggcagacaccaataacgcagataggttctttcgctctcactcatcacccccacaccacaggccaggccacagcagagctctccaccattacgagttgcaccatcacggcgtgccccaccaacgtggtgaatctcaccaccctccggagttccaagacttccacgaccaagccttgtcctcccatgtccaccaatctcaccaccacagcgaggcacggaatcacggcagagcccatggccccacaggctttggtctggctccctctcaaggcgccgtcccctcccaccgttcctacggtgaggactaccatgatgagctccaacgtgatggcaggaggcatcatgatgggtcccaatacggtgggttccatcagcagagtgactcccattaccatagggggtctcaccatggcagaccccaatatctcggtgagaatttatcccactattcctctggcgtgccccaccacggtgaggcttcccaccatggtgggtcctacctcccccatggacccaatccctacagtgagtccttccaccacagcgaggcttcccaccttagcgggctccaacacgatgagtcccagcatcaccaagtcccccaccgtggctggccccaccatcaccaagtccaccaccatggcaggtcccgtcatcatgaagcccaccagcatggaaagtctcctcatcacggagagaccatttcccctcattcctctgtggggtcctaccagcgtgggatatctgactatcacagcgagtaccaccaaggtgatcaccaccccagtgagtaccaccatggcgaccatccccaccacacacagcaccactaccaccagacccaccggcaccgagactaccatcagcaccaagaccaccacggcgcgtatcattccagttacctccatggcgactacgtccagagcacttcccaactctctatcccacacacatcccggagcctgattcacgatgcccccggccctgctgcttctcgtacaggagtcttcccctatcacgtagcacacccacggggctcggctcacagcatgactcggtcctccagcacaatccgctcacgtgtcacccagatgtccaaaaaagtccatacccaggatatctccaccaaacattcagaagactggggcaaagaagaagggcaatttcagaaacgcaaaaccggcaggctccagcggacccgcaagaagggacactctaccaatctcttccagtggctgtgggaaaagctaaccttcctcattcagggcttccgggaaatgatccggaacctgacccaatccttggcctttgaaactttcatcttcttcgttgtctgcctcaacaccgtcatgctggtggcccagaccttcgctgaagtcgagatccggggcgagtggtacttcatggccttggactccatattcttctgcatctacgtggtggaagccctgctcaagatcatcgccctgggcctctcgtacttctttgacttctggaacaatttggacttcttcattatggccatggccgtgctggacttcttgctgatgcagacccactccttcgccatctaccaccaaagcctcttccggatcctcaaggtcttcaagagcctgcgggccctgagggcaatccgggtcctgcggaggctcagcttcctgaccagcgtccaggaagtgacagggaccctgggccagtccttgccgtccatcgcagccatcctcatcctcatgtttacctgcctcttcctcttctccgcggtcctccgggcactgttccgcaaatctgaccccaagcgcttccagaacatcttcaccaccatcttcaccctcttcaccttgctcacgctggatgactggtccctcatctacatggacagccgtgcccagggcgcctggtacatcattcccatcctcataatttacatcatcatccagtacttcatcttcctcaacctggtgattactgtcctggtggatagcttccagacggcgctgttcaaaggccttgagaaagcgaagcaggagagggccgcccggatccaagagaagctgctggaagactcactgacggagctcagagctgcagagcccaaagaggtggcgagtgaaggcaccatgctgaagcggctcatcgagaaaaagtttgggaccatgactgagaagcagcaggagctcctgttccattacctgcagctggtggcaagcgtggagcaggagcagcagaagttccgctcccaggcagccgtcatcgatgagattgtggacaccacatttgaggctggagaagaggacttcaggaattgaccccaggaggacaccagatacagacttcagcccctggcagtctgcccacctgggtgcactgggacgggtccccagatctgctggaatgattgtccggggctgcagagcaggggccccaacagagtttttaaaccccaaaaagc

SEQ ID NO: 62654 - DNA, 402 bp, Homo sapiens
aaatgttgatatttttaaaaaatctgtcgtgaaaaatgccatggtaaagtggtcttctttttaatgatttacaagcctttaacttataacccaaaacacagttgcttatttctttatagactcatgtgttctgaagataagtgaaacttttaaatgatttgagaggtttaggtagcatgcctgttgatatggtttggctctgtggccccacccaaatctcaccttgaattgtaataatccccatgtgtcaagggtggggccaggtggagataattggatcatgggggtggtttccctcaagctgttctcgtggtagtgaatacatctacgagatctgacggttttataaaggagagttcccctgcacatgctctcttgtctgccaccatggaagacatgact

SEQ ID NO: 62655 - DNA, 1007 bp, Homo sapiens
gaacatgattatttcataatttaaaaaataggagccacggggttagtgaataagctgttacgtgtcataatgaaccctcctgtttgtgtaacgaatcccatttacagtagtctgtaggcagacattgtgaagaaactagtagttctttctttctcctatatgcacctataggccggcagaaatatctagccctgaaaagtgaaatgaagcatgctttctgaatggttcatcatttactgtttccttccagtgaatggaagattttaacacaaaggagagtttgcaggcagatgttgagaagaagctagtagaagcttccaccttgttaatctttatgtatttatttagttatcaagtcatttgtcttgatattagttcatttaattatttaaatgaattaatgcctgtaatgtaggcagaagaaaaaaattcaattttaccattaactaaacataattttggaaacgctgagggatttcccagaacccaaagccagcctcttggctcctagtggccccgagcagccctggtgccctgcaaacccacccaccagctgccccacagaggatctcttctctcaaggagagggccattgttactcctccccaccagggaggcactggggatccttgattagggtttgggggagcaggaggaggtcccattgaggacacacaccagacttgtgctgagtaggggcttgggccacatgcagcactctcatgagatttgccaattcaccaaagcaaacccagatcaacactttgttgctctaatagggtgttgtgaccttcttcttctaattgttgaatatttaactgatgttaaaaatggtgattattgttgtaagcaatgaaaacacaataggcatataaatgggatatgtttgtatgtcagattaaatataacctataaatatgtctccccagccctgctctctaagagagaactctgttcacaattgagtctcctcctgctagtatttccccgtactcttagtaccactc

SEQ ID NO: 62656 - DNA, 539 bp, Homo sapiens
ataagttgcaagacatcatgacacttcactcctaaatactttagcatgcacctaacaataacaatattctcccataaaaccacaataccacaatcacacaagaaataagcattaaaagtccgtctttaagggaagatttggccactggggttccactgggcctggccaaccgcatgttctgtctaccactggcccagcatccaaggcctccctggagaggccagccctgagcaccactggttaggcaatcggttagttagttggaagacttatcagggtatgaatgtacactcaaggccagatatgagactcccaacaagacccagactgcaaaaggcagagtggaccccgtgaggctgtcgatggagtctcagggcccatcccaggtgaggagggcaccctgaagccatttccatgacttgctttgtgaacatttctgagaaaactcagcttcctgattctctcttcctctccccctcccataggacatccttcattctccaccataaagttttcaacaactccctcctctggatacg

SEQ ID NO: 62657 - DNA, 1023 bp, Homo sapiens
gagggagacaatactagctatatttcttgaaaaaaatgttagcgggctaggtaacagaaaacatcaaaataagacagactttccaaaccagtcaggctgtgttagataaatcccgtagctacaaaacttaaagcacaggagaatagcacagaatccagcccttctccaagacaaaatggagcaaaagggctgaaccatacatgttcagggctgtcttctaaactcaatctaccacactccctttcgggggaaagaagagtaaaagaacagggagcaattcaaatgaaacttcttccacctctgagagatggattaaattctccgttagcattttttgttttctttggcttcctttgtttcttcaaaccatagtcagccacaatgtgctgttttcatgaacgatactggccagcctggaagcacagacctgcttccaccttgatgaagctgcttcctgcatagcagacattgcttctgtggatggatcttcctgatgccacttcaatgcagtgttgattttgttacatggtcctgaaatgtgctaaaatggttcataagtatctcccagaccactctgcaccaaagactgaatgtcctgttttccacctacatgctgtcaaggtgcaccagccaataagctcatctcctcttcagtgggtcgaaaatgaatgttaaaggtgtgcctgttaaaactgaaagaccaaagaaattaaagttgaaaactaattttcttactcttgtggttagatgatttattgctcaagacttttaaaaacaaactctccaagcccctccccaaattccagtgttgtattttgcttagccttttcccgaaggattccccacgcagggttgttctgggttgggggtctgtcttcctgcagctgaagtcagacctgaattgcagggcaatgtgtgtcattcttttcaaattcagaagatgaaatcagtgagtctctgttcattctcaattttaagcaggacaaacaatgaaacaagaaggataacccaactggccctgta

SEQ ID NO: 62658 - DNA, 737 bp, Homo sapiens
gagggagacaatactagctatatttcttgaaaaaaatgttagcgggctaggtaacagaaaacatcaaaataagacagactttccaaaccagtcaggctgtgttagataaatcccgtagctacaaaacttaaagcacaggagaatagcacagaatccagcccttctccaagacaaaatggagcaaaagggctgaaccatacatgttcagggctgtcttctaaactcaatctaccacactccctttcgggggaaagaagagtaaaagaacagggagcaattcaaatgaaacttcttccacctctgagagatggattaaattctccgttagcattttttgttttctttggcttcctttgtttcttcaaaccatagtcagccacaatgtgctgttttcatgaacgatactggccagcctggaagcacagacctgcttccaccttgatgaagctgcttcctgcatagcagacattgcttctgtggatggatcttcctgatgccacttcaatgcagtgttgattttgttacatggtcctgaaatgtgctaaaatggttcataagtatctcccagaccactctgcaccaaagactgaatgtcctgttttccacctacatgctgtcaaggtgcaccagccaataagctcatctcctcttcagtgggtcgaaaatgaatgttaaaggtgtgcctgttaaaacgacaaggggggaaggtaagaataggaaagaaacaaaaaaaaaaa

SEQ ID NO: 62659 - DNA, 1654 bp, Homo sapiens
atcagcaagagatatgctgctgttagcatgttctcaggatggaacaaaaaaaatgggtaactcatttagtaaagaaaatccctaagaatccaccatctggttttgttcgtgcttcccctcgaacgctttctacaagatccactgcaaatcagtctttccggaaagtggtcaaaaatacatctggaaaaactagttaaccatgtgactgagtgccctgtggaatcgtgtgggatgctacctgataaaccaggcttctttaaccatgcagagcagacaggctgtttctttgacacaaatatcacaggcttcagggttaagattgctgtttttctgtccttgctttggcacaacacactgagggttttttttattgcgggtttgcctacaggtagattagattaattattactatgtaatgcaagtacagttgggggaaagcttaggtagatatattttttttaaaaggtgctgcctttttggatttataagaaaatgcctgtcagtcgtgatagaacagagttttcctcatatgagtaagaggaagggactttcactttcaagtggaacagccatcactatcaagatcagctcatggaaggagtaaagaaaatatctcaaaatgagacaaactgaagttttgttttttttttaatgacttaagtttttgtgctcttgcaagactatacaaaactattttaagaaagcagtgatatcacttgaacttcagtgccctcactgtagaatttaaaagccttactgttgattgcccatgttggacttgatggagaaattaaatatctttcattatgctttacaaaatactgtatatgtttcagcaagtttggggaatgggagaggacaaaaaaaagttacatttaatctatgcatttttgccaagccatattgagttattttactactagagacattaggaaactaactgtacaaaagaaccaagtttaaaagcattttgtggggtacatcatttctataattgtataatgtatttctttgtggttttaaatgataaagacattaagttaacaaacatataagaaatgtatgcactgtttgaaatgtaaattattcttagaacactttcaatgggggttgcattgtccttttagtgccttaatttgagataattattttactgccatgagtaagtatagaaatttcaaaaaatgtattttcaaaaaattatgtgtgtcagtgagtttttcattgataattggtttaatttaaaatatttagaggtttgttggactttcataaattgagtacaatctttgcatcaaactacctgctacaataatgactttataaaactgcaaaaaatgtagaaggttgcaccaacataaaaaggaaatatggcaatacatccatgatgttttccagttaacataggaattaccagataaatactgttaaactcttgtccagtaacaagagttgattcatatggacagtatgatttattgtttatttttttaaccaaatacctcctcagtaatttataatggctttgcagtaatgtgtatcagataagaagcactggaaaaccgatcgtctctaggatgatatgcatgtttcaagtggtattgaaagccgcactgatggatatgtaataataaacatatctgttattaatata

SEQ ID NO: 62660 - DNA, 1846 bp, Homo sapiens
atcagcaagagatatgctgctgttagcatgttctcaggatggaacaaaaaaaatgggtaactcatttagtaaagaaaatccctaagaatccaccatctggttttgttcgtgcttcccctcgaacgctttctacaagatccactgcaaatcagtctttccggaaagtggtcaaaaatacatctggaaaaactagttaaccatgtgactgagtgccctgtggaatcgtgtgggatgctacctgataaaccaggcttctttaaccatgcagagcagacaggctgtttctttgacacaaatatcacaggcttcagggttaagattgctgtttttctgtccttgctttggcacaacacactgagggttttttttattgcgggtttgcctacaggtagattagattaattattactatgtaatgcaagtacagttgggggaaagcttaggtagatatattttttttaaaaggtgctgcctttttggatttataagaaaatgcctgtcagtcgtgatagaacagagttttcctcatatgagtaagaggaagggactttcactttcaagtggaacagccatcactatcaagatcagctcatggaaggagtaaagaaaatatctcaaaatgagacaaactgaagttttgttttttttttaatgacttaagtttttgtgctcttgcaagactatacaaaactattttaagaaagcagtgatatcacttgaacttcagtgccctcactgtagaatttaaaagccttactgttgattgcccatgttggacttgatggagaaattaaatatctttcattatgctttacaaaatactgtatatgtttcagcaagtttggggaatgggagaggacaaaaaaaagttacatttaatctatgcatttttgccaagccatattgagttattttactactagagacattaggaaactaactgtacaaaagaaccaagtttaaaagcattttgtggggtacatcatttctataattgtataatgtatttctttgtggttttaaatgataaagacattaagttaacaaacatataagaaatgtatgcactgtttgaaatgtaaattattcttagaacactttcaatgggggttgcattgtccttttagtgccttaatttgagataattattttactgccatgagtaagtatagaaatttcaaaaaatgtattttcaaaaaattatgtgtgtcagtgagtttttcattgataattggtttaatttaaaatatttagaggtttgttggactttcataaattgagtacaatctttgcatcaaactacctgctacaataatgactttataaaactgcaaaaaatgtagaaggttgcaccaacataaaaaggaaatatggcaatacatccatgatgttttccagttaacataggaattaccagataaatactgttaaactcttgtccagtaacaagagttgattcatatggacagtatgatttattgtttatttttttaaccaaatacctcctcagtaatttataatggctttgcagtaatgtgtatcagataagaagcactggaaaaccgatcgtctctaggatgatatgcatgtttcaagtggtattgaaagccgcactgatggatatgtaataataaacatatctgttattaatatactaatgactctgtgctcatttaatgagaaataaaagtaatttatggatggatatctttaatttttactgcaatgtgttttctcatggctgaaatgaatggaaaacatacttcaaattagtctctgattgtatataaatgtttgtgaaattccatggttagattaaagtgtatttttaaaagataaaaaaagg

SEQ ID NO: 62661 - DNA, 1397 bp, Homo sapiens
atcagcaagagatatgctgctgttagcatgttctcaggatggaacaaaaaaaatgggtaactcatttagtaaagaaaatccctaagaatccaccatctggttttgttcgtgcttcccctcgaacgctttctacaagatccactgcaaatcagtctttccggaaagtggtcaaaaatacatctggaaaaactagttaaccatgtgactgagtgccctgtggaatcgtgtgggatgctacctgataaaccaggcttctttaaccatgcagagcagacaggctgtttctttgacacaaatatcacaggcttcagggttaagattgctgtttttctgtccttgctttggcacaacacactgagggttttttttattgcgggtttgcctacaggtagattagattaattattactatgtaatgcaagtacagttgggggaaagcttaggtagatatattttttttaaaaggtgctgcctttttggatttataagaaaatgcctgtcagtcgtgatagaacagagttttcctcatatgagtaagaggaagggactttcactttcaagtggaacagccatcactatcaagatcagctcatggaaggagtaaagaaaatatctcaaaatgagacaaactgaagttttgttttttttttaatgacttaagtttttgtgctcttgcaagactatacaaaactattttaagaaagcagtgatatcacttgaacttcagtgccctcactgtagaatttaaaagccttactgttgattgcccatgttggacttgatggagaaattaaatatctttcattatgctttacaaaatactgtatatgtttcagcaagtttggggaatgggagaggacaaaaaaaagttacatttaatctatgcatttttgccaagccatattgagttattttactactagagacattaggaaactaactgtacaaaagaaccaagtttaaaagcattttgtggggtacatcatttctataattgtataatgtatttctttgtggttttaaatgataaagacattaagttaacaaacatataagaaatgtatgcactgtttgaaatgtaaattattcttagaacactttcaatgggggttgcattgtccttttagtgccttaatttgagataattattttactgccatgagtaagtatagaaatttcaaaaaatgtattttcaaaaaattatgtgtgtcagtgagtttttcattgataattggtttaatttaaaatatttagaggtttgttggactttcataaattgagtacaatctttgcatcaaactacctgctacaataatgactttataaaactgcaaaaaatgtcgcatgatgcacttcaatttcaagtaaatatgcttttgcattgttcccgttttccg

SEQ ID NO: 62662 - DNA, 1799 bp, Homo sapiens
atcagcaagagatatgctgctgttagcatgttctcaggatggaacaaaaaaaatgggtaactcatttagtaaagaaaatccctaagaatccaccatctggttttgttcgtgcttcccctcgaacgctttctacaagatccactgcaaatcagtctttccggaaagtggtcaaaaatacatctggaaaaactagttaaccatgtgactgagtgccctgtggaatcgtgtgggatgctacctgataaaccaggcttctttaaccatgcagagcagacaggctgtttctttgacacaaatatcacaggcttcagggttaagattgctgtttttctgtccttgctttggcacaacacactgagggttttttttattgcgggtttgcctacaggtagattagattaattattactatgtaatgcaagtacagttgggggaaagcttaggtagatatattttttttaaaaggtgctgcctttttggatttataagaaaatgcctgtcagtcgtgatagaacagagttttcctcatatgagtaagaggaagggactttcactttcaagtggaacagccatcactatcaagatcagctcatggaaggagtaaagaaaatatctcaaaatgagacaaactgaagttttgttttttttttaatgacttaagtttttgtgctcttgcaagactatacaaaactattttaagaaagcagtgatatcacttgaacttcagtgccctcactgtagaatttaaaagccttactgttgattgcccatgttggacttgatggagaaattaaatatctttcattatgctttacaaaatactgtatatgtttcagcaagtttggggaatgggagaggacaaaaaaaagttacatttaatctatgcatttttgccaagccatattgagttattttactactagagacattaggaaactaactgtacaaaagaaccaagtttaaaagcattttgtggggtacatcatttctataattgtataatgtatttctttgtggttttaaatgataaagacattaagttaacaaacatataagaaatgtatgcactgtttgaaatgtaaattattcttagaacactttcaatgggggttgcattgtccttttagtgccttaatttgagataattattttactgccatgagtaagtatagaaatttcaaaaaatgtattttcaaaaaattatgtgtgtcagtgagtttttcattgataattggtttaatttaaaatatttagaggtttgttggactttcataaattgagtacaatctttgcatcaaactacctgctacaataatgactttataaaactgcaaaaaatgtagaaggttgcaccaacataaaaaggaaatatggcaatacatccatgatgttttccagttaacataggaattaccagataaatactgttaaactcttgtccagtaacaagagttgattcatatggacagtatgatttattgtttatttttttaaccaaatacctcctcagtaatttataatggctttgcagtaatgtgtatcagataagaagcactggaaaaccgatcgtctctaggatgatatgcatgtttcaagtggtattgaaagccgcactgatggatatgtaataataaacatatctgttattaatataaaaaaaaaaaaaaaaataaaaaaaaaaaaaaacaataaaaactaaaaatactatctatccctcttcctattctcctccctttttctccttctttttccctctcttcttactctccctctctttatactccattctcctactatcc

SEQ ID NO: 62663 - DNA, 524 bp, Homo sapiens
ggattccggcacgaggagttgttgttggttgggggccttttggccggtgacggagactgcccaggtgtggtcaccatgttcctctccgcggtcttctttgccaagagcaagtcaaaaaacattctggtgagaatggtgagcgaagctgggacaggtttctgcttcaacaccaagagaaaccgactgcgggaaaaactgactcttttgcattatgatccagttgtgaaacaaagagtcctcttcgtggaaaagaaaaaaatacgctccctttaaacggtggattgaaaatgactttgatttataaagagaagactgagggcggggatactgattcagaaatcctgtagcgtgtaataaaagaagaggaaatggcatggaatcactgcctcctgtgatttgaaggccattgtgaaggaaaacaatgcagtgaaagaaagttcttcatattaggacagatatcattgcatcacatttatttatctttctgggtatttttatagcccttaataaaaaatattaaaata

SEQ ID NO: 62664 - DNA, 371 bp, Homo sapiens
  misc_feature (3)..(3): n is a, c, g, or t
gcngccgcctactactactaaattcgcggccgcgtcgacccgcggtcttctttgccaagagcaagtcaaatgaaacaaagagtcctcttcgtggaaaagaaaaaaatacgctccctttaaacggtggattgaaaatgactttgatttataaagagaagactgagggcggggatactgattcagaaatcctgtagcgtgtaataaaagaagaggaaatggcatggaatcactgcctcctgtgatttgaaggccattgtgaaggaaaacaatgcagtgaaagaaagttcttcatattaggacagatatcattgcatcacatttatttatctttctgggtatttttatagcccttaataaaaaatattaaaata

SEQ ID NO: 62665 - DNA, 562 bp, Homo sapiens
tgaatatttcttcattggttgaatatgacttgtggcataccaaggatgctgctgattagctagtggccctatagccattttctccagtctgccctggctcctgggatggaggaactgagtttgcaaatcagctccatcttcatatcaaggaatagtaaaataagagaaaggtgagggcttatggtctgatatgtattttttataaaaatggcgatgatacttaataattttctgccacaatttttttttctccctccatagtgaaacaaagagtcctcttcgtggaaaagaaaaaaatacgctccctttaaacggtggattgaaaatgactttgatttataaagagaagactgagggcggggatactgattcagaaatcctgtagcgtgtaataaaagaagaggaaatggcatggaatcactgcctcctgtgatttgaaggccattgtgaaggaaaacaatgcagtgaaagaaagttcttcatattaggacagatatcattgcatcacatttatttatctttctgggtatttttatagcccttaataaaaaatattaaaata

SEQ ID NO: 62666 - DNA, 873 bp, Homo sapiens
gtcgagttttagggggccgtgagcagcagggccccgtaatgatgcgtggaaggatgtgcgaacaggacgggaagctgcagctgcgtacttttccaggccttcaggaccacagcgtccggccatgcgcccgcggcgcctccctgcgcggacctgtgggtgcctgagaaggggtctgcggtgtctggattcaattgccgtcctcacggaccgttgagtctggctgtggggcgtttttctccagcccgtgttaggagaatctttgtccgaaggacctcagaatttgcagcccacctatttcgaactctaaaaataaggaaaccgctcccgagaggggcaatgaattgcctgagtaatgcggcagggcagttaaagaagtcctcgggctcccgagtcagtgctcttctttacccttggctgacttcccagttagatttagtatctggttttcaccacatgtgatggttgttgtaatttgcaaaggttaaacttgtcaaacaagaagcttgctgcagcgcgaatacttgcaccttagaagagggaaaaaatggagcagttgccaagagcaagtcaaatgaaacaaagagtcctcttcgtggaaaagaaaaaaatacgctccctttaaacggtggattgaaaatgactttgatttataaagagaagactgagggcggggatactgattcagaaatcctgtagcgtgtaataaaagaagaggaaatggcatggaatcactgcctcctgtgatttgaaggccattgtgaaggaaaacaatgcagtgaaagaaagttcttcatattaggacagatatcattgcatcacatttatttatctttctgggtatttttatagcccttaataaaaaatattaaaata

SEQ ID NO: 62667 - DNA, 718 bp, Homo sapiens
  misc_feature (3)..(3): n is a, c, g, or t
gcngccgcctactactactaaattcgcggccgcgtcgacttggccggtgacggagactgcccaggtgtggtcaccatgttcctctccgcggtcttctttgccaagagcaagtcaaatgaaacaaagagtcctcttcgtggaaaagaaaaaaatacgctccctttaaacggtggattgaaaatgactttgatttataaagagaagactgagggcggggatactgattcagaaatcctgtagcgtgtaataaaagaagaggaaatggcatggaatcactgcctcctgtgatttgaaggccattgtgaaggaaaacaatgcagtgaaagaaagttcttcatattaggacagatatcattgcatcacatttatttatctttctgggtatttttatagcccttaataaaaaatattaaaataaacaaaaaaaaattgaataggcagcattgggtagttaggaaaatcgaaagaaggcttgaatatttgttaaggccatgaatgtttttgggtcaaggattgtcaagacctaggggtgggacaacaattgcttgacagaaacaaaatctttttgggccctttctgccaaacattttttaaacctggaacatttttttctggggccccaaaattgggcccttttgggccaaatgccccttaagggggcggattaaaaaaaaactgggcccggtttaccacggcctggggccctgggggtcccctt

SEQ ID NO: 62668 - DNA, 363 bp, Homo sapiens
gacgaggactctttgtttcatttgaaacgaagaggactcttctttgccaagagcaagtcaaatgaaacaaagagtcctcttcgtggaaaagaaaaaaatacgctccctttaaacggtggattgaaaatgactttgatttataaagagaagactgagggcggggatactgattcagaaatcctgtagcgtgtaataaaagaagaggaaatggcatggaatcactgcctcctgtgatttgaaggccattgtgaaggaaaacaatgcagtgaaagaaagttcttcatattaggacagatatcattgcatcacatttatttatctttctgggtatttttatagcccttaataaaaaatattaaaata

SEQ ID NO: 62669 - DNA, 340 bp, Homo sapiens
atctgccaggagggggcctcccgccagtatctgatgaagtgaaacaaagagtcctcttcgtggaaaagaaaaaaatacgctccctttaaacggtggattgaaaatgactttgatttataaagagaagactgagggcggggatactgattcagaaatcctgtagcgtgtaataaaagaagaggaaatggcatggaatcactgcctcctgtgatttgaaggccattgtgaaggaaaacaatgcagtgaaagaaagttcttcatattaggacagatatcattgcatcacatttatttatctttctgggtatttttatagcccttaataaaaaatattaaaata

SEQ ID NO: 62670 - DNA, 498 bp, Homo sapiens
  misc_feature (435)..(435): n is a, c, g, or t
  misc_feature (460)..(460): n is a, c, g, or t
  misc_feature (463)..(464): n is a, c, g, or t
  misc_feature (470)..(471): n is a, c, g, or t
  misc_feature (473)..(473): n is a, c, g, or t
  misc_feature (488)..(488): n is a, c, g, or t
  misc_feature (490)..(490): n is a, c, g, or t
  misc_feature (492)..(492): n is a, c, g, or t
gtgtaataaaagaagaggaaatggcatggaatcgctccctttaaacggtggattgaaaatgactttgatttataaagagaagactgagggcggggatactgattcagaaatcctgtagcgtgtaataaaagaagaggaaatggcatggaatcactgcctcctgtgatttgaaggccattgtgaaggaaaacaatgcagtgaaagaaagttcttcatattaggacagatatcattgcatcacatttatttatctttctgggtatttttatagcccttaataaaaaatattaaaataaaaaaaaaaaaaaaaaaaaaaaaaaaaaaaaaaaaaaaaaaaaaaaaaaaaaaaaaaaaaaaaaaaaaaaaaaaaaaaaaaaaaaaaaaaaaaaaaaaaaaaaaaaaaaaaaaaaaaaaaaaaaaaaaaaaaaaaaaaanaaaaaaaaaacaaaacggggggggngcnngccacnncnccggggggggccgcncncncccacc

SEQ ID NO: 62671 - DNA, 544 bp, Homo sapiens
ggattccggcacgaggagttgttgttggttgggggccttttggccggtgacggagactgcccaggtgtggtcaccatgttcctctccgcggtcttctttgccaagagcaagtcaaaaaacattctggtgagaatggtgagcgaagctgggacaggtttctgcttcaacaccaagagaaaccgactgcgggaaaaactgactcttttgcattatgatccagttgtgaaacaaagagtcctcttcgtggaaaagaaaaaaatacgctccctttaaacggtggattgaaaatgactttgatttataaagagaagactgagggcggggatactgattcagaaatcctgtagcgtgtaataaaagaagaggaaatggcatggaatcactgcctcctgtgatttgaaggccattgtgaaggaaaacaatgcagtgaaagaaagttcttcatattaggacagatatcattgcatcacatttatttatctttctgggtatttttatagcccttaataaaaaatattaaaataagcctgtgctattgtgtctt

SEQ ID NO: 62672 - DNA, 400 bp, Homo sapiens
gatggctcatcttgactttttccttacttacaaatggagagccccaaagtccaaatccttggaccagctatcccccaacttcctccttaggggcagaagtgaaacaaagagtcctcttcgtggaaaagaaaaaaatacgctccctttaaacggtggattgaaaatgactttgatttataaagagaagactgagggcggggatactgattcagaaatcctgtagcgtgtaataaaagaagaggaaatggcatggaatcactgcctcctgtgatttgaaggccattgtgaaggaaaacaatgcagtgaaagaaagttcttcatattaggacagatatcattgcatcacatttatttatctttctgggtatttttatagcccttaataaaaaatattaaaata

SEQ ID NO: 62673 - DNA, 470 bp, Homo sapiens
ggattccggcacgaggagttgttgttggttgggggccttttggccggtgacggagactgcccaggtgtggtcaccatgttcctctccgcggtcttctttgccaagagcaagtcaaaaaacattctggtgagaatggtgagcgaagctgggacaggtttctgcttcaacaccaagagaaaccgactgcgggaaaaactgactcttttgcattatgatccagttgtgaaacaaagagtcctcttcgtggaaaagaaaaaaatacgctccctttaaacggtggattgaaaatgactttgatttataaagagaagactgagggcggggatactgattcagaaatcctgtagcgtgtaataaaagaagaggaaatggcatggaatcactgcctcctgtgatttgaaggccattgtgaaggaatttatttatctttctgggtatttttatagcccttaataaaaaatattaaaata

SEQ ID NO: 62674 - DNA, 520 bp, Homo sapiens
  misc_feature (457)..(457): n is a, c, g, or t
  misc_feature (482)..(482): n is a, c, g, or t
  misc_feature (485)..(486): n is a, c, g, or t
  misc_feature (492)..(493): n is a, c, g, or t
  misc_feature (495)..(495): n is a, c, g, or t
  misc_feature (510)..(510): n is a, c, g, or t
  misc_feature (512)..(512): n is a, c, g, or t
  misc_feature (514)..(514): n is a, c, g, or t
ggattccggcacgaggagttgttgttggttgggggccttttggccggtgacggagactgcccaggtgtggtcaccatgttcctcttgaaacaaagagtcctcttcgtggaaaagaaaaaaatacgctccctttaaacggtggattgaaaatgactttgatttataaagagaagactgagggcggggatactgattcagaaatcctgtagcgtgtaataaaagaagaggaaatggcatggaatcactgcctcctgtgatttgaaggccattgtgaaggaaaacaatgcagtgaaagaaagttcttcatattaggacagatatcattgcatcacatttatttatctttctgggtatttttatagcccttaataaaaaatattaaaataaaaaaaaaaaaaaaaaaaaaaaaaaaaaaaaaaaaaaaaaaaaaaaaaaaaaaaaaaaaaaaaaaaaaaanaaaaaaaaaacaaaacggggggggngcnngccacnncnccggggggggccgcncncncccacc

SEQ ID NO: 62675 - DNA, 658 bp, Homo sapiens
  misc_feature (595)..(595): n is a, c, g, or t
  misc_feature (620)..(620): n is a, c, g, or t
  misc_feature (623)..(624): n is a, c, g, or t
  misc_feature (630)..(631): n is a, c, g, or t
  misc_feature (633)..(633): n is a, c, g, or t
  misc_feature (648)..(648): n is a, c, g, or t
  misc_feature (650)..(650): n is a, c, g, or t
  misc_feature (652)..(652): n is a, c, g, or t
ggattccggcacgaggagttgttgttggttgggggccttttggccggtgacggagactgcccaggtgtggtcaccatgttcctctccgcggtcttctttgccaagagcaagtcaaaaaacattctggtgagaatggtgagcgaagctgggacaggtttctgcttcaacaccaagagaaaccgactgcgggaaaaactgactcttttgcattatgatccagttgtgaaacaaagagtcctcttcgtggaaaagaaaaaaatacgctccctttaaacggtggattgaaaatgactttgatttataaagagaagactgagggcggggatactgattcagaaatcctgtagcgtgtaataaaagaagaggaaatggcatggaatcactgcctcctgtgatttgaaggccattgtgaaggaaaacaatgcagtgaaagaaagttcttcatattaggacagatatcattgcatcacatttatttatctttctgggtatttttatagcccttaataaaaaatattaaaataaaaaaaaaaaaaaaaaaaaaaaaaaaaaaaaaaaaaaaaaaaaaaaaaaaaaaaaaaaaaaaaaaaaaaanaaaaaaaaaacaaaacggggggggngcnngccacnncnccggggggggccgcncncncccacc

SEQ ID NO: 62676 - DNA, 417 bp, Homo sapiens
ggattccggcacgaggagttgttgttggttgggggccttttggccggtgacggagactgcccaggtgtggtcaccatgttcctctccgcggtcttctttgccaagagcaagtcaaatgaaacaaagagtcctcttcgtggaaaagaaaaaaatacgctccctttaaacggtggattgaaaatgactttgatttataaagagaagactgagggcggggatactgattcagaaatcctgtagcgtgtaataaaagaagaggaaatggcatggaatcactgcctcctgtgatttgaaggccattgtgaaggaaaacaatgcagtgaaagaaagttcttcatattaggacagatatcattgcatcacatttatttatctttctgggtatttttatagcccttaataaaaaatattaaaata

SEQ ID NO: 62677 - DNA, 551 bp, Homo sapiens
  misc_feature (488)..(488): n is a, c, g, or t
  misc_feature (513)..(513): n is a, c, g, or t
  misc_feature (516)..(517): n is a, c, g, or t
  misc_feature (523)..(524): n is a, c, g, or t
  misc_feature (526)..(526): n is a, c, g, or t
  misc_feature (541)..(541): n is a, c, g, or t
  misc_feature (543)..(543): n is a, c, g, or t
  misc_feature (545)..(545): n is a, c, g, or t
ggattccggcacgaggagttgttgttggttgggggccttttggccggtgacggagactgcccaggtgtggtcaccatgttcctctccgcggtcttctttgccaagagcaagtcaaatgaaacaaagagtcctcttcgtggaaaagaaaaaaatacgctccctttaaacggtggattgaaaatgactttgatttataaagagaagactgagggcggggatactgattcagaaatcctgtagcgtgtaataaaagaagaggaaatggcatggaatcactgcctcctgtgatttgaaggccattgtgaaggaaaacaatgcagtgaaagaaagttcttcatattaggacagatatcattgcatcacatttatttatctttctgggtatttttatagcccttaataaaaaatattaaaataaaaaaaaaaaaaaaaaaaaaaaaaaaaaaaaaaaaaaaaaaaaaaaaaaaaaaaaaaaaaaaaaaaaaaanaaaaaaaaaacaaaacggggggggngcnngccacnncnccggggggggccgcncncncccacc

SEQ ID NO: 62678 - DNA, 470 bp, Homo sapiens
ggattccggcacgaggagttgttgttggttgggggccttttggccggtgacggagactgcccaggtgtggtcaccatgttcctctccgcggtcttctttgccaagagcaagtcaaatgaaacaaagagtcctcttcgtggaaaagaaaaaaatacgctccctttaaacggtggattgaaaatgactttgatttataaagagaagactgagggcggggatactgattcagaaatcctgtagcgtgtaataaaagaagaggaaatggcatggaatcactgcctcctgtgatttgaaggccattgtgaaggaaaacaatgcagtgaaagaaagttcttcatattaggacagatatcattgcatcacatttatttatctttctgggtatttttatagcccttaataaaaaatattaaaatatgagcaacaaaaacaaatgtaaaaaaacaatctcgagggggggcccgggaccc

SEQ ID NO: 62679 - DNA, 321 bp, Homo sapiens
agctcatcagctatcatttgtgttagtgtattttatgtatggcccaagacaattcttctttttccagtgtggcccagggaagccaaaagattggatacccctgacaggattccaggattcttttgtaatttctcagaggccctctgtgcatactccgtaaggactatccacattctttattactttcattggcaataggtataaaattttatttgttggatattttactgaaatgttacttgtttttgcttatttactgattggtgggaggaagtcaaaggatgaataaatctaacctttttaaaagaaaaggctaaaata

SEQ ID NO: 62680 - DNA, 695 bp, Homo sapiens
agtgagagagaaggcagtctagaatgatgcccagatttctttcttgaagcagtgggttggtggaacaggaacagtagtaagagtgggagcatatgaggagtttgttctgatacgtatttagttggaaatgtctgtggggccttgtacctgactaaggccttttcctcagtcagatgcttgttcaagattctctccctgaactgttttgttattaaccatcctcctccatgccttcccagtttctcagggctggccctttgattggaatatataaatggccactcttgaaattgtggctgctatcctcccctttctctctatcttcattctgcaaccccagaaccagccttagtttctgtcttggccaccaaaagaatcttaagtctcagtccacaaagggaagagaagaaataggctgcctgtttttccgagcaccgttgaagtaccaggcaagggcttttgatacagagtccttagtaccatgaatttcctccagtagaaatcactttagagaagagctaatccctccatttatcccttattttatagataagaaaacagaattcttaagaagggaagaggatgtattcactcagtattaaatgttattttctttgctttatccaggttctatgtcaatgggcccaggattctgaaacatagtccatgttgtcataaaggccacagcctagttg

SEQ ID NO: 62681 - DNA, 616 bp, Homo sapiens
ggatctgctataggtagtatcttagcctgttctgaccctagggagaatcagactcctttggtctatgacagtaatagaagttatttctttagataaattttgtttaaggctttaaattaattctatcttggcattgtgtggttctagattcattcattcatttaacaaaacttacttgagtatccgctctctgccaagcacagtggtaaatgatgagtattacattaactccaatcaatccaatattcttctgtagtaagaacatctggcccagttaccctgctgtcctctgcgttgcacacaccccccgccaggctcatccctgtatcctccttggaggaaagtgccaggctggtgctacttggccctgcctgggtcacacgcctgcctcgggatgtggaggatggtcagcccagccacagcacatggattgctatgtgaaggatgatgttccacaagaaaaccaggacggcttcaccagggaggcaagagcagcagatgcccatgacagagggtgtatactctgaataaaagaatttggaattgctggatcatatggtaattctgcatttaactttttaaggaactggcaaactggtttccacagagctgtaac

SEQ ID NO: 62682 - DNA, 1529 bp, Homo sapiens
taatgttctattgtgtgcatatgccacatttggtttatccattcatcagttgatgcacatttcggttgttcccacctttgggctattatgaataatgttgctgtgaacactggtatacaaatatctgagtggaattgctggatcatatggtaattctgcatttaactttttaaggaactgccaaactgttttccacagagctgtaacattttacatccaaaccagcaataggacctggataaaaggtggctaaggcacagttaaataaaatactgttagttactgcccatttgcattgggtttctagtggcaaataatctagccgtgtccttgactggatctcccaatgattcttttcagtcatttgaatgagtatggtggtggtgacactggcaggaggctggagggtactttaattaacacgcgaacacacacaaatccattgcaccccactaagccgcccaaacacacatgaaacacaaaaactatccttgctagggaaacacagccctggaacaaaccccctggaccccttgtcaccaccagcccatcctgtaagaaaatgatggttgaagctgcagtgacagaattggagagatgctctgttagacaagtctgtcagctgaaaggggcagaaaccattgttgaactgcttatatgagaggaagacctgggtggcacaggcctggctggacgcagggctcacagagcgtcatcagcacttcatctcttcccctgcgggacctgctgtcctctgcgttgcacacaccccccgccaggctcatccctgtatcctccttggaggaaagtgccaggctggtgctacttggccctgcctgggtcacacgcctgcctcgggatgtggaggatggtcagcccagccacagcacatggattgctatgtgaaggatgatgttccacaagaaaaccaggacggcttcaccagggaggcaagagcagcagatgcccatgacagagggtgtatactctgaataaaagaatttggatttttaaaaagagacaggaagaaaaggacttccaaactctagaaagtttaaaactagtagaatgaaacatattgtgtataaatgtaaagctctttgttgagattaaatatacgtatcagttaaattttatttaaacatatatatacacatatacacacacacacatacatatatatgacccaagtacaggataaagatgaaattaataagtactctttaaaaatcttagttttggggctgggcgcggtggctcacgcctctaatccaagcactttgggaggccaaggcgggcggatcacctgagatcggtagttcgagaccagcctgaccaacgtggagaaaccctgtctctactaaaaatacaaagaattagccggacgtggtggcgcatgcctgtaatcccagctactcgggaggctgaggcaggagaatcgcttgaacccgggaggcggagatcgcagtgagccaagatggtgccatgtcactccagcctaggcaacaagagcaaaactccatctcaaa

SEQ ID NO: 62683 - DNA, 1497 bp, Homo sapiens
atggataaaccaaatgtggcatatgcacaccatggaacattactccacctgctgtggagttcacgctgctgtgaacactggtatacaaatatctgagtggaattgctggatcatatggtaattctgcatttaactttttaaggaactgccaaactgttttccacagagctgtaacattttacatccaaaccagcaataggacctggataaaaggtggctaaggcacagttaaataaaatactgttagttactgcccatttgcattgggtttctagtggcaaataatctagccgtgtccttgactggatctcccaatgattcttttcagtcatttgaatgagtatggtggtggtgacactggcaggaggctggagggtactttaattaacacgcgaacacacacaaatccattgcaccccactaagccgcccaaacacacatgaaacacaaaaactatccttgctagggaaacacagccctggaacaaaccccctggaccccttgtcaccaccagcccatcctgtaagaaaatgatggttgaagctgcagtgacagaattggagagatgctctgttagacaagtctgtcagctgaaaggggcagaaaccattgttgaactgcttatatgagaggaagacctgggtggcacaggcctggctggacgcagggctcacagagcgtcatcagcacttcatctcttcccctgcgggacctgctgtcctctgcgttgcacacaccccccgccaggctcatccctgtatcctccttggaggaaagtgccaggctggtgctacttggccctgcctgggtcacacgcctgcctcgggatgtggaggatggtcagcccagccacagcacatggattgctatgtgaaggatgatgttccacaagaaaaccaggacggcttcaccagggaggcaagagcagcagatgcccatgacagagggtgtatactctgaataaaagaatttggatttttaaaaagagacaggaagaaaaggacttccaaactctagaaagtttaaaactagtagaatgaaacatattgtgtataaatgtaaagctctttgttgagattaaatatacgtatcagttaaattttatttaaacatatatatacacatatacacacacacacatacatatatatgacccaagtacaggataaagatgaaattaataagtactctttaaaaatcttagttttggggctgggcgcggtggctcacgcctctaatccaagcactttgggaggccaaggcgggcggatcacctgagatcggtagttcgagaccagcctgaccaacgtggagaaaccctgtctctactaaaaatacaaagaattagccggacgtggtggcgcatgcctgtaatcccagctactcgggaggctgaggcaggagaatcgcttgaacccgggaggcggagatcgcagtgagccaagatggtgccatgtcactccagcctaggcaacaagagcaaaactccatctcaaa

SEQ ID NO: 62684 - DNA, 229 bp, Homo sapiens
ctttcaatctgtcaagaaagcttgttggttgtaccttcaaaatagaacagagtgggcaacatagcgagaccctgtctctacaaaaaaaaaaaaaaaaaattaccctggtgtgttggcgtgtacctatagttccaggtactctggaggctgaggccaggagttacgttacagtgagccatcatcaggccactgcactccagcttgggctggacagagtgacacgtgttcc

SEQ ID NO: 62685 - DNA, 400 bp, Homo sapiens
ccttgttgcttttcccttctttgtggccccacatgttctagcctaggaatctgcttattctaaaggccatttggcgtaattattttttgaccccaacatcctttagcaattatttgtctgtaaaaatcacccttccctgtattcactatttttatttattatggataaagagatagtgtggtggctcacatctataatcccaaagtgctgggattgcaggcgtgacgactgtgcctggcggaagtgcccccttctatctaaggccaaggcaggcggatcacaaggtcaggagatccagaccatcctggctaacacagtgaaaccccgtctctattaaaaatacaaaaaaattagccgggtgtggtggcgggcgctgtagtcccagctactcgagaggctg

SEQ ID NO: 62686 - DNA, 406 bp, Homo sapiens
gccctgttatagggtacagtgggagccaaaagcatcatttaggtctcatatttgcgaaaccttttaagcctgaatgtaataatgaagaagtaatcagacacatccagatggtggggtactctataaaacaggtgctctgtaatcttcaaaaatgccagtatcttaagaagtgaaggaaggctgagaaatttttccagatgataggagactaaggacacgtaacaacaaaacacaatatgagatcccagtttgcatcctggattagaggaaagaaccttattgtgagctactcggcagactgaggcaggagaatcgctcgaaccctggaggcggaggttgcagtgagtgatatgtatatatatcactacaacctcgaactcctggctccttaacgtaccaggctcaa

SEQ ID NO: 62687 - DNA, 2926 bp, Homo sapiens
aagtaattgtccgtgtcaggaaggtaggcgtgccaagccgcggctctgcggagaaaccacgaccaccgcggccgccggaaacccaaagcgctccagagcgtccccgggtggccgggcagcaccagggacagcgcccgggactccactggggaccggctcctgggcttcccagcgtcgcgggtagaggtacagctgctccgtgtgccgcaggctccagattctcgccaccccacccctccctcagaaactcggactgctctcgtctgccgtgtggttctcttttcttccgaaaggccagtgtcttatctctccacttcaagtccagaggacttgctcagtctcctccccttaagtcatttccaccatcctcaggcagctgtgggaagccgagagtcctggactgttcgtccgggtgccagcgctggcagtcccagtccgtccggtgcagcagcccggcgcattcccctctctccctccctcttgctctccctccctttctgtcttcctctctttcctcctctactgctccctccctctcttgcctcttaagtttcctgcaccgtgaatccaactgtgccaagccttggctcccgcgaaccaatcctgagcgcgacccgggcactgggacggcgactccgccaaagctggacgaggcagccggacccgtctgcgctcgagcatggagacggagcgcctgggagggcacgtccggggcgctggagacgccaggcccgagtagcttctccatggagcctgcccagagcggtcccttctcgcaggattcgccccaagtcctgtgcggctgctgagagcgctccttgctctgtaaagtggatgtcaggtggatctatgtttctgaaggaacaaagactcaaagaaggcaccgccaaggaagtttgagacgcgggagaatgcaggctgcgtgctggtacgtgcttttcctcctgcagcccaccgtctacttggtcacatgtgccaatttaacgaacggtggaaagtcagaacttctgaaatcaggaagcagcaaatccacactaaagcacatatggacagaaagcagcaaagacttgtctatcagccgactcctgtcacagacttttcgtggcaaagagaatgatacagatttggacctgagatatgacaccccagaaccttattctgagcaagacctctgggactggctgaggaactccacagaccttcaagagcctcggcccagggccaagagaaggcccattgttaaaacgggcaagtttaagaaaatgtttggatggggcgattttcattccaacatcaaaacagtgaagctgaacctgttgataactgggaaaattgtagatcatggcaatgggacatttagtgtttatttcaggcataattcaactggtcaagggaatgtatctgtcagcttggtaccccctacaaaaatcgtggaatttgacttggcacaacaaaccgtgattgatgccaaagattccaagtcttttaattgtcgcattgaatatgaaaaggttgacaaggctaccaagaacacactctgcaactatgacccttcaaaaacctgttaccaggagcaaacccaaagtcatgtatcctggctctgctccaagccctttaaggtgatctgtatttacatttccttttatagtacagattataaactggtacagaaagtgtgccctgactacaactaccacagtgacacaccttactttccctcgggatgaaggtgaacatgggggtgagactgaagcctgaggaattaaaggtcatatgacagggctgttacctcaaagaagaaggtcacatctgttgcctggaatgtgtctacactgctgctcttgtcaactggctgcaaaatacactagtggaaaacactctgatgtaatttctgcccagtcagcttcatccctcagtataattgtaaatcatcacagattttgaagtcacacctgaagacatgctctcacatatagaggtacacaaacacaccgtcatgcacatttcagcttgcgtctatcatgattcctgttgagagggctttcattgtctgactcataatggttcaggatcaactatcatcaaacggaaggattaactagacagagaatgtttctaacagttgctgttatggaaatctcttttaaagtcttgagtacatgctaatcaataatctccactcatgcattcctactgcttggagtagctgtactggtaaatactactgtaggagtatctgcttgttaaaatggaaaaatgtgtctttagagctcagtattctttattttacaaacacaacaaaatgtagtaacttttttccagcatacagtaggcacattcaaagtggtccaagatggctcttttttctttgaaaggggcctgttctcagtaaagatgagcaaacatttggaatttacatgtgggcagacattgggataacaactttcatcaccaatcattggacttttgtgaagtcgacaccagctaaggctgcttaaaataagttctgatcattatataagaagggaaatgcctggcagacaccatgtaagttataagtgtctgtcttatctttactacacatattgtaacaaattcaatatcctagtcttcatttgtatgaatggtttgtattgtacatagtttaaccaagtgttatttgagctgcttattaatattaacttgtacttgtctctctgcttgttattggttaagaaaaaaggatatgaggaattcattttatcaatgtagctgtgaaggccattaaaaagacaaacttaatgtacagagcatttattcagatcaagtattgttgaaagctatacatatacaacattacagtctgtctgtatttagatattttatttctggaaaaaatgaaatgtacataaaaataaaacacttaaagttgagtttcaatatgtac

SEQ ID NO: 62688 - DNA, 2021 bp, Homo sapiens
  misc_feature (51)..(51): n is a, c, g, or t
ggaagcagcagaaagtctattaataaatgggatatacatgctttgcatganagaaatttggtcacatgtgccaatttaacgaacggtggaaagtcagaacttctgaaatcaggaagcagcaaatccacactaaagcacatatggacagaaagcagcaaagacttgtctatcagccgactcctgtcacagacttttcgtggcaaagagaatgatacagatttggacctgagatatgacaccccagaaccttattctgagcaagacctctgggactggctgaggaactccacagaccttcaagagcctcggcccagggccaagagaaggcccattgttaaaacgggcaagtttaagaaaatgtttggatggggcgattttcattccaacatcaaaacagtgaagctgaacctgttgataactgggaaaattgtagatcatggcaatgggacatttagtgtttatttcaggcataattcaactggtcaagggaatgtatctgtcagcttggtaccccctacaaaaatcgtggaatttgacttggcacaacaaaccgtgattgatgccaaagattccaagtcttttaattgtcgcattgaatatgaaaaggttgacaaggctaccaagaacacactctgcaactatgacccttcaaaaacctgttaccaggagcaaacccaaagtcatgtatcctggctctgctccaagccctttaaggtgatctgtatttacatttccttttatagtacagattataaactggtacagaaagtgtgccctgactacaactaccacagtgacacaccttactttccctcgggatgaaggtgaacatgggggtgagactgaagcctgaggaattaaaggtcatatgacagggctgttacctcaaagaagaaggtcacatctgttgcctggaatgtgtctacactgctgctcttgtcaactggctgcaaaatacactagtggaaaacactctgatgtaatttctgcccagtcagcttcatccctcagtataattgtaaatcatcacagattttgaagtcacacctgaagacatgctctcacatatagaggtacacaaacacaccgtcatgcacatttcagcttgcgtctatcatgattcctgttgagagggctttcattgtctgactcataatggttcaggatcaactatcatcaaacggaaggattaactagacagagaatgtttctaacagttgctgttatggaaatctcttttaaagtcttgagtacatgctaatcaataatctccactcatgcattcctactgcttggagtagctgtactggtaaatactactgtaggagtatctgcttgttaaaatggaaaaatgtgtctttagagctcagtattctttattttacaaacacaacaaaatgtagtaacttttttccagcatacagtaggcacattcaaagtggtccaagatggctcttttttctttgaaaggggcctgttctcagtaaagatgagcaaacatttggaatttacatgtgggcagacattgggataacaactttcatcaccaatcattggacttttgtgaagtcgacaccagctaaggctgcttaaaataagttctgatcattatataagaagggaaatgcctggcagacaccatgtaagttataagtgtctgtcttatctttactacacatattgtaacaaattcaatatcctagtcttcatttgtatgaatggtttgtattgtacatagtttaaccaagtgttatttgagctgcttattaatattaacttgtacttgtctctctgcttgttattggttaagaaaaaaggatatgaggaattcattttatcaatgtagctgtgaaggccattaaaaagacaaacttaatgtacagagcatttattcagatcaagtattgttgaaagctatacatatacaacattacagtctgtctgtatttagatattttatttctggaaaaaatgaaatgtacataaaaataaaacacttaaagttgagtttcaatatgtac

SEQ ID NO: 62689 - DNA, 564 bp, Homo sapiens
cattggtcaccaagcccatcagttctttgttggaaatgtctctcaaatctgtttcccctctccatccatattattgttgtctctcttcaggcccatgccattctgtcttgatctgtttagagtaatcacatactaaaatgcttccttgtacttttctccaagccattctccataagaaatttttttggcttattgaagtttagacagtgcatgagtgcaggcatcatgcatttcaagtgatagggaaatagcctagaacaggtatttttgagtaccttgaattgagatttagtttggttaagtttggccatggggattgggatttagggattgttaacatagggaggtaataaaacattgagaaacagaagacaggctttttgaaaaaaatagcaaaaaattggagacttagctttgaaagagatacttacccttatacaatttagtgaagcctcaaagaacagaccagcactttgggaggccgaggtcagagagtcacttgaggccaggagtcaacatagctcctgtgaccagcctggtcaacatagagactctatctctacc

SEQ ID NO: 62690 - DNA, 324 bp, Homo sapiens
tgttggattgttctaatttcaaaacagagaaagttttgaactcctgctttcatggttcattcttagaaataaatagaattgttttcccaagaaaaccttggaaaactttctagtaatagcaggaggaatatgggagtaggaaatggcaagttgaaggattttaatttggaaactgccaccttttggaatacagaagagctggttatgggattggcccctggctttacttgtccttaacatgggctttgataaggggaaaacaaagtgagggcttcgagccacaagtcaaggtcttgggaaagcttagcaaaatggtgcaagtct

SEQ ID NO: 62691 - DNA, 286 bp, Homo sapiens
tatttgatagaattttctagtgaaaccatcctgacttggggttttattttggaggaattttaagttattaattccgtctccttaatagtgataggactattcagattaccttatttcatatttggtgagttttggtagcttgtgtttctcaaggaagtgatccatttcatctaagttgccaaatttatgtgtgtataataatttgtagtattcctgtattatccttttgatgtctgtagggtctctagtgatatcctatgttttattcctgatattagttatttgt

SEQ ID NO: 62692 - DNA, 367 bp, Homo sapiens
gatattacacatcccccatgtagcttctggaaaactccactgtacacttgtgggagaatgacaatgagaaaatcaagtaacattattacggaaatagttttgactttgtaaaattctcctgaaaaattactggggatccctaggatttcctggctcatactttgagaatcgctagtctagcagagtagtccctggtattctgaagggattagtttaggacaaccctccttccccataccaaaatctagatgctcaagctccttttataaaatgacacagtatttgtatataacctacccatatcctcctttaaacctctagtcatctcttgattacttttacctaataaatgtaaatgctatgtaaa

SEQ ID NO: 62693 - DNA, 1746 bp, Homo sapiens
  misc_feature (482)..(482): n is a, c, g, or t
  misc_feature (745)..(745): n is a, c, g, or t
  misc_feature (895)..(895): n is a, c, g, or t
  misc_feature (1741)..(1741): n is a, c, g, or t
  misc_feature (1743)..(1744): n is a, c, g, or t
  misc_feature (1746)..(1746): n is a, c, g, or t
gaggggtctgcggtgtcccagtcagtgcagaggagttcaggacaccggttcgatgcctctgaaggaacagccatcatcatccctggaaacatagattgttggttggtagagcttattgctaaatttgaagagtgtgcatcagacactaaagctggtcctttcgtgaagtggggtttggaggctgcacattgccagaaagaacctggcttgcatcccttccctcttcgtcactccctggcttttggagcctcttcattaggcttgcttgtgaagtgtgtccctgtgctcgggttctctttctggatctcagtccccctcagattgtctggtccttactgtgatcttcacacctgactccgttttctgagtcctgctacctagttccagctccaagtctcaagttcccatgcaggcctcaggcacacacagacacatgttcacttttgggaagattccaccctgcctctgtggcagctgtgctntgaggccgttgagaagccatgcactatgtcagcagcgttcttttcccccagactctcagaccctgtgtgcccctctctgcaccgtgaccctgtttgtgggaccccgctttggctgttttgtctctttgttctcttctcttcctcttgaaaagtggactcccctggagctgttcttgactgttgtgtgatgttgtctacattcccttttgtgttttattcactaacttcaaattcctgatcatctgcctgcagaccacgcatanagcttctcctagtcagcctcactggcatccccaaacactccatttgcctggccaacctccagctccacctttctgtgatttccctgctcctgtgaatggtatcaccagccatctagttagccgctgccattgtcagccatccccttcctnccacccctggtggttctggcttcacgtacccttcccacccctctttaatatctcagagttctgcgctaatctggaccctcatgctgctggagggtacgcatggctgcactggtcactcagcggcccagctatctccatagaatggcctaatgcccatgtctaaatcatgttactctcatgctcagccaatcctcagaccttcaaggggtgctcacaggttgcaaaaggaagcccaaacatttcaaagtattggccatgccccatattccccgtcctaatctacttgtagctgcaccaaacccttcaccttatacagcctccctctggtcctggggactgtctcttaatgttgccccttttgtgtcctttgcttgtgtgagttcttctctctgggacactcaactcttctgaccaaatcccagttcaaacacagtctccttcaggaagcctttcttggtctctgaagagatccttctttccctgggcttccccagcccacccgctaagttgagtatcctagaggcacttgccccggcctctagctgcccaggagtgatttgtgttcttagaagcctcatcttcctttcaactctaagtccattgagtcaagaaccttgtcttcttaatgtatgtatctttcatttactgtatgaacttgctttactatggtaagccctgacaaatgattgatttcatcttgttggaagaaagacggcctggcttccatgaggggagttttatatgtcttacgtactctgcaaaaatccttattgagagttttctcctattttaaatcagactccaatttgtggattaaaattaggtgacatgaaagaattacaaaanannan

SEQ ID NO: 62694 - DNA, 185 bp, Homo sapiens
ctatgaagattaagttaataaatgtagaacatcttaccacattgctgatacctggtttcattattagtaactattatcctgtctcatttttcaaaagaatttaagaaaggcactatcaaaaactgcagacagccaagatcgatgacctcggaaataacttcagttgcccttttgcaattgggaag

SEQ ID NO: 62695 - DNA, 783 bp, Homo sapiens
gccaatcggaactcatggcggggctgctgggtcttccaggagcgcgcatgagcggacgctgcctatgggttgccgggcgagatgtaaccggctgctgagctggcagttctgtgtcgctaggcttctgcccggccgccgccacacataagctgcgatgaggagctttacgacttcccggtcttcggggccgggcgcagcaagggccagactctgcgctagcaggcgctgcgcgccaaccggccggcacctgtcgcagaaggtgcaaccgatcgcactgtcgcgcagaagctcctcaatggccagcaccagctgcagccccggccgcccactcgcctcacttgagcctgtctggcagcctgctatcaattatattgatagtaaatttgaggactacctaaatgcagaatcgcgagtgaacagatgtcagatgcctggtaacagggtgcagtgttgtttatacttcattgctccttcaggacatggactcccaccttcaggcaggattgggtagtacatgtttgtaactacctggcattgccttttgttgaggtggcagacaagaaacatggattattgcgtggagttccattagtaggaataagactcattctacattcttgttgttcttagtgttttttgtttttcatgagaaggaattgtatcagcacaaggcaatattctaacatgacaatgacagcagacagaacctcaataaactctgacttggtactgcaaaaaccatttcatgataccttaattcaaataaacctttgtttaatcaat

SEQ ID NO: 62696 - DNA, 745 bp, Homo sapiens
gccaatcggaactcatggcggggctgctgggtcttccaggagcgcgcatgagcggacgctgcctatgggttgccgggcgagatgtaaccggctgctgagctggcagttctgtgtcgctaggcttctgcccggccgccgccacacataagctgcgatgaggagctttacgacttcccggtcttcggggccgggcgcagcaagggccagactctgcgctagcaggcgctgcgcgccaaccggccggcacctgtcgcagaaggtgcaaccgatcgcactgtcgcgcagaagctcctcaatggccagcaccagctgcagccccggccgcccactcgcctcacttgagcctgtctggcagcctgctatcaattatattgatagtaaatttgaggactacctaaatgcagaatcgcgagtgaacagatgtcagatgcctggtaacagggtgcagtgttgtttatacttcattgctccttcaggacatggggccagacccaaaggctcaatgtgaaagttcctggactcagaggtgtcacgtaagaaagtgagtggaaacttgggagtatggctgtcccatgaagagctcaccctctggaaaacagaaaagggtcctaatcttggaggtttgacactcatcataatgtgggaatgacagctagaaaaaaacggtgaactccaggaaggcttgaaggcattggagcaaggccagcagcctctccctcccaccatcacttccatgagaaccacg

SEQ ID NO: 62697 - DNA, 444 bp, Homo sapiens
cccacaacgcctcccccagccagggcccgtggatccccgggagcgtccccggctatctggcgctgctcatcctggctggcagcctgctatcaattatattgatagtaaatttgaggactacctaaatgcagaatcgcgagtgaacagatgtcagatgcctggtaacagggtgcagtgttgtttatacttcattgctccttcaggacatgggtggcagacaagaaacatggattattgcgtggagttccattagtaggaataagactcattctacattcttgttgttcttagtgttttttgtttttcatgagaaggaattgtatcagcacaaggcaatattctaacatgacaatgacagcagacagaacctcaataaactctgacttggtactgcaaaaaccatttcatgataccttaattcaaataaacctttgtttaatcaat

SEQ ID NO: 62698 - DNA, 611 bp, Homo sapiens
caatccaaagttttaatcaaagaaggtggtgttcagttgctgcttacaatagttgataccccaggatttggagatgcagtggataatagtaattgctggcagcctgctatcaattatattgatagtaaatttgaggactacctaaatgcagaatcgcgagtgaacagatgtcagatgcctggtaacagggtgcagtgttgtttatacttcattgctccttcaggacatggctctgttcacggaaagggcctgggagctgcaacacctcaacagcaacgagcacacctgctacctagaacttggtttctaaaaaccatcctcctctaaaaggaaacagagctctttgaagaaatggtaatttcaaagctagagcacagaaagtataagatgagcccagaatatctttttgtacaagaaagtaaggcaatgctcaaagaatgatggagacatgcccaaaaaaagcagagaagccaacttgaaaagattccaacaggccaaatatgggacaatttgaacatcagaataaaatggtgacagtcacagaattataacccattgaagaaaggaattcatgacatcatattaatataaataataattgaataaaaaaa

SEQ ID NO: 62699 - DNA, 1157 bp, Homo sapiens
  misc_feature (914)..(914): n is a, c, g, or t
gccaatcggaactcatggcggggctgctgggtcttccaggagcgcgcatgagcggacgctgcctatgggttgccgggcgagatgtaaccggctgctgagctggcagttctgtgtcgctaggcttctgcccggccgccgccacacataagctgcgatgaggagctttacgacttcccggtcttcggggccgggcgcagcaagggccagactctgcgctagcaggcgctgcgcgccaaccggccggcacctgtcgcagaaggtgcaaccgatcgcactgtcgcgcagaagctcctcaatggccagcaccagctgcagccccggccgcccactcgcctcacttgagcctgtctggcagcctgctatcaattatattgatagtaaatttgaggactacctaaatgcagaatcgcgagtgaacagatgtcagatgcctggtaacagggtgcagtgttgtttatacttcattgctccttcaggacatggctctgttcacggaaagggcctgggagctgcaacacctcaacagcaacgagcacacctgctacctagaacttggtttctaaaaaccatcctcctctaaaaggaaacagagctctttgaagaaatgagacagatctcattatgttgcccagggtgatccttgatctcctggcctcaagtgatcctccaaccttggtctcccaaagtgctgggattacagatgtgaactaccacacccagtcaacgtgcagaaggttttcagtttgatgtagtctgatgtagtctcatgtatttatccttgttgttgttgcctgagcttttggtgtgatatccaaaaatatcattgccaagatcaatatcaagaaactttccccctatgtttcttacagaaattttatggtttcagatttttcatctattttgagtatattttngtgtatgatgtaagataagggtccagtctccccagtgttggatatccaattttcataacaccatttattgaagagattattcttgtctccacgtgtgtttttcttgatggtccttgctcaaaaattagttgaccttttatatgcttgggtttattttctggggcctctattctggtttccttgctttacatctctgttttcatggcagtgccacagtgtttgattactattagcttgtatcta

SEQ ID NO: 62700 - DNA, 396 bp, Homo sapiens
ctggcagcctgctatcaattatattgatagtaaatttgaggactacctaaatgcagaatcgcgagtgaacagatgtcagatgcctggtaacagggtgcagtgttgtttatacttcattgctccttcaggacatgggtcagtaacctgatacttctgattcctttttgttgttgttgcttactgttacctttatgtgcatatttgagtaatctttaagtttgtgaagtacatacaactatacccattattaagtaccaaatttcatgtagaaatgtcttagttgaaaagcctttttaagtcctgtgtaagctaacagtgcttttactccttagttcttattcataaggattttccctgcttcatggaaataaacagtgttgccaccatggtttgagg

SEQ ID NO: 62701 - DNA, 390 bp, Homo sapiens
ctacatcaagcagtgagcaacatgctttcacagcagaggaaactatggcttaggaactgaggtgacaggcctgaggtcccacagcaagggcagaactggaacttgaagtccatttcctttgccagctccacaccacctcagaaaagctcaacagattctagaggattccctctacatgctttgttcagattcctttagtcaataactctaggggccaggcatggtgtctcaaggctataatcccagcactttggggaggccgagatgggctggtcacttgaagccaggagtttgagaccagcctggccaacatggtgaaaccctgtttctactaaaaataatacaaaaaaagtaggcatggtggctcaagcctataattccagccaagat

SEQ ID NO: 62702 - DNA, 180 bp, Homo sapiens
ggagatgtccagtaaggagctgaaagcacagctctagatagaagtgttagggatggtcactatttactgtggttgaagtcttgagaatagtgagattatccaggtagaattgaagtacagagaagacaagcattgatatccagttggaatgatttacacattaaatgtcaaagtcctcag

SEQ ID NO: 62703 - DNA, 295 bp, Homo sapiens
ctcacgcctccttacagagcttacttctcaataccattaaaagcatcttccctaagccctatcccttgttttcctttcactacaggttctccctatgacttcagatagagagctgagaaataagggagcagaaccaagttaaaagctcaaaaccctgaaagtctacccccttcagtgttgctcctattttatttttatttatttatttattttttgagaccgtgtcttgctcttttgcccaggctggagtgcagtggcgagatctcggctcactgcaagctccgcctcctgggtt

SEQ ID NO: 62704 - DNA, 904 bp, Homo sapiens
gccttcccaaggaagaccctgagtaaaatctgcatctgtcctcaccacctggcacagtctctcataacggtcagattttgtatgttcatcctatttattcaggggctcgtactagaaagccacaggagaggtcggcttgtagggactggaaaatcagccccaagcagagcagctgcagggcccctggagccggaaggacactgcacagaacagactgcgttattgttatttttaaataaaaatatacatttgaaaccttaaggctaaacaaaaataaacaaaaaatcctttagaattctttccacaacaatatctctttctgagaaattgttacaaacaaggtcagattttctctgtataacatttgcttttatgaggacaatatcatatgcattatatgcataatatgatattataaatcaaaatgcctgcacccactttagggtatagctattgacttattattaatattatattattattattttgctggaagaaggtcacactaagatataattttttatgttttcagttaacggtatgctttcttctttgcttatttggtttttgtctctgtaccaaatatcttcttgcttaaggtagaaaagtatttgtttacctctatctccagttttttttcttatttgaatgttgaaggtaaaattgatataccaattttaactatttctgatacagctgaaagcactaaactacttcataagaagtagatactcatttttgtaacactatttagggcttttgtggttaattttaaaggaaaccactctttctacaggaaacaagggctcaggattcttcagatgaccttataaaaatgcagtccacagtgctatcaatattgtaacagtaatgactacaataaagccaaaagtccagtgtacct

SEQ ID NO: 62705 - DNA, 5618 bp, Homo sapiens
gttggctgatagttcaccttcaaatcttcaaattattataaaagaactgctttctatgcatcaccagcctgaccctgctcttaccaaggagtttgattaccttcccccagtggatagcaggtccagttcagggtttgtggggctgagaaatggtggtgcaacttgttatatgaatgcagtcttccagcagctgtatatgcaacctgggctccctgagtcattactttcagtggatgatgacacagacaatccagatgatagcgtgttttaccaagtgcagtctctctttggacatttaatggaaagcaagctgcagtactatgtacctgagaatttttggaagattttcaagatgtggaataaagaactttatgtgagagaacagcaggatgcatatgaattctttactagtctcattgatcagatggatgaatacctcaagaaaatggggagagaccaaatttttaagaatacatttcagggcatctactctgatcagaagatctgtaaagactgtcctcacagatatgagcgtgaagaagctttcatggctctcaatctaggagtgacttcttgtcagagtttggaaatttctttggaccaatttgttagaggagaagttctagaaggaagtaatgcgtactactgtgaaaagtgtaaagaaaagagaataacagtgaaaaggacctgtattaaatctttacctagcgtcttggtaattcacctaatgagatttgggtttgactgggaaagcggacgctccattaaatatgatgaacaaataaggtttccctggatgctaaacatggagccttacacagtttcaggaatggctcgccaagattcttcttctgaagttggggaaaatgggcgaagtgtggatcagggcggtggaggatccccacgaaaaaaggttgccctcacagaaaactatgaacttgtcggtgtcatcgtacacagtgggcaggcacacgcaggccactactattccttcattaaggacaggcgagggtgtggaaaaggaaagtggtataaatttaatgacacagttatagaagaatttgacctaaatgacgagaccctggagtatgaatgctttggaggagaatatagaccaaaagtttatgatcaaacaaacccatacactgatgtgcgccgaagatactggaatgcctatatgcttttctaccaaagggtgtctgatcagaactccccagtattaccaaagaaaagtcgagtcagcgttgtacggcaggaagctgaggatctctctctgtcagctccatcttcaccagaaatttcacctcagtcatcccctcggccccataggccgaacaatgaccggctgtctattcttaccaagctggttaaaaaaggcgagaagaaaggactgtttgtggagaaaatgcctgctcgaatataccagatggtgagagatgagaacctcaagtttatgaagaatagagatgtatacagtagtgattatttcagttttgttttgtctttagcttcattgaatgctactaaattaaagcatccatattatccttgcatggcaaaggtgagcttacagcttgctattcaattcctttttcaaacttatctacggacaaagaagaaactcagggttgatactgaagaatggattgctaccattgaagcattgctttcaaaaagttttgatgcttgtcagtggttagttgaatattttattagttctgaaggacgagaattgataaagattttcttactggagtgcaatgtgagagaagtacgagttgctgtggccaccattctggagaaaaccctagacagtgccttgttttatcaggataagttaaaaagccttcatcagttactggaggtactacttgctctgttggacaaagacgtcccagaaaattgtaaaaactgtgctcagtactttttcctgttcaacacttttgtacaaaagcaaggaattagggctggagatcttcttctgaggcattcagctctgcggcacatgatcagcttcctcctaggggccagtcggcaaaacaatcagatacgtcgatggagttcagcacaagcacgagaatttgggaatcttcacaatacagtggcgttacttgttttgcattcagatgtctcatcccaaaggaatgttgctcctggcatatttaagcaacgaccacccattagcattgctccctcaagccctctgttgcccctccatgaggaggtagaagccttgttgttcatgtctgaagggaaaccttacctgttagaggtaatgtttgctttgcgggagctgacaggctcgctcttggcactcattgagatggtagtgtactgctgtttctgtaatgagcatttttccttcacaatgctgcatttcattaagaaccaactagaaacggctccacctcatgagttaaagaatacgttccaactacttcatgaaatattggttattgaagatcctatacaagcagagcgagtcaaatttgtgtttgagacagaaaatggattactagctttgatgcaccacagtaatcatgtggacagtagtcgctgctaccagtgtgtcaaatttcttgtcactcttgctcaaaagtgtcctgcagctaaggagtacttcaaggagaattcccaccactggagctgggctgtgcagtggctacagaagaagatgtcagaacattactggacaccacagagtaatgtctctaatgaaacatcaactggaaaaacctttcagcgaaccatttcagctcaggacacgttagcgtatgccacagctttgttgaatgaaaaagagcaatcaggaagcagtaatgggtcggagagtagtcctgccaatgagaacggagacaggcatctacagcagggttcagaatctcccatgatgattggtgagttgagaagtgaccttgatgatgttgatccctagaggaacatgcccagcctgagaggagtcaagacacaatactggatgctcagcaccttcttggaatcagaatctcgaaccctttggaagagcctggagattggactgggaaagctgctgtgacttgggcggatcgtgtatttctcaaggaaagcatttttaagccactagaaggtttgggagctgtttggcagtgggagaactccggcatgtggatcagctgtcccgggagcgtggtctatatgtggattcacatttctgtggagattttcggaaatagagccagtggcagacttttttgttacacgaacatacaagagtgagcataaagctgttgctttctctacgatgctacaaaagaaattcctttggtttttatattttaagaaaaagcaagctgcttttagatatgtgggggcaaatttttaatcttgcagtaatattaaacaggaatatccaatttaaaatgatgtaaagatgtaataaaattccttttcattgtaaaatagtaattaagtcaatttacacagacctttgtatttaatatgtctccctatttgtatagaatttcagatgggtctagatgagaaccctatgcataagcttggatcttgatgaaaggttaccaggatcaggatcaaaaattgggaaatactaagctcttgaagatatttttctgatataattagattgaaaagagcaattttgaaaatgctgtgttctccagaagtacagggtgcattatttgacatcaattacttaaagaagttatgagttgttccccaaacagattttaaaaacagcaaaataaaagcactttaagatataattttactgagtttaacttcacagaattatctttttaatgcttggagacatattgaataaactgtagtcttaaatcatgtgatctgcaatcgtttgcttttgcttaaaacataattactgaaacccttggtattggttgtatatgaagttaactatttgagttggtacacactgcttgtgagtttcatagttattgtaatgcagagaaggaatttgagaatttgtttctcctcaacatgactaattaacactgaaaagtcagtcaaggtttaagatttattttcccagaaataaatataaagcaattgaataaccatccatttagtcgtatttccaaagtatagcaccattcactcatttataccagctcccttttatggtgtgggggagaggtttacacccacatatttcatatatattttgtacattttgtattttgaattgctcacattttcggccctgttttgcctttagttacaggtcctgccttattttcatctcaccatgcacagaactagggagccttaggaagtgccaggttttcactgtcagatttgccaagtcacagaggcgcagccagccctgaagtgcctgtctggctgctgtggcattgtgtgggcatgtggccaggcagatggcatctcattactgtgctctcgccatggcccagtcttttcattctctggcagtgagggtttctgtgctgtcagacttcattgttattctgtgacttgctggaggttggcagtggcctttgtcaaacacactgagaagatggaagggccagcacttaagagcagaactgtacccttagagaaacggacagaggcgagtggcaaacttcagacggttccaatggtcttgcagtttgaaatgtgatgttctaccattggttttgagtacgtgaatacttcctgtcctactgtttcccctaccctattctcaccttctctccgcccacatcctcaccaagagattgtgtgggacatgaccttgaaatgctggcgatgatccacactgggatatcatcgctggcgactgcactctcaggagcccaaaatcaggagtgaaattgccacttctagtccccttatttcctatggaaacaacgccttccgcacccctagcacctgccgtcctcactgtaaaggttcatcaggatcgtccaccgtgtatattatacgcttcagatcatgttgcttatattgttgctgcaatgaccatcgttttcactttgctggtaaccacttgattgctgacagctacagtcaatgaacctgctgatgactttttttaatgtagtacaacagtgacagttatgacaggcttaccttggaagagttgtcatttttactgccaattttttggatgaagatgtttttataaacctttcaaaatggtctgcaaacagagcaggaattgcacaattaactcaataatgctgtgtgttctcaagaagctcccttagtgaggccgatcttaagatggccgattctgcccgttgaaggcatcctgggaaagaaaacaagcatcccagcgggcatctcaccacgacttctcctggagtcctcacacggtcactgacaactacagtcagttttaggaactagagtgccgtatcatcagacttaccctgtcctgccccaccttccctgctaacatcgaggtgtgtgcagttaccttctgagcttggaacaagcagactggaattttcctctgctacctcttgtgtataaaatcttgtttataaaatttcaaaaggaagtagatacactagggaagaaccttaattctaaatttggttcatgtgtggcaaagttcttagcttctaagagtataaaataaatttttcaaaaac

SEQ ID NO: 62706 - DNA, 786 bp, Homo sapiens
acccatcaggccttatgtcagaaaggcaggaatcagggcagatatggaggctttaagagcaagagttcatgagctttcactcaaggtttctcattaatgtaacccagctaccagctcttcaggctctaggtccctaacctcagaatagcctttcaaatcatgtcacctgtagctcctgagcacttgtgaacccaggcaccgtgtcaagaaccttgcctgtattatcttatttcatctttgtaacaacttcatgaggttagtacagttgtgagtcatatatcatgggtagtttaagtgacatgcctagagtcatagagtgaaaacttgaacacaggctgattgactgcaaaatgaaggttcttttttttttaattgtggcgaaatgtacataacataaaatttactatttgaaccatttttaagtgtatagttcagtgactttaagtacattcacactgatgtgcaaccatcaccaccatccatctccagaactcttttcatcttctgaaactgaaactctggacctattgaagactgactccctattcctcccttcccccagcccctgggggaagcaattgtaatttctgtctccatgaatttgactactctaggaaccccatttaagtagaatcacaaatataaagacaactgaattttaatgaaactagcatttacgtttcaaaatgaagcactaggaacaagcaaagaaagaatttggctaataaaaatctcctcggtcatcaggtgtcctgcagctaaggagtacttcaaggagaattccca

SEQ ID NO: 62707 - DNA, 4478 bp, Homo sapiens
gttggctgatagttcaccttcaaatcttcaaattattataaaagaactgctttctatgcatcaccagcctgaccctgctcttaccaaggagtttgattaccttcccccagtggatagcaggtccagttcagggtttgtggggctgagaaatggtggtgcaacttgttatatgaatgcagtcttccagcagctgtatatgcaacctgggctccctgagtcattactttcagtggatgatgacacagacaatccagatgatagcgtgttttaccaagtgcagtctctctttggacatttaatggaaagcaagctgcagtactatgtacctgagaatttttggaagattttcaagatgtggaataaagaactttatgtgagagaacagcaggatgcatatgaattctttactagtctcattgatcagatggatgaatacctcaagaaaatggggagagaccaaatttttaagaatacatttcagggcatctactctgatcagaagatctgtaaagactgtcctcacagatatgagcgtgaagaagctttcatggctctcaatctaggagtgacttcttgtcagagtttggaaatttctttggaccaatttgttagaggagaagttctagaaggaagtaatgcgtactactgtgaaaagtgtaaagaaaagagaataacagtgaaaaggacctgtattaaatctttacctagcgtcttggtaattcacctaatgagatttgggtttgactgggaaagcggacgctccattaaatatgatgaacaaataaggtttccctggatgctaaacatggagccttacacagtttcaggaatggctcgccaagattcttcttctgaagttggggaaaatgggcgaagtgtggatcagggcggtggaggatccccacgaaaaaaggttgccctcacagaaaactatgaacttgtcggtgtcatcgtacacagtgggcaggcacacgcaggccactactattccttcattaaggacaggcgagggtgtggaaaaggaaagtggtataaatttaatgacacagttatagaagaatttgacctaaatgacgagaccctggagtatgaatgctttggaggagaatatagaccaaaagtttatgatcaaacaaacccatacactgatgtgcgccgaagatactggaatgcctatatgcttttctaccaaagggtgtctgatcagaactccccagtattaccaaagaaaagtcgagtcagcgttgtacggcaggaagctgaggatctctctctgtcagctccatcttcaccagaaatttcacctcagtcatcccctcggccccataggccgaacaatgaccggctgtctattcttaccaagctggttaaaaaaggcgagaagaaaggactgtttgtggagaaaatgcctgctcgaatataccagatggtgagagatgagaacctcaagtttatgaagaatagagatgtatacagtagtgattatttcagttttgttttgtctttagcttcattgaatgctactaaattaaagcatccatattatccttgcatggcaaaggtgagcttacagcttgctattcaattcctttttcaaacttatctacggacaaagaagaaactcagggttgatactgaagaatggattgctaccattgaagcattgctttcaaaaagttttgatgcttgtcagtggttagttgaatattttattagttctgaaggacgagaattgataaagattttcttactggagtgcaatgtgagagaagtacgagttgctgtggccaccattctggagaaaaccctagacagtgccttgttttatcaggataagttaaaaagccttcatcagttactggaggtactacttgctctgttggacaaagacgtcccagaaaattgtaaaaactgtgctcagtactttttcctgttcaacacttttgtacaaaagcaaggaattagggctggagatcttcttctgaggcattcagctctgcggcacatgatcagcttcctcctaggggccagtcggcaaaacaatcagatacgtcgatggagttcagcacaagcacgagaatttgggaatcttcacaatacagtggcgttacttgttttgcattcagatgtctcatcccaaaggaatgttgctcctggcatatttaagcaacgaccacccattagcattgctccctcaagccctctgttgcccctccatgaggaggtagaagccttgttgttcatgtctgaagggaaaccttacctgttagaggtaatgtttgctttgcgggagctgacaggctcgctcttggcactcattgagatggtagtgtactgctgtttctgtaatgagcatttttccttcacaatgctgcatttcattaagaaccaactagaaacggctccacctcatgagttaaagaatacgttccaactacttcatgaaatattggttattgaagatcctatacaagcagagcgagtcaaatttgtgtttgagacagaaaatggattactagctttgatgcaccacagtaatcatgtggacagtagtcgctgctaccagtgtgtcaaatttcttgtcactcttgctcaaaagtgtcctgcagctaaggagtacttcaaggagaattcccaccactggagctgggctgtgcagtggctacagaagaagatgtcagaacattactggacaccacagagtaatgtctctaatgaaacatcaactggaaaaacctttcagcgaaccatttcagctcaggacacgttagcgtatgccacagctttgttgaatgaaaaagagcaatcaggaagcagtaatgggtcggagagtagtcctgccaatgagaacggagacaggcatctacagcagggttcagaatctcccatgatgattggtgagttgagaagtgaccttgatgatgttgatccctagaggaacatgcccagcctgagaggagtcaagacacaatactggatgctcagcaccttcttggaatcagaatctcgaaccctttggaagagcctggagattggactgggaaagctgctgtgacttgggcggatcgtgtatttctcaaggaaagcatttttaagccactagaaggtttgggagctgtttggcagtgggagaactccggcatgtggatcagctgtcccgggagcgtggtctatatgtggattcacagaggcgcagccagccctgaagtgcctgtctggctgctgtggcattgtgtgggcatgtggccaggcagatggcatctcattactgtgctctcgccatggcccagtcttttcattctctggcagtgagggtttctgtgctgtcagacttcattgttattctgtgacttgctggaggttggcagtggcctttgtcaaacacactgagaagatggaagggccagcacttaagagcagaactgtacccttagagaaacggacagaggcgagtggcaaacttcagacggttccaatggtcttgcagtttgaaatgtgatgttctaccattggttttgagtacgtgaatacttcctgtcctactgtttcccctaccctattctcaccttctctccgcccacatcctcaccaagagattgtgtgggacatgaccttgaaatgctggcgatgatccacactgggatatcatcgctggcgactgcactctcaggagcccaaaatcaggagtgaaattgccacttctagtccccttatttcctatggaaacaacgccttccgcacccctagcacctgccgtcctcactgtaaaggttcatcaggatcgtccaccgtgtatattatacgcttcagatcatgttgcttatattgttgctgcaatgaccatcgttttcactttgctggtaaccacttgattgctgacagctacagtcaatgaacctgctgatgactttttttaatgtagtacaacagtgacagttatgacaggcttaccttggaagagttgtcatttttactgccaattttttggatgaagatgtttttataaacctttcaaaatggtctgcaaacagagcaggaattgcacaattaactcaataatgctgtgtgttctcaagaagctcccttagtgaggccgatcttaagatggccgattctgcccgttgaaggcatcctgggaaagaaaacaagcatcccagcgggcatctcaccacgacttctcctggagtcctcacacggtcactgacaactacagtcagttttaggaactagagtgccgtatcatcagacttaccctgtcctgccccaccttccctgctaacatcgaggtgtgtgcagttaccttctgagcttggaacaagcagactggaattttcctctgctacctcttgtgtataaaatcttgtttataaaatttcaaaaggaagtagatacactagggaagaaccttaattctaaatttggttcatgtgtggcaaagttcttagcttctaagagtataaaataaatttttcaaaaac

SEQ ID NO: 62708 - DNA, 3836 bp, Homo sapiens
gttggctgatagttcaccttcaaatcttcaaattattataaaagaactgctttctatgcatcaccagcctgaccctgctcttaccaaggagtttgattaccttcccccagtggatagcaggtccagttcagggtttgtggggctgagaaatggtggtgcaacttgttatatgaatgcagtcttccagcagctgtatatgcaacctgggctccctgagtcattactttcagtggatgatgacacagacaatccagatgatagcgtgttttaccaagtgcagtctctctttggacatttaatggaaagcaagctgcagtactatgtacctgagaatttttggaagattttcaagatgtggaataaagaactttatgtgagagaacagcaggatgcatatgaattctttactagtctcattgatcagatggatgaatacctcaagaaaatggggagagaccaaatttttaagaatacatttcagggcatctactctgatcagaagatctgtaaagactgtcctcacagatatgagcgtgaagaagctttcatggctctcaatctaggagtgacttcttgtcagagtttggaaatttctttggaccaatttgttagaggagaagttctagaaggaagtaatgcgtactactgtgaaaagtgtaaagaaaagagaataacagtgaaaaggacctgtattaaatctttacctagcgtcttggtaattcacctaatgagatttgggtttgactgggaaagcggacgctccattaaatatgatgaacaaataaggtttccctggatgctaaacatggagccttacacagtttcaggaatggctcgccaagattcttcttctgaagttggggaaaatgggcgaagtgtggatcagggcggtggaggatccccacgaaaaaaggttgccctcacagaaaactatgaacttgtcggtgtcatcgtacacagtgggcaggcacacgcaggccactactattccttcattaaggacaggcgagggtgtggaaaaggaaagtggtataaatttaatgacacagttatagaagaatttgacctaaatgacgagaccctggagtatgaatgctttggaggagaatatagaccaaaagtttatgatcaaacaaacccatacactgatgtgcgccgaagatactggaatgcctatatgcttttctaccaaagggtgtctgatcagaactccccagtattaccaaagaaaagtcgagtcagcgttgtacggcaggaagctgaggatctctctctgtcagctccatcttcaccagaaatttcacctcagtcatcccctcggccccataggccgaacaatgaccggctgtctattcttaccaagctggttaaaaaaggcgagaagaaaggactgtttgtggagaaaatgcctgctcgaatataccagatggtgagagatgagaacctcaagtttatgaagaatagagatgtatacagtagtgattatttcagttttgttttgtctttagcttcattgaatgctactaaattaaagcatccatattatccttgcatggcaaaggtgagcttacagcttgctattcaattcctttttcaaacttatctacggacaaagaagaaactcagggttgatactgaagaatggattgctaccattgaagcattgctttcaaaaagttttgatgcttgtcagtggttagttgaatattttattagttctgaaggacgagaattgataaagattttcttactggagtgcaatgtgagagaagtacgagttgctgtggccaccattctggagaaaaccctagacagtgccttgttttatcaggataagttaaaaagccttcatcagttactggaggtactacttgctctgttggacaaagacgtcccagaaaattgtaaaaactgtgctcagtactttttcctgttcaacacttttgtacaaaagcaaggaattagggctggagatcttcttctgaggcattcagctctgcggcacatgatcagcttcctcctaggggccagtcggcaaaacaatcagatacgtcgatggagttcagcacaagcacgagaatttgggaatcttcacaatacagtggcgttacttgttttgcattcagatgtctcatcccaaaggaatgttgctcctggcatatttaagcaacgaccacccattagcattgctccctcaagccctctgttgcccctccatgaggaggtagaagccttgttgttcatgtctgaagggaaaccttacctgttagaggtaatgtttgctttgcgggagctgacaggctcgctcttggcactcattgagatggtagtgtactgctgtttctgtaatgagcatttttccttcacaatgctgcatttcattaagaaccaactagaaacggctccacctcatgagttaaagaatacgttccaactacttcatgaaatattggttattgaagatcctatacaagcagagcgagtcaaatttgtgtttgagacagaaaatggattactagctttgatgcaccacagtaatcatgtggacagtagtcgctgctaccagtgtgtcaaatttcttgtcactcttgctcaaaagtgtcctgcagctaaggagtacttcaaggagaattcccaccactggagctgggctgtgcagtggctacagaagaagatgtcagaacattactggacaccacagagtaatgtctctaatgaaacatcaactggaaaaacctttcagcgaaccatttcagctcaggacacgttagcgtatgccacagctttgttgaatgaaaaagagcaatcaggaagcagtaatgggtcggagagtagtcctgccaatgagaacggagacaggcatctacagcagggttcagaatctcccatgatgattggtgagttgagaagtgaccttgatgatgttgatccctagaggaacatgcccagcctgagaggagtcaagacacaatactggatgctcagcaccttcttggaatcagaatctcgaaccctttggaagagcctggagattggactgggaaagctgctgtgacttgggcggatcgtgtatttctcaaggaaagcatttttaagccactagaaggtttgggagctgtttggcagtgggagaactccggcatgtggatcagctgtcccgggagcgtggtctatatgtggattcacatttctgtggagattttcggaaatagagccagtggcagacttttttgttacacgaacatacaagagtgagcataaagctgttgctttctctacgatgctacaaaagaaattcctttggtttttatattttaagaaaaagcaagctgcttttagatatgtgggggcaaatttttaatcttgcagtaatattaaacaggaatatccaatttaaaatgatgtaaagatgtaataaaattccttttcattgtaaaatagtaattaagtcaatttacacagacctttgtatttaatatgtctccctatttgtatagaatttcagatgggtctagatgagaaccctatgcataagcttggatcttgatgaaaggttaccaggatcaggatcaaaaattgggaaatactaagctcttgaagatatttttctgatataattagattgaaaagagcaattttgaaaatgctgtgttctccagaagtacagggtgcattatttgacatcaattacttaaagaagttatgagttgttccccaaacagattttaaaaacagcaaaataaaagcactttaagatataattttactgagtttaacttcacagaattatctttttaatgcttggagacatattgaataaactgtagtcttaaatc

SEQ ID NO: 62709 - DNA, 427 bp, Homo sapiens
atgtgatctgacgggtaacacaggtatggatggagacttactgacagaggctgggacaggagtcagtaaccgagaggaatgggctggggaagtcaccaatagccttgtgaaaagtaggctcctgtgtagctataataaggacttccttagtgctcaagcctgccttttgctcctgcagttacgttatgatgatgaagtgaagcgggtggtggcagagccggtggagttggcccaagagttccgcaaatttgacctgaacagcccctgggaggctttcccagtctatcgccaacccccggagagtctcaagcttgaagccggagacaagaagcctgatgccaagtagctccagggaacgcatgtggatcctagacagcgccttatctatgattgagtgtccgtgtaaataaattcctacttagactta

SEQ ID NO: 62710 - DNA, 581 bp, Homo sapiens
ccccccaactaggaggcacggcccccaacagcatcacccgcttaaatcccctgaagtcccactcctaaacacatccgtattactcgcatcaggagtatcaatcacctgagctcaccatagtctaatagaaaacaaccgaaaccaaataattcaagcactgcttattacaattttactgggtctctattttaccctcctacaagcctcagagtacttcgagtctcccttcaccatttccgacggcatctacggctcaacattttttgtaccacaggcttccacggacttcacgtcattattggctcaactttcctctatctggctatgttgagttacgttatgatgatgaagtgaagcgggtggtggcagagccggtggagttggcccaagagttccgcaaatttgacctgaacagcccctgggaggctttcccagtctatcgccaacccccggagagtctcaagcttgaagccggagacaagaagcctgatgccaagtagctccagggaacgcatgtggatcctagacagcgccttatctatgattgagtgtccgtgtaaataaattcctacttagactta

SEQ ID NO: 62711 - DNA, 496 bp, Homo sapiens
tgtgctgaatctaaaatatgagtaggagaccaggtagccttgtgagatggaccagggaaatattcctgacaaagtgaatagcatgagcaaacacaggcatgctgacatgctaagctacagctgtggcctgggcctttggaagtagttgtaagcataggagaatcttgaggttttgaggttcagaatagaaggcagggtcacagggcagaactctcccaatcagggactcccatctcagccctccagatccttctgttctccctagattgtctacaacctgttgtctctgcgcttcaactcacggatccgtgtgaagacctacacagatgagctgacgcccattgagtctgctgtctctgtgttcaaggcagccaactggtatgaaagggaggtgagttaccggatatggtggacctgcctctgggccacagttgcagaactggttcagactacgggatgcagtgtagccccttccccctgttgttagtcttgatgg

SEQ ID NO: 62712 - DNA, 976 bp, Homo sapiens
tatgggctagtacgggcctggggtcaaatcggcgaggcgtgccttggggctccgtgtcctgctgtctttccgtccgctgcctagtctgcatctgagtaacatggcggcggcggcggtagccaggctgtggtggcgcgggatcttgggggcctcggcgctgaccagggggactgggcgaccctccgttctgttgctgccggtgaggcgggagagcgccggggccgacacgcgccccactgtcagaccacggaatgatgtggcccacaagcagctctcagcttttggagagtatgtggctgaaatcttgcccaagtatgtccaacaagttcaggtgtcctgcttcaatgagttagaggtctgtatccatcctgatggcgtcatcccagtgctgactttcctcagggatcacaccaatgcacagttcaaatctctggttgacttgacagcagtggacgtcccaactcggcaaaaccgttttgagattgtctacaacctgttgtctctgcgcttcaactcacggatccgtgtgaagacctacacagatgagctgacgcccattgagtctgctgtctctgtgttcaaggcagccaactggtatgaaagggagatctgggacatgtttggagtcttctttgctaaccaccctgatctaagaaggatcctgacagattatggcttcgagggacatcctttccggaaagactttcctctatctggctatgttgagttacgttatgatgatgaagtgaagcgggtggtggcagagccggtggagttggcccaagagttccgcaaatttgacctgaacagcccctgggaggctttcccagtctatcgccaacccccggagagtctcaagcttgaagccggagacaagaagcctgatgccaagtagctccagggaacgcatgtggatcctagacagcgccttatctatgattgagtgtccgtgtaaataaattcctacttagactta

SEQ ID NO: 62713 - DNA, 920 bp, Homo sapiens
aaggctaggtacgaggcctgggtggtagtctgcatctgagtaacatggcggcggcggcggtagccaggctgtggtggcgcgggatcttgggggcctcggcgctgaccagggggactgggcgaccctccgttctgttgctgccggtgaggcgggagagcgccggggccgacacgcgccccactgtcagaccacggaatgatgtggcccacaagcagctctcagcttttggagagtatgtggctgaaatcttgcccaagtatgtccaacaagttcaggtgtcctgcttcaatgagttagaggtctgtatccatcctgatggcgtcatcccagtgctgactttcctcagggatcacaccaatgcacagttcaaatctctggttgacttgacagcagtggacgtcccaactcggcaaaaccgttttgagattgtctacaacctgttgtctctgcgcttcaactcacggatccgtgtgaagacctacacagatgagctgacgcccattgagtctgctgtctctgtgttcaaggcagccaactggtatgaaagggagatctgggacatgtttggagtcttctttgctaaccaccctgatctaagaaggatcctgacagattatggcttcgagggacatcctttccggaaagactttcctctatctggctatgttgagttacgttatgatgatgaagtgaagcgggtggtggcagagccggtggagttggcccaagagttccgcaaatttgacctgaacagcccctgggaggctttcccagtctatcgccaacccccggagagtctcaagcttgaagccggagacaagaagcctgatgccaagtagctccagggaacgcatgtggatcctagacagcgccttatctatgattgagtgtccgtgtaaataaattcctacttagactta

SEQ ID NO: 62714 - DNA, 919 bp, Homo sapiens
aggctagtacgaggctggtgttctgagtctgcatctgagtaacatggcggcggcggcggtagccaggctgtggtggcgcgggatcttgggggcctcggcgctgaccagggggactgggcgaccctccgttctgttgctgccggtgaggcgggagagcgccggggccgacacgcgccccactgtcagaccacggaatgatgtggcccacaagcagctctcagcttttggagagtatgtggctgaaatcttgcccaagtatgtccaacaagttcaggtgtcctgcttcaatgagttagaggtctgtatccatcctgatggcgtcatcccagtgctgactttcctcagggatcacaccaatgcacagttcaaatctctggttgacttgacagcagtggacgtcccaactcggcaaaaccgttttgagattgtctacaacctgttgtctctgcgcttcaactcacggatccgtgtgaagacctacacagatgagctgacgcccattgagtctgctgtctctgtgttcaaggcagccaactggtatgaaagggagatctgggacatgtttggagtcttctttgctaaccaccctgatctaagaaggatcctgacagattatggcttcgagggacatcctttccggaaagactttcctctatctggctatgttgagttacgttatgatgatgaagtgaagcgggtggtggcagagccggtggagttggcccaagagttccgcaaatttgacctgaacagcccctgggaggctttcccagtctatcgccaacccccggagagtctcaagcttgaagccggagacaagaagcctgatgccaagtagctccagggaacgcatgtggatcctagacagcgccttatctatgattgagtgtccgtgtaaataaattcctacttagactta

SEQ ID NO: 62715 - DNA, 1310 bp, Homo sapiens
tatgggctagtacgggcctggggtcaaatcggcgaggcgtgccttggggctccgtgtcctgctgtctttccgtccgctgcctagtctgcatctgagtaacatggcggcggcggcggtagccaggctgtggtggcgcgggatcttgggggcctcggcgctgaccagggggactgggcgaccctccgttctgttgctgccggtgaggcgggagagcgccggggccgacacgcgccccactgtcagaccacggaatgatgtggcccacaagcagctctcagcttttggagagtatgtggctgaaatcttgcccaagtatgtccaacaagttcaggtgtcctgcttcaatgagttagaggtctgtatccatcctgatggcgtcatcccagtgctgactttcctcagggatcacaccaatgcacagttcaaatctctggttgacttgacagcagtggacgtcccaactcggcaaaaccgttttgagattgtctacaacctgttgtctctgcgcttcaactcacggatccgtgtgaagacctacacagatgagctgacgcccattgagtctgctgtctctgtgttcaaggcagccaactggtatgaaagggagatctgggacatgtttggagtcttctttgctaaccaccctgatctaagaaggatcctgacagattatggcttcgagggacatcctttccggaaagactttcctctatctggctatgttgagttacgttatgatgatgaagtgaagcgggtggtggcagagccggtggagttggcccaagagttccgcaaatttgacctgaacagcccctgggaggctttcccagtctatcgccaacccccggagagtctcaagcttgaagccggagacaagaagcctgatgccaagtagctccagggaacgcatgtggatcctagacagcgccttatctatgattgagtgtccgtgtaaataaattcctacttagacttaaaaaaaaaaaaaaaaaaaaaaaaaaaaaaaaaacaaaaggggggggggggaaaaaatatcccccggggggggcaaaggtattagaggattaccacaggtttttttgagaaagggggccctatgaagggggcgatattaaaaggaagggaggggcggcggttaacaacgtttgtgcgtggaaacgtgctcgctggcaactcttgcacggaccattattgtcggcgggtgggaatattggaacatccaacagagtaacggctcgagggagatcaactttaagtgtacggtgttaacacgggattgtgcgctagaaatagtatcggatgtttgaatc

SEQ ID NO: 62716 - DNA, 1218 bp, Homo sapiens
tatgggctagtacgggcctggggtcaaatcggcgaggcgtgccttggggctccgtgtcctgctgtctttccgtccgctgcctagtctgcatctgagtaacatggcggcggcggcggtagccaggctgtggtggcgcgggatcttgggggcctcggcgctgaccagggggactgggcgaccctccgttctgttgctgccggtgaggcgggagagcgccggggccgacacgcgccccactgtcagaccacggaatgatgtggcccacaagcagctctcagcttttggagagtatgtggctgaaatcttgcccaagtatgtccaacaagttcaggtgtcctgcttcaatgagttagaggtctgtatccatcctgatggcgtcatcccagtgctgactttcctcagggatcacaccaatgcacagttcaaatctctggttgacttgacagcagtggacgtcccaactcggcaaaaccgttttgagattgtctacaacctgttgtctctgcgcttcaactcacggatccgtgtgaagacctacacagatgagctgacgcccattgagtctgctgtctctgtgttcaaggcagccaactggtatgaaagggagatctgggacatgtttggagtcttctttgctaaccaccctgatctaagaaggatcctgacagattatggcttcgagggacatcctttccggaaagactttcctctatctggctatgttgagttacgttatgatgatgaagtgaagcgggtggtggcagagccggtggagttggcccaagagttccgcaaatttgacctgaacagcccctgggaggctttcccagtctatcgccaacccccggagagtctcaagcttgaagccggagacaagaagcctgatgccaagtagctccagggaacgcatgtggatcctagacagcgccttatctatgattgagtgtccgtgtaaataaattcctacttagacttaaaaaaaaaaaaaaaaaaaaaaaaaaaaaaaaaaacaaaacaaaaaaaaaaaaaaaaaaaaaaaaaaaaaaaaaaaaaaaaaaaaggagggggggccgcgcccaaaaaaaaacctcccccgccgaggagcccccacagacacgcccagcccgcacccattctcttcgttgtcaacaaacagggcggcctcccactaaatgaggcgcgggcgccgatatataatacgacgagccagagcaggcg

SEQ ID NO: 62717 - DNA, 1164 bp, Homo sapiens
tatgggctagtacgggcctggggtcaaatcggcgaggcgtgccttggggctccgtgtcctgctgtctttccgtccgctgcctagtctgcatctgagtaacatggcggcggcggcggtagccaggctgtggtggcgcgggatcttgggggcctcggcgctgaccagggggactgggcgaccctccgttctgttgctgccggtgaggcgggagagcgccggggccgacacgcgccccactgtcagaccacggaatgatgtggcccacaagcagctctcagcttttggagagtatgtggctgaaatcttgcccaagtatgtccaacaagttcaggtgtcctgcttcaatgagttagaggtctgtatccatcctgatggcgtcatcccagtgctgactttcctcagggatcacaccaatgcacagttcaaatctctggttgacttgacagcagtggacgtcccaactcggcaaaaccgttttgagattgtctacaacctgttgtctctgcgcttcaactcacggatccgtgtgaagacctacacagatgagctgacgcccattgagtctgctgtctctgtgttcaaggcagccaactggtatgaaagggagatctgggacatgtttggagtcttctttgctaaccaccctgatctaagaaggatcctgacagattatggcttcgagggacatcctttccggaaagactttcctctatctggctatgttgagttacgttatgatgatgaagtgaagcgggtggtggcagagccggtggagttggcccaagagttccgcaaatttgacctgaacagcccctgggaggctttcccagtctatcgccaacccccggagagtctcaagcttgaagccggagacaagaagcctgatgccaagtagctccagggaacgcatgtggatcctagacagcgccttatctatgattgagtgtccgtgtaaataaattcctacttagacttaaaaaaaacaaaagggggggggcataaaataccgcgggggcaagatagcgatccacctcgtggcaacgggccaggggggtataacgagcgggggggcacacgcgtgggaaccacggtctggaagcacacactcggggcatggcacacaagacagagctaaacgctgtagacagcgagtgacgagagaac

SEQ ID NO: 62718 - DNA, 1015 bp, Homo sapiens
tatgggctagtacgggcctggggtcaaatcggcgaggcgtgccttggggctccgtgtcctgctgtctttccgtccgctgcctagtctgcatctgagtaacatggcggcggcggcggtagccaggctgtggtggcgcgggatcttgggggcctcggcgctgaccagggggactgggcgaccctccgttctgttgctgccggtgaggcgggagagcgccggggccgacacgcgccccactgtcagaccacggaatgatgtggcccacaagcagctctcagcttttggagagtatgtggctgaaatcttgcccaagtatgtccaacaagttcaggtgtcctgcttcaatgagttagaggtctgtatccatcctgatggcgtcatcccagtgctgactttcctcagggatcacaccaatgcacagttcaaatctctggttgacttgacagcagtggacgtcccaactcggcaaaaccgttttgagattgtctacaacctgttgtctctgcgcttcaactcacggatccgtgtgaagacctacacagatgagctgacgcccattgagtctgctgtctctgtgttcaaggcagccaactggtatgaaagggagatctgggacatgtttggagtcttctttgctaaccaccctgatctaagaaggatcctgacagattatggcttcgagggacatcctttccggaaagactttcctctatctggctatgttgagttacgttatgatgatgaagtgaagcgggtggtggcagagccggtggagttggcccaagagttccgcaaatttgacctgaacagcccctgggaggctttcccagtctatcgccaacccccggagagtctcaagcttgaagccggagacaagaagcctgatgccaagtagctccagggaacgcatgtggatcctagacagcgccttatctatgattgagtgtccgtgtaaataaattcctacttagacttaaaaacaaacaccacacaaaaaaccctcaaaaaacagggg

SEQ ID NO: 62719 - DNA, 970 bp, Homo sapiens
gggccaggctgtggtggcgcgagacgttcttcgccgagagtcgtcggggtttcctgcttcaacagtgcttggacggaacccggcgctcgttccccaccccggccggccgcccatagccagccctccgtcacctcttcaccgcaccctcggcgctgaccaggggactgggcgaccctccgttctgttgctgccggtgaggcgggagagcgccggggccgacacgcgccccactgtcagaccacggaatgatgtggcccacaagcagctctcagcttttggagagtatgtggctgaaatcttgcccaagtatgtccaacaagttcaggtgtcctgcttcaatgagttagaggtctgtatccatcctgatggcgtcatcccagtgctgactttcctcagggatcacaccaatgcacagttcaaatctctggttgacttgacagcagtggacgtcccaactcggcaaaaccgttttgagattgtctacaacctgttgtctctgcgcttcaactcacggatccgtgtgaagacctacacagatgagctgacgcccattgagtctgctgtctctgtgttcaaggcagccaactggtatgaaagggagatctgggacatgtttggagtcttctttgctaaccaccctgatctaagaaggatcctgacagattatggcttcgagggacatcctttccggaaagactttcctctatctggctatgttgagttacgttatgatgatgaagtgaagcgggtggtggcagagccggtggagttggcccaagagttccgcaaatttgacctgaacagcccctgggaggctttcccagtctatcgccaacccccggagagtctcaagcttgaagccggagacaagaagcctgatgccaagtagctccagggaacgcatgtggatcctagacagcgccttatctatgattgagtgtccgtgtaaataaattcctacttagactta

SEQ ID NO: 62720 - DNA, 1188 bp, Homo sapiens
tatgggctagtacgggcctggggtcaaatcggcgaggcgtgccttggggctccgtgtcctgctgtctttccgtccgctgcctagtctgcatctgagtaacatggcggcggcggcggtagccaggctgtggtggcgcgggatcttgggggcctcggcgctgaccagggggactgggcgaccctccgttctgttgctgccggtgaggcgggagagcgccggggccgacacgcgccccactgtcagaccacggaatgatgtggcccacaagcagctctcagcttttggagagtatgtggctgaaatcttgcccaagtatgtccaacaagttcaggtaatacttactaatgttatttgggtctgggtcaagaaagaaccatgttcgcagggcatgtgggagtgggcagacttgtttcaaagaaactacagattcctccatcccaagcttggacttttctctcagcattaaaccaggtgactccagctgaagttagctgttccctcagtagctctttgttccctctcccctcactttcatgtgtgcaggtgtcctgcttcaatgagttagaggtctgtatccatcctgatggcgtcatcccagtgctgactttcctcagggatcacaccaatgcacagttcaaatctctggttgacttgacagcagtggacgtcccaactcggcaaaaccgttttgagattgtctacaacctgttgtctctgcgcttcaactcacggatccgtgtgaagacctacacagatgagctgacgcccattgagtctgctgtctctgtgttcaaggcagccaactggtatgaaagggagatctgggacatgtttggagtcttctttgctaaccaccctgatctaagaaggatcctgacagattatggcttcgagggacatcctttccggaaagactttcctctatctggctatgttgagttacgttatgatgatgaagtgaagcgggtggtggcagagccggtggagttggcccaagagttccgcaaatttgacctgaacagcccctgggaggctttcccagtctatcgccaacccccggagagtctcaagcttgaagccggagacaagaagcctgatgccaagtagctccagggaacgcatgtggatcctagacagcgccttatctatgattgagtgtccgtgtaaataaattcctacttagactta

SEQ ID NO: 62721 - DNA, 693 bp, Homo sapiens
tgcggccgctccaacatcagaatggatacagacctctaactcattgaagcaggacacctgaacttgttagaggtctgtatccatcctgatggcgtcatcccagtgctgactttcctcagggatcacaccaatgcacagttcaaatctctggttgacttgacagcagtggacgtcccaactcggcaaaaccgttttgagattgtctacaacctgttgtctctgcgcttcaactcacggatccgtgtgaagacctacacagatgagctgacgcccattgagtctgctgtctctgtgttcaaggcagccaactggtatgaaagggagatctgggacatgtttggagtcttctttgctaaccaccctgatctaagaaggatcctgacagattatggcttcgagggacatcctttccggaaagactttcctctatctggctatgttgagttacgttatgatgatgaagtgaagcgggtggtggcagagccggtggagttggcccaagagttccgcaaatttgacctgaacagcccctgggaggctttcccagtctatcgccaacccccggagagtctcaagcttgaagccggagacaagaagcctgatgccaagtagctccagggaacgcatgtggatcctagacagcgccttatctatgattgagtgtccgtgtaaataaattcctacttagactta

SEQ ID NO: 62722 - DNA, 663 bp, Homo sapiens
tatgggctagtacgggcctggggtcaaatcggcgaggcgtgccttggggctccgtgtcctgctgtctttccgtccgctgcctagtctgcatctgagtaacatggcggcggcggcggtagccaggctgtggtggcgcgggatcttgggggcctcggcgctgaccagggggactgggcgaccctccgttctgttgctgccggtgaggcgggagagcgccggggccgacacgcgccccactgtcagaccacggaatgatgtggcccacaagcagctctcagcttttggagagtatgtggctgaaatcttgcccaagtatgtccaacaagttcaggtgtcctgcttcaatgagttagaggtctgtatccatcctgatggcgtcatcccagtgctgactttcctcagggatcacaccaatgcacagttcaaatctctggttgacttgacagcagtggacgtcccaactcggcaaaaccgttttgagggtgtttatcgatgccaccattcttcaggtggagaaacgctgacagtgaggtcgattctcaccaacagcatttcccttggcccctaggacatggcgttttgaaaaacagttttcctggagttgttggacaagctggttggcagcatgtttagctcctcggtaactgctgaaggtaaagtgaa

SEQ ID NO: 62723 - DNA, 678 bp, Homo sapiens
gattcccgctgcactcaatagacagtctgttataaactcaccatctgtaaaagattttgaagcacggacaattttttcacttattatgtaactgcatttcacagcagcatcacttattttatttgtattcgatgattaatgctgtagaaagtttagtccttttctaagttcattgagtttttcatcatgcatcttttctgtaaactagtcaaaattctcaccatggtttgtttcataatggcatcttcacttgtattcttttgacacagaccaagtttggttacatattaaacacatgggactatacttccacaaagaaatatgcttgctcccacttctcttgaaacacgcggcgctatcaatccatctttcattttcccacttttgatagagacataggaacaaaaagagaattcacttttctttaagagaaacaacagcgcaagcctgatgataaatggtggctggccggtggagttggcccaagagttccgcaaatttgacctgaacagcccctgggaggctttcccagtctatcgccaacccccggagagtctcaagcttgaagccggagacaagaagcctgatgccaagtagctccagggaacgcatgtggatcctagacagcgccttatctatgattgagtgtccgtgtaaataaattcctacttagactta

SEQ ID NO: 62724 - DNA, 617 bp, Homo sapiens
tatgggctagtacgggcctggggtcaaatcggcgaggcgtgccttggggctccgtgtcctgctgtctttccgtccgctgcctagtctgcatctgagtaacatggcggcggcggcggtagccaggctgtggtggcgcgggatcttgggggcctcggcgctgaccaggggtgagcacgggcagccagctgagaccggggtcaggcgcagcggcgtgcccagtgcagagagctcctcagggctcatcccgcgcgtctgtgccttttatctccctgtgcagggactgggcgaccctccgttctgttgctgccggtgaggcgggagagcgccggggccgacacgcgccgtgagtatgtgcgggcagcgctcttctctgaactatcggcggggccccttagatgcctgtccttgccctaggatgcccttccctacgtcctcctggcaaatcttggagatctgacttgcagtggtcttcaccctgcatgcagaatcgagccctccctgtgcccttaggcctgttatggccctgattgttccttgtccatttcaatcatcccctttttgtctgattaaactgtcagctctttgaaagcaagcaatataacctttaggcctcagag

SEQ ID NO: 62725 - DNA, 1086 bp, Homo sapiens
tatgggctagtacgggcctggggtcaaatcggcgaggcgtgccttggggctccgtgtcctgctgtctttccgtccgctgcctagtctgcatctgagtaacatggcggcggcggcggtagccaggctgtggtggcgcgggatcttgggggcctcggcgctgaccaggggtgagcacgggcagccagctgagaccggggtcaggcgcagcggcgtgcccagtgcagagagctcctcagggctcatcccgcgcgtctgtgccttttatctccctgtgcagggactgggcgaccctccgttctgttgctgccggtgaggcgggagagcgccggggccgacacgcgccccactgtcagaccacggaatgatgtggcccacaagcagctctcagcttttggagagtatgtggctgaaatcttgcccaagtatgtccaacaagttcaggtgtcctgcttcaatgagttagaggtctgtatccatcctgatggcgtcatcccagtgctgactttcctcagggatcacaccaatgcacagttcaaatctctggttgacttgacagcagtggacgtcccaactcggcaaaaccgttttgagattgtctacaacctgttgtctctgcgcttcaactcacggatccgtgtgaagacctacacagatgagctgacgcccattgagtctgctgtctctgtgttcaaggcagccaactggtatgaaagggagatctgggacatgtttggagtcttctttgctaaccaccctgatctaagaaggatcctgacagattatggcttcgagggacatcctttccggaaagactttcctctatctggctatgttgagttacgttatgatgatgaagtgaagcgggtggtggcagagccggtggagttggcccaagagttccgcaaatttgacctgaacagcccctgggaggctttcccagtctatcgccaacccccggagagtctcaagcttgaagccggagacaagaagcctgatgccaagtagctccagggaacgcatgtggatcctagacagcgccttatctatgattgagtgtccgtgtaaataaattcctacttagactta

SEQ ID NO: 62726 - DNA, 939 bp, Homo sapiens
tatgggctagtacgggcctggggtcaaatcggcgaggcgtgccttggggctccgtgtcctgctgtctttccgtccgctgcctagtctgcatctgagtaacatggcggcggcggcggtagccaggctgtggtggcgcgggatcttgggggcctcggcgctgaccagggggactgggcgaccctccgttctgttgctgccggtgaggcgggagagcgccggggccgacacgcgccccactgtcagaccacggaatgatgtggcccacaagcagctctcagcttttggagagtatgtggctgaaatcttgcccaagtatgtccaacaagttcaggtgtcctgcttcaatgagttagaggtctgtatccatcctgatggcgtcatcccagtgctgactttcctcagggatcacaccaatgcacagttcaaatctctggttgacttgacagcagtggacgtcccaactcggcaaaaccgttttgagggatccgtgtgaagacctacacagatgagctgacgcccattgagtctgctgtctctgtgttcaaggcagccaactggtatgaaagggagatctgggacatgtttggagtcttctttgctaaccaccctgatctaagaaggatcctgacagattatggcttcgagggacatcctttccggaaagactttcctctatctggctatgttgagttacgttatgatgatgaagtgaagcgggtggtggcagagccggtggagttggcccaagagttccgcaaatttgacctgaacagcccctgggaggctttcccagtctatcgccaacccccggagagtctcaagcttgaagccggagacaagaagcctgatgccaagtagctccagggaacgcatgtggatcctagacagcgccttatctatgattgagtgtccgtgtaaataaattcctacttagactta

SEQ ID NO: 62727 - DNA, 593 bp, Homo sapiens
tatgggctagtacgggcctggggtcaaatcggcgaggcgtgccttggggctccgtgtcctgctgtctttccgtccgctgcctagtctgcatctgagtaacatggcggcggcggcggtagccaggctgtggtggcgcgggatcttgggggcctcggcgctgaccagggggactgggcgaccctccgttctgttgctgccggtgaggcgggagagcgccggggccgacacgcgccccactgtcagaccacggaatgatgtggcccacaagcagctctcagcttttggagagtatgtggctgaaatcttgcccaagtgtcctgcttcaatgagttagaggtctgtatccatcctgatggcgtcatcccagtgctgactttcctcagggatcacaccaatgcacagttcaaatctctggttgacttgacagcagtggacgtcccaactcggcaaaaccgttttgagtgaggtcagttgggagatctgagaaggttttgggggtaaggatattaatttcagtttgtaacatacaatagaacacagcagttaaactggaacttcagagtcaagtagatctgaagttggatcttggttct

SEQ ID NO: 62728 - DNA, 1090 bp, Homo sapiens
ggtgggcaaaggcatcttcctctgggaaggactggcacaagcacttggtccctgggttgtgtgcctgggaggccgggatcagggctggccctctttctccctggcaaagcaaaacctcccttttactactatcaaggggaagtaacttgaaggtgcctgtggcaggcagcaccttgagccaacaggaaccattgacatgcgaggcccagggcaggcagactgtgcagtggccattgggcggcccctcggggaggtggtgaccctccgcgtccttgagagttctctcaactgcagtgcgggggacatgttgctgctttggggccggctcacctggaggaagatgtgcaggaagctgttggacatgactttcagctccaagaccaacacgctggtggtgaggcagcgctgcgggcggccaggaggtggggtgctgctgcggtatgggagccagcttgctcctgaaaccttctacagagaatgtgacatgcagctctttgggccctggggtgaaatcgtgagcccctcgctgagtccagccacgagtaatgcagggggctgccggctcttcattaatgtggctccgcacgcacggattgccatccatgccctggccaccaacatgggcgctgggaccgagggagccaatgccagctacatcttgatccgggacacccacagcttgaggaccacagcgttccatgggcagcaggtgctctactgggagtcagagagcagccaggctgagatggagttcagcgagggcttcctgaaggctcaggccagcctgcggggccagtactggaccctccaatcatgggtaccggagatgcaggaccctcagtcctggaagggaaaggaaggaacctgagggtcattgaacatttgttccgtgtctggccagccctggagggttgacccctggtctcagtgctttccaattcgaactttttccaatcttaggtatctactttagagtcttctccaatgtccaaaaggctagggggttggaggtggggactctggaaaagcagcccccatttcctcgggtaccaataaataaaacatgcaggctgaccggcgtttttttctt

SEQ ID NO: 62729 - DNA, 783 bp, Homo sapiens
caactggcgagaagcagggacaggcctcatacttgggtctttctggcttcagcacgctttccttccacacacgtgtactggcacccactaaatgctgagctctgctcaacgctcggaagaagcaggcccctctttctccctggcaaagcaaaacctcccttttactactatcaaggggaagtaacttgaaggtgcctgtggcaggcagcaccttgagccaacaggaaccattgacatgcgaggcccagggcaggcagactgtgcagtggccattgggcggcccctcggggaggtggtgaccctccgcgtccttgagagttctctcaactgcagtgcgggggacatgttgctgctttggggccggctcacctggaggaagatgtgcaggaagctgttggacatgactttcagctccaagaccaacacgctggtggtgaggcagcgctgcgggcggccaggaggtggggtgctgctgcggtatgggagccagcttgctcctgaaaccttctacagaggtatggccaggccttctccacctcccttgggtgctccagtcctggcagggaggctgggtgggtgctgctggggatggggccagtcccagtggggcagtgggaagatacggagggaactgactgagatggaaggaactggggttggccagtgtcagtctgcacgtgccagggaggggtcacaggatgaatgctatatccctcctttttgggaccgtgcagcaagatggacggatgtgggacatggtccacatcctcagtcagtccctca

SEQ ID NO: 62730 - DNA, 4555 bp, Homo sapiens
caactggcgagaagcagggacaggcctcatacttgggtctttctggcttcagcacgctttccttccacacacgtgtactggcacccactaaatgctgagctctgctcaacgctcggaagaagcaggccctgccttatcatgcgcacactctaggggaaaacaagtaacagcgagtaaacaaaggaacagacgacatcagggtaaagtgatggagagactgcggtgaggccaccagcctccataaggagacaggccttggtgaagtcgctgtgcctcggttctcagtgagttgtcttcaggctttggagccacaggccgtgtcttcttacttgagccctggtgctcccttaaaaggccgccctccttcccctggcttccagaggcagaggcagaggcagaggcgggctgcaggcggcatcctacacctggagctgctggtggccgtgggccccgatgtcttccaggctcaccaggaggacacagagcgctatgtgctcaccaacctcaacatcggggcagaactgcttcgggacccgtccctgggggctcagtttcgggtgcacctggtgaagatggtcattctgacagagcctgagggtgctccaaatatcacagccaacctcacctcgtccctgctgagcgtctgtgggtggagccagaccatcaaccctgaggacgacacggatcctggccatgctgacctggtcctctatatcactaggtttgacctggagttgcctgatggtaaccggcaggtgcggggcgtcacccagctgggcggtgcctgctccccaacctggagctgcctcattaccgaggacactggcttcgacctgggagtcaccattgcccatgagattgggcacagcttcggcctggagcacgacggcgcgcccggcagcggctgcggccccagcggacacgtgatggcttcggacggcgccgcgccccgcgccggcctcgcctggtccccctgcagccgccggcagctgctgagcctgctcagacccgtccctccgtcgccgctccctctgctggccacccacctctgcgccggcaggagccttagtcttggtcccagccaagagccggctcctggtggggggcgcgggccgagaactcctgttcccactcacaaaaggccacgcttccaaacgcttccatcctcgtgcccactcctccgtcccgcctcctcccggtgtacaccccgggactgagccgggcctgagccgggccttgtcgcagcgcaggacgggcgcgctgcgtgtgggacccgccgcggcctcaacccgggtccgcggggcacccgccggatgcgcagcctggcctctactacagcgccaacgagcagtgccgcgtggccttcggccccaaggctgtcgcctgcaccttcgccagggagcacctggtgagtctgccggcggtggcctgggattggctgtgaggtccctccgcatcacccagctcacgtccccccaaacgtgcatggatatgtgccaggccctctcctgccacacagacccgctggaccaaagcagctgcagccgcctcctcgttcctctcctggatgggacagaatgtggcgtggagaagtggtgctccaagggtcgctgccgctccctggtggagctgacccccatagcagcagtgcatgggcgctggtctagctggggtccccgaagtccttgctcccgctcctgcggaggaggtgtggtcaccaggaggcggcagtgcaacaaccccagacctgcctttggggggcgtgcatgtgttggtgctgacctccaggccgagatgtgcaacactcaggcctgcgagaagacccagctggagttcatgtcgcaacagtgcgccaggaccgacggccagccgctgcgctcctcccctggcggcgcctccttctaccactggggtgctgctgtaccacacagccaaggggatgctctgtgcagacacatgtgccgggccattggcgagagcttcatcatgaagcgtggagacagcttcctcgatgggacccggtgtatgccaagtggcccccgggaggacgggaccctgagcctgtgtgtgtcgggcagctgcaggacatttggctgtgatggtaggatggactcccagcaggtatgggacaggtgccaggtgtgtggtggggacaacagcacgtgcagcccacggaagggctctttcacagctggcagagcgagagaatatgtcacgtttctgacagttacccccaacctgaccagtgtctacattgccaaccacaggcctctcttcacacacttggcggtgaggatcggagggcgctatgtcgtggctgggaagatgagcatctcccctaacaccacctacccctccctcctggaggatggtcgtgtcgagtacagagtggccctcaccgaggaccggctgccccgcctggaggagatccgcatctggggacccctccaggaagatgctgacatccaggtgggaggtgtcagagcccagctcatgcacatcagctggtggagcaggcctggccttggagaacgagacctgtgtgccaggggcagatggcctggaggctccagtgactgaggggcctggctccgtagatgagaagctgcctgcccctgagccctgtgtcgggatgtcatgtcctccaggctggggccatctggatgccacctctgcaggggagaaggctccctccccatggggcagcatcaggacgggggctcaagctgcacacgtgtggacccctgcggcagggtcgtgctccgtctcctgcgggcgaggtctgatggagctgcgtttcctgtgcatggactctgccctcagggtgcctgtccaggaagagctgtgtggcctggcaagcaagcctgggagccggcgggaggtctgccaggctgtcccgtgccctgctcggtggcagtacaagctggcggcctgcagcgtgagctgtgggagaggggtcgtgcggaggatcctgtattgtgcccgggcccatggggaggacgatggtgaggagatcctgttggacacccagtgccaggggctgcctcgcccggaaccccaggaggcctgcagcctggagccctgcccacctaggtggaaagtcatgtcccttggcccatgttcggccagctgtggccttggcactgctagacgctcggtggcctgtgtgcagctcgaccaaggccaggacgtggaggtggacgaggcggcctgtgcggcgctggtgcggcccgaggccagtgtcccctgtctcattgccgactgcacctaccgctggcatgttggcacctggatggagtgctctgtttcctgtggggatggcatccagcgccggcgtgacacctgcctcggaccccaggcccaggcgcctgtgccagctgatttctgccagcacttgcccaagccggtgactgtgcgtggctgctgggctgggccctgtgtgggacagggtacgcccagcctggtgccccacgaagaagccgctgctccaggacggaccacagccacccctgctggtgcctccctggagtggtcccaggcccggggcctgctcttctccccggctccccagcctcggcggctcctgcccgggccccaggaaaactcagtgcagtccagtgcctgtggcaggcagcaccttgagccaacaggaaccattgacatgcgaggcccagggcaggcagactgtgcagtggccattgggcggcccctcggggaggtggtgaccctccgcgtccttgagagttctctcaactgcagtgcgggggacatgttgctgctttggggccggctcacctggaggaagatgtgcaggaagctgttggacatgactttcagctccaagaccaacacgctggtggtgaggcagcgctgcgggcggccaggaggtggggtgctgctgcggtatgggagccagcttgctcctgaaaccttctacagagaatgtgacatgcagctctttgggccctggggtgaaatcgtgagcccctcgctgagtccagccacgagtaatgcagggggctgccggctcttcattaatgtggctccgcacgcacggattgccatccatgccctggccaccaacatgggcgctgggaccgagggagccaatgccagctacatcttgatccgggacacccacagcttgaggaccacagcgttccatgggcagcaggtgctctactgggagtcagagagcagccaggctgagatggagttcagcgagggcttcctgaaggctcaggccagcctgcggggccagtactggaccctccaatcatgggtaccggagatgcaggaccctcagtcctggaagggaaaggaaggaacctgagggtcattgaacatttgttccgtgtctggccagccctggagggttgacccctggtctcagtgctttccaattcgaactttttccaatcttaggtatctactttagagtcttctccaatgtccaaaaggctagggggttggaggtggggactctggaaaagcagcccccatttcctcgggtaccaataaataaaacatgcaggctgaccggcgtttttttctt

SEQ ID NO: 62731 - DNA, 448 bp, Homo sapiens
gtgcactgtgctatccccagagcctggtacaggtcagtgttggtgattgcttcccgttatttttgtctttgttgtttttttagagagggtctcactgttggccaggctggagtgctatgttgcccaggctgctctgaaactcctgggctcaagtgatctgcctgcctcaggctcccaaagttttgggtttacaggcatgagctaccgtgcctggccagtgattgcttgctgagcgaaagattatagggatgcaagaagaagttggaaggcttcccaggggaggtggccatgacagtgaccctcagggaacccactggacaaggcctgaagctctttgtctgcaggtttacaggcggtatggcgaggagtatggcaacctcacccgcccagacatcaccttcacctacttccagcctaagccacggcaggcctgggtgtgggccgctgt

SEQ ID NO: 62732 - DNA, 4967 bp, Homo sapiens
gtggagagttgagccagaaccacgatgtctttggcacagcctctcatctgtcagatgggagcggggaccccggagagggagtcagccgaggtcctggcattccttgtgaacccccgtctgtgggtttctggtccagtgtcccttctccagattagatggcttaggcctcctctaagggggtgggcgtgcacatccggagagctgtctggtgtgcaggactgggctgcaggttaccctgaactgcaaccatcttagagcaaggcccagcttgcagcaggaggagctgcaggccgcccaccctagccacggcccctgccctggcaggaagcttccaagagtaaacactgcctaatcgtcccgcccagtagtgagcaggcctgtcccattccatactgaccagattcccagtcaccaaggccccctctcactccgctccactcctcgggctggctctcctgaggatgcaccagcgtcacccccgggcaagatgccctcccctctgtgtggccggaatccttgcctgtggctttctcctgggctgctggggaccctcccatttccagcagagttgtcttcaggctttggagccacaggccgtgtcttcttacttgagccctggtgctcccttaaaaggccgccctccttcccctggcttccagaggcagaggcagaggcagaggcgggctgcaggcggcatcctacacctggagctgctggtggccgtgggccccgatgtcttccaggctcaccaggaggacacagagcgctatgtgctcaccaacctcaacatcggggcagaactgcttcgggacccgtccctgggggctcagtttcgggtgcacctggtgaagatggtcattctgacagagcctgagggtgctccaaatatcacagccaacctcacctcgtccctgctgagcgtctgtgggtggagccagaccatcaaccctgaggacgacacggatcctggccatgctgacctggtcctctatatcactaggtttgacctggagttgcctgatggtaaccggcaggtgcggggcgtcacccagctgggcggtgcctgctccccaacctggagctgcctcattaccgaggacactggcttcgacctgggagtcaccattgcccatgagattgggcacagcttcggcctggagcacgacggcgcgcccggcagcggctgcggccccagcggacacgtgatggcttcggacggcgccgcgccccgcgccggcctcgcctggtccccctgcagccgccggcagctgctgagcctgctcagcgcaggacgggcgcgctgcgtgtgggacccgccgcggcctcaacccgggtccgcggggcacccgccggatgcgcagcctggcctctactacagcgccaacgagcagtgccgcgtggccttcggccccaaggctgtcgcctgcaccttcgccagggagcacctggatatgtgccaggccctctcctgccacacagacccgctggaccaaagcagctgcagccgcctcctcgttcctctcctggatgggacagaatgtggcgtggagaagtggtgctccaagggtcgctgccgctccctggtggagctgacccccatagcagcagtgcatgggcgctggtctagctggggtccccgaagtccttgctcccgctcctgcggaggaggtgtggtcaccaggaggcggcagtgcaacaaccccagacctgcctttggggggcgtgcatgtgttggtgctgacctccaggccgagatgtgcaacactcaggcctgcgagaagacccagctggagttcatgtcgcaacagtgcgccaggaccgacggccagccgctgcgctcctcccctggcggcgcctccttctaccactggggtgctgctgtaccacacagccaaggggatgctctgtgcagacacatgtgccgggccattggcgagagcttcatcatgaagcgtggagacagcttcctcgatgggacccggtgtatgccaagtggcccccgggaggacgggaccctgagcctgtgtgtgtcgggcagctgcaggacatttggctgtgatggtaggatggactcccagcaggtatgggacaggtgccaggtgtgtggtggggacaacagcacgtgcagcccacggaagggctctttcacagctggcagagcgagagaatatgtcacgtttctgacagttacccccaacctgaccagtgtctacattgccaaccacaggcctctcttcacacacttggcggtgaggatcggagggcgctatgtcgtggctgggaagatgagcatctcccctaacaccacctacccctccctcctggaggatggtcgtgtcgagtacagagtggccctcaccgaggaccggctgccccgcctggaggagatccgcatctggggacccctccaggaagatgctgacatccaggtttacaggcggtatggcgaggagtatggcaacctcacccgcccagacatcaccttcacctacttccagcctaagccacggcaggcctgggtgtgggccgctgtgcgtgggccctgctcggtgagctgtggggcagggctgcgctgggtaaactacagctgcctggaccaggccaggaaggagttggtggagactgtccagtgccaagggagccagcagccaccagcgtggccagaggcctgcgtgctcgaaccctgccctccctactgggcggtgggagacttcggcccatgcagcgcctcctgtgggggcggcctgcgggagcggccagtgcgctgcgtggaggcccagggcagcctcctgaagacattgcccccagcccggtgcagagcaggggcccagcagccagctgtggcgctggaaacctgcaacccccagccctgccctgccaggtgggaggtgtcagagcccagctcatgcacatcagctggtggagcaggcctggccttggagaacgagacctgtgtgccaggggcagatggcctggaggctccagtgactgaggggcctggctccgtagatgagaagctgcctgcccctgagccctgtgtcgggatgtcatgtcctccaggctggggccatctggatgccacctctgcaggggagaaggctccctccccatggggcagcatcaggacgggggctcaagctgcacacgtgtggacccctgcggcagggtcgtgctccgtctcctgcgggcgaggtctgatggagctgcgtttcctgtgcatggactctgccctcagggtgcctgtccaggaagagctgtgtggcctggcaagcaagcctgggagccggcgggaggtctgccaggctgtcccgtgccctgctcggtggcagtacaagctggcggcctgcagcgtgagctgtgggagaggggtcgtgcggaggatcctgtattgtgcccgggcccatggggaggacgatggtgaggagatcctgttggacacccagtgccaggggctgcctcgcccggaaccccaggaggcctgcagcctggagccctgcccacctaggtggaaagtcatgtcccttggcccatgttcggccagctgtggccttggcactgctagacgctcggtggcctgtgtgcagctcgaccaaggccaggacgtggaggtggacgaggcggcctgtgcggcgctggtgcggcccgaggccagtgtcccctgtctcattgccgactgcacctaccgctggcatgttggcacctggatggagtgctctgtttcctgtggggatggcatccagcgccggcgtgacacctgcctcggaccccaggcccaggcgcctgtgccagctgatttctgccagcacttgcccaagccggtgactgtgcgtggctgctgggctgggccctgtgtgggacagggtacgcccagcctggtgccccacgaagaagccgctgctccaggacggaccacagccacccctgctggtgcctccctggagtggtcccaggcccggggcctgctcttctccccggctccccagcctcggcggctcctgcccgggccccaggaaaactcagtgcagtccagtgcctgtggcaggcagcaccttgagccaacaggaaccattgacatgcgaggcccagggcaggcagactgtgcagtggccattgggcggcccctcggggaggtggtgaccctccgcgtccttgagagttctctcaactgcagtgcgggggacatgttgctgctttggggccggctcacctggaggaagatgtgcaggaagctgttggacatgactttcagctccaagaccaacacgctggtggtgaggcagcgctgcgggcggccaggaggtggggtgctgctgcggtatgggagccagcttgctcctgaaaccttctacagagaatgtgacatgcagctctttgggccctggggtgaaatcgtgagcccctcgctgagtccagccacgagtaatgcagggggctgccggctcttcattaatgtggctccgcacgcacggattgccatccatgccctggccaccaacatgggcgctgggaccgagggagccaatgccagctacatcttgatccgggacacccacagcttgaggaccacagcgttccatgggcagcaggtgctctactgggagtcagagagcagccaggctgagatggagttcagcgagggcttcctgaaggctcaggccagcctgcggggccagtactggaccctccaatcatgggtaccggagatgcaggaccctcagtcctggaagggaaaggaaggaacctgagggtcattgaacatttgttccgtgtctggccagccctggagggttgacccctggtctcagtgctttccaattcgaactttttccaatcttaggtatctactttagagtcttctccaatgtccaaaaggctagggggttggaggtggggactctggaaaagcagcccccatttcctcgggtaccaataaataaaacatgcaggctgaccggcgtttttttctt

SEQ ID NO: 62733 - DNA, 307 bp, Homo sapiens
aaaagttgacaaaacataaagtatctctagacagcaaggaaataatttcacgagattgctaaattgatgtcaacacctgcagtctaaaatttatacagttcaatatgtgtcatttgatcactggcatgtcaaatatagaacagctatgactttgctggccagtaaattatctagcagtgaaaatcactttttaggagagtcgcaatcaaacattgtttaacgtgggagcctataaagatgcaaattcctgaacaacagtgtctaagaaaagtacattgggtcactctgaacaggtggtatgaacatt

SEQ ID NO: 62734 - DNA, 2494 bp, Homo sapiens
  misc_feature (14)..(14): n is a, c, g, or t
  misc_feature (16)..(16): n is a, c, g, or t
  misc_feature (23)..(23): n is a, c, g, or t
  misc_feature (30)..(30): n is a, c, g, or t
ccccgccacaaccnangctagtncgaggcngggtgtgtaatcggccgagggaagccctggggcgctgccgccgctttccttaaccacaaatcaggccggacaggagagggaggggtgggggacagtgggtgggcattcagactgccagcactttgctatctacagccggggctcccgagcggcagaaagttccggccactctctgccgcttgggttgggcgaagccaggaccgtgccgcgccaccgccaggatatggagctactgtcgccaccgctccgcgacgtagacctgacggcccccgacggctctctctgctcctttgccacaacggacgacttctatgacgacccgtgtttcgactccccggacctgcgcttcttcgaagacctggacccgcgcctgatgcacgtgggcgcgctcctgaaacccgaagagcactcgcacttccccgcggcggtgcacccggccccgggcgcacgtgaggacgagcatgtgcgcgcgcccagcgggcaccaccaggcgggccgctgcctactgtgggcctgcaaggcgtgcaagcgcaagaccaccaacgccgaccgccgcaaggccgccaccatgcgcgagcggcgccgcctgagcaaagtaaatgaggcctttgagacactcaagcgctgcacgtcgagcaatccaaaccagcggttgcccaaggtggagatcctgcgcaacgccatccgctatatcgagggcctgcaggctctgctgcgcgaccaggacgccgcgccccctggcgccgcagccgccttctatgcgccgggcccgctgcccccgggccgcggcggcgagcactacagcggcgactccgacgcgtccagcccgcgctccaactgctccgacggcatgatggactacagcggcccccgagcggcgcccggcggcggaactgctacgaaggcgcctactacaacgaggcgcccagcgaacccaggcccgggaagagtgcggcggtgtcgagcctagactgcctgtccagcatcgtggagcgcatctccaccgagagccctgcggcgcccgccctcctgctggcggacgtgccttctgagtcgcctccgcgcaggcaagaggctgccgcccccagcgagggagagagcagcggcgaccccacccagtcaccggacgccgccccgcagtgccctgcgggtgcgaaccccaacccgatataccaggtgctctgagggggatggtggccgcccacccgcccgagggatggtgcccctagggtccctcgcgcccaaaagattgaacttaaatgcccccctcccaacagcgctttaaaagcgacctctcttgaggtaggagaggcgggagaactgaagtttccgcccccgccccacagggcaaggacacagcgcggttttttccacgcagcacccttctcggagacccattgcgatggccgctccgtgttcctcggtgggccagagctgaaccttgaggggctaggttcagctttctcgcgccctcccccatgggggtgagaccctcgcagacctaagccctgccccgggatgcaccggttatttgggggggcgtgagacccagtgcactccggtcccaaatgtagcaggtgtaaccgtaacccacccccaacccgtttcccggttcaggaccactttttgtaatacttttgtaatctattcctgtaaataagagttgctttgccagagcaggagcccctggggctgtatttatctctgaggcatggtgtgtggtgctacagggaatttgtacgtttataccgcaggcgggcgagccgcgggcgctcgctcaggtgatcaaaataaaggcgctaatttataccgcaaaaaaaaaaaaaaaaaaaactcgaggccattttctcttaaacaaaacaaaactttctaagtacagtcattctctaggatttgggaagctccttgcacttggaacagggctcaggtgggtggagcagtaaggcactacccagagagcttgctgctgcggccctgtcctgcggcctcaaagttcttctttactatatataacgtgcggtcatacctttcttcgttgtggtggggatggaagagcagagggagcatggcccaggggtgttgaggccagcggtgagagccgtgttagccaagacatggaactgtgttctcaagggttatgtggggcgtgggctctccatagtgtgtatgaaaagcttgttgactctagcggctcagagaggactttgctgggtttctttctgtgaatatctccgtgctgaccatgctggaattggatgattctgcaattcgggacctactgcaggggtccgtttagtaacgtcttgtctgtgatctttgttcttgacctctagaccccaagatgtgaacagtgcacgtgttaatgtcatctttgctcatgtgttataagccccaagttgctgtatattttcacaagtatgtctacacactggtcatgattttgataataaataacgataaatcg

SEQ ID NO: 62735 - DNA, 1583 bp, Homo sapiens
  misc_feature (14)..(14): n is a, c, g, or t
  misc_feature (16)..(16): n is a, c, g, or t
  misc_feature (23)..(23): n is a, c, g, or t
  misc_feature (30)..(30): n is a, c, g, or t
ccccgccacaaccnangctagtncgaggcngggtgtgtaatcggccgaggctctgctcctttgccacaacggacgacttctatgacgacccgtgtttcgactccccggacctgcgcttcttcgaagacctggacccgcgcctgatgcacgtgggcgcgctcctgaaacccgaagagcactcgcacttccccgcggcggtgcacccggccccgggcgcacgtgaggacgagcatgtgcgcgcgcccagcgggcaccaccaggcgggccgctgcctactgtgggcctgcaaggcgtgcaagcgcaagaccaccaacgccgaccgccgcaaggccgccaccatgcgcgagcggcgccgcctgagcaaagtaaatgaggcctttgagacactcaagcgctgcacgtcgagcaatccaaaccagcggttgcccaaggtggagatcctgcgcaacgccatccgctatatcgagggcctgcaggctctgctgcgcgaccaggacgccgcgccccctggcgccgcagccgccttctatgcgccgggcccgctgcccccgggccgcggcggcgagcactacagcggcgactccgacgcgtccagcccgcgctccaactgctccgacggcatgatggactacagcggcccccgagcggcgcccggcggcggaactgctacgaaggcgcctactacaacgaggcgcccagcgaacccaggcccgggaagagtgcggcggtgtcgagcctagactgcctgtccagcatcgtggagcgcatctccaccgagagccctgcggcgcccgccctcctgctggcggacgtgccttctgagtcgcctccgcgcaggcaagaggctgccgcccccagcgagggagagagcagcggcgaccccacccagtcaccggacgccgccccgcagtgccctgcgggtgcgaaccccaacccgatataccaggtgctctgagggggatggtggccgcccacccgcccgagggatggtgcccctagggtccctcgcgcccaaaagattgaacttaaatgcccccctcccaacagcgctttaaaagcgacctctcttgaggtaggagaggcgggagaactgaagtttccgcccccgccccacagggcaaggacacagcgcggttttttccacgcagcacccttctcggagacccattgcgatggccgctccgtgttcctcggtgggccagagctgaaccttgaggggctaggttcagctttctcgcgccctcccccatgggggtgagaccctcgcagacctaagccctgccccgggatgcaccggttatttgggggggcgtgagacccagtgcactccggtcccaaatgtagcaggtgtaaccgtaacccacccccaacccgtttcccggttcaggaccactttttgtaatacttttgtaatctattcctgtaaataagagttgctttgccagagcaggagcccctggggctgtatttatctctgaggcatggtgtgtggtgctacagggaatttgtacgtttataccgcaggcgggcgagccgcgggcgctcgctcaggtgatcaaaataaaggcgctaatttataccgc

SEQ ID NO: 62736 - DNA, 1671 bp, Homo sapiens
ttggtgtggggcgcgaggccaaggacgcggttgccggcgcggccgcctgggcatttggagcttacctggtcagccaccgtcttcctgggtacgtagagcgtgacggtcgcccggatcgtgcctcttcttcgtggcatctctttgtccactatatcggatcgagccttctatgacgacccgtgtttcgactccccggacctgcgcttcttcgaagacctggacccgcgcctgatgcacgtgggcgcgctcctgaaacccgaagagcactcgcacttccccgcggcggtgcacccggccccgggcgcacgtgaggacgagcatgtgcgcgcgcccagcgggcaccaccaggcgggccgctgcctactgtgggcctgcaaggcgtgcaagcgcaagaccaccaacgccgaccgccgcaaggccgccaccatgcgcgagcggcgccgcctgagcaaagtaaatgaggcctttgagacactcaagcgctgcacgtcgagcaatccaaaccagcggttgcccaaggtggagatcctgcgcaacgccatccgctatatcgagggcctgcaggctctgctgcgcgaccaggacgccgcgccccctggcgccgcagccgccttctatgcgccgggcccgctgcccccgggccgcggcggcgagcactacagcggcgactccgacgcgtccagcccgcgctccaactgctccgacggcatgatggactacagcggcccccgagcggcgcccggcggcggaactgctacgaaggcgcctactacaacgaggcgcccagcgaacccaggcccgggaagagtgcggcggtgtcgagcctagactgcctgtccagcatcgtggagcgcatctccaccgagagccctgcggcgcccgccctcctgctggcggacgtgccttctgagtcgcctccgcgcaggcaagaggctgccgcccccagcgagggagagagcagcggcgaccccacccagtcaccggacgccgccccgcagtgccctgcgggtgcgaaccccaacccgatataccaggtgctctgagggggatggtggccgcccacccgcccgagggatggtgcccctagggtccctcgcgcccaaaagattgaacttaaatgcccccctcccaacagcgctttaaaagcgacctctcttgaggtaggagaggcgggagaactgaagtttccgcccccgccccacagggcaaggacacagcgcggttttttccacgcagcacccttctcggagacccattgcgatggccgctccgtgttcctcggtgggccagagctgaaccttgaggggctaggttcagctttctcgcgccctcccccatgggggtgagaccctcgcagacctaagccctgccccgggatgcaccggttatttgggggggcgtgagacccagtgcactccggtcccaaatgtagcaggtgtaaccgtaacccacccccaacccgtttcccggttcaggaccactttttgtaatacttttgtaatctattcctgtaaataagagttgctttgccagagcaggagcccctggggctgtatttatctctgaggcatggtgtgtggtgctacagggaatttgtacgtttataccgcaggcgggcgagccgcgggcgctcgctcaggtgatcaaaataaaggcgctaatttataccgc

SEQ ID NO: 62737 - DNA, 687 bp, Homo sapiens
  misc_feature (16)..(16): n is a, c, g, or t
tcctggtatatcgggntggggttcgcacccgcagggcactgcggggcggcgtccggtgactgggatggtggccgcccacccgcccgagggatggtgcccctagggtccctcgcgcccaaaagattgaacttaaatgcccccctcccaacagcgctttaaaagcgacctctcttgaggtaggagaggcgggagaactgaagtttccgcccccgccccacagggcaaggacacagcgcggttttttccacgcagcacccttctcggagacccattgcgatggccgctccgtgttcctcggtgggccagagctgaaccttgaggggctaggttcagctttctcgcgccctcccccatgggggtgagaccctcgcagacctaagccctgccccgggatgcaccggttatttgggggggcgtgagacccagtgcactccggtcccaaatgtagcaggtgtaaccgtaacccacccccaacccgtttcccggttcaggaccactttttgtaatacttttgtaatctattcctgtaaataagagttgctttgccagagcaggagcccctggggctgtatttatctctgaggcatggtgtgtggtgctacagggaatttgtacgtttataccgcaggcgggcgagccgcgggcgctcgctcaggtgatcaaaataaaggcgctaatttataccgc

SEQ ID NO: 62738 - DNA, 1843 bp, Homo sapiens
  misc_feature (14)..(14): n is a, c, g, or t
  misc_feature (16)..(16): n is a, c, g, or t
  misc_feature (23)..(23): n is a, c, g, or t
  misc_feature (30)..(30): n is a, c, g, or t
ccccgccacaaccnangctagtncgaggcngggtgtgtaatcggccgagggaagccctggggcgctgccgccgctttccttaaccacaaatcaggccggacaggagagggaggggtgggggacagtgggtgggcattcagactgccagcactttgctatctacagccggggctcccgagcggcagaaagttccggccactctctgccgcttgggttgggcgaagccaggaccgtgccgcgccaccgccaggatatggagctactgtcgccaccgctccgcgacgtagacctgacggcccccgacggctctctctgctcctttgccacaacggacgacttctatgacgacccgtgtttcgactccccggacctgcgcttcttcgaagacctggacccgcgcctgatgcacgtgggcgcgctcctgaaacccgaagagcactcgcacttccccgcggcggtgcacccggccccgggcgcacgtgaggacgagcatgtgcgcgcgcccagcgggcaccaccaggcgggccgctgcctactgtgggcctgcaaggcgtgcaagcgcaagaccaccaacgccgaccgccgcaaggccgccaccatgcgcgagcggcgccgcctgagcaaagtaaatgaggcctttgagacactcaagcgctgcacgtcgagcaatccaaaccagcggttgcccaaggtggagatcctgcgcaacgccatccgctatatcgagggcctgcaggctctgctgcgcgaccaggacgccgcgccccctggcgccgcagccgccttctatgcgccgggcccgctgcccccgggccgcggcggcgagcactacagcggcgactccgacgcgtccagcccgcgctccaactgctccgacggcatgatggactacagcggcccccgagcggcgcccggcggcggaactgctacgaaggcgcctactacaacgaggcgcccagcgaacccaggcccgggaagagtgcggcggtgtcgagcctagactgcctgtccagcatcgtggagcgcatctccaccgagagccctgcggcgcccgccctcctgctggcggacgtgccttctgagtcgcctccgcgcaggcaagaggctgccgcccccagcgagggagagagcagcggcgaccccacccagtcaccggacgccgccccgcagtgccctgcgggtgcgaaccccaacccgatataccaggtgctctgagggggatggtggccgcccacccgcccgagggatggtgcccctagggtccctcgcgcccaaaagattgaacttaaatgcccccctcccaacagcgctttaaaagcgacctctcttgaggtaggagaggcgggagaactgaagtttccgcccccgccccacagggcaaggacacagcgcggttttttccacgcagcacccttctcggagacccattgcgatggccgctccgtgttcctcggtgggccagagctgaaccttgaggggctaggttcagctttctcgcgccctcccccatgggggtgagaccctcgcagacctaagccctgccccgggatgcaccggttatttgggggggcgtgagacccagtgcactccggtcccaaatgtagcaggtgtaaccgtaacccacccccaacccgtttcccggttcaggaccactttttgtaatacttttgtaatctattcctgtaaataagagttgctttgccagagcaggagcccctggggctgtatttatctctgaggcatggtgtgtggtgctacagggaatttgtacgtttataccgcaggcgggcgagccgcgggcgctcgctcaggtgatcaaaataaaggcgctaatttataccgc

SEQ ID NO: 62739 - DNA, 1411 bp, Homo sapiens
  misc_feature (14)..(14): n is a, c, g, or t
  misc_feature (16)..(16): n is a, c, g, or t
  misc_feature (23)..(23): n is a, c, g, or t
  misc_feature (30)..(30): n is a, c, g, or t
ccccgccacaaccnangctagtncgaggcngggtgtgtaatcggccgagggaagccctggggcgctgccgccgctttccttaaccacaaatcaggccggacaggagagggaggggtgggggacagtgggtgggcattcagactgccagcactttgctatctacagccggggctcccgagcggcagaaagttccggccactctctgccgcttgggttgggcgaagccaggaccgtgccgcgccaccgccaggatatggagctactgtcgccaccgctccgcgacgtagacctgacggcccccgacggctctctctgctcctttgccacaacggacgacttctatgacgacccgtgtttcgactccccggacctgcgcttcttcgaagacctggacccgcgcctgatgcacgtgggcgcgctcctgaaacccgaagagcactcgcacttccccgcggcggtgcacccggccccgggcgcacgtgaggacgagcatgtgcgcgcgcccagcgggcaccaccaggcgggccgctgcctactgtgggcctgcaaggcgtgcaagcgcaagaccaccaacgccgaccgccgcaaggccgccaccatgcgcgagcggcgccgcctgagcaaagtaaatgaggcctttgagacactcaagcgctgcacgtcgagcaatccaaaccagcggttgcccaaggtggagatcctgcgcaacgccatccgctatatcgagggcctgcaggctctgctgcgcgaccaggacgccgcgccccctggcgccgcagccgccttctatgcgccgggcccgctgcccccgggccgcggcggcgagcactacagcggcgactccgacgcgtccagcccgcgctccaactgctccgacggcatgatggactacagcggcccccgagcggcgcccggcggcggaactgctacgaaggcgcctactacaacgaggcgcccagcgaacccaggcccgggaagagtgcggcggtgtcgagcctagactgcctgtccagcatcgtggagcgcatctccaccgagagccctgcggcgcccgccctcctgctggcggacgtgccttctgagtcgcctccgcgcaggcaagaggctgccgcccccagcgagggagagagcagcggcgaccccaacccagtgcactccggtcccaaatgtagcaggtgtaaccgtaacccacccccaacccgtttcccggttcaggaccactttttgtaatacttttgtaatctattcctgtaaataagagttgctttgccagagcaggagcccctggggctgtatttatctctgaggcatggtgtgtggtgctacagggaatttgtacgtttataccgcaggcgggcgagccgcgggcgctcgctcaggtgatcaaaataaaggcgctaatttataccgc

SEQ ID NO: 62740 - DNA, 1729 bp, Homo sapiens
  misc_feature (14)..(14): n is a, c, g, or t
  misc_feature (16)..(16): n is a, c, g, or t
  misc_feature (23)..(23): n is a, c, g, or t
  misc_feature (30)..(30): n is a, c, g, or t
ccccgccacaaccnangctagtncgaggcngggtgtgtaatcggccgagggaagccctggggcgctgccgccgctttccttaaccacaaatcaggccggacaggagagggaggggtgggggacagtgggtgggcattcagactgccagcactttgctatctacagccggggctcccgagcggcagaaagttccggccactctctgccgcttgggttgggcgaagccaggaccgtgccgcgccaccgccaggatatggagctactgtcgccaccgctccgcgacgtagacctgacggcccccgacggctctctctgctcctttgccacaacggacgacttctatgacgacccgtgtttcgactccccggacctgcgcttcttcgaagacctggacccgcgcctgatgcacgtgggcgcgctcctgaaacccgaagagcactcgcacttccccgcggcggtgcacccggccccgggcgcacgtgaggacgagcatcggcgccgcctgagcaaagtaaatgaggcctttgagacactcaagcgctgcacgtcgagcaatccaaaccagcggttgcccaaggtggagatcctgcgcaacgccatccgctatatcgagggcctgcaggctctgctgcgcgaccaggacgccgcgccccctggcgccgcagccgccttctatgcgccgggcccgctgcccccgggccgcggcggcgagcactacagcggcgactccgacgcgtccagcccgcgctccaactgctccgacggcatgatggactacagcggcccccgagcggcgcccggcggcggaactgctacgaaggcgcctactacaacgaggcgcccagcgaacccaggcccgggaagagtgcggcggtgtcgagcctagactgcctgtccagcatcgtggagcgcatctccaccgagagccctgcggcgcccgccctcctgctggcggacgtgccttctgagtcgcctccgcgcaggcaagaggctgccgcccccagcgagggagagagcagcggcgaccccacccagtcaccggacgccgccccgcagtgccctgcgggtgcgaaccccaacccgatataccaggtgctctgagggggatggtggccgcccacccgcccgagggatggtgcccctagggtccctcgcgcccaaaagattgaacttaaatgcccccctcccaacagcgctttaaaagcgacctctcttgaggtaggagaggcgggagaactgaagtttccgcccccgccccacagggcaaggacacagcgcggttttttccacgcagcacccttctcggagacccattgcgatggccgctccgtgttcctcggtgggccagagctgaaccttgaggggctaggttcagctttctcgcgccctcccccatgggggtgagaccctcgcagacctaagccctgccccgggatgcaccggttatttgggggggcgtgagacccagtgcactccggtcccaaatgtagcaggtgtaaccgtaacccacccccaacccgtttcccggttcaggaccactttttgtaatacttttgtaatctattcctgtaaataagagttgctttgccagagcaggagcccctggggctgtatttatctctgaggcatggtgtgtggtgctacagggaatttgtacgtttataccgcaggcgggcgagccgcgggcgctcgctcaggtgatcaaaataaaggcgctaatttataccgc

SEQ ID NO: 62741 - DNA, 3163 bp, Homo sapiens
tgcaatccccagcccccgggcctgtcagaggctgagccattaacgacagagctcggggagagaagctggactgcagctggtttcaggaacttctcttgacgagaagagagaccaaggaggccaagcaggggctgggccagaggtgccaacatggggaaactgaggctcggctcggaaaggtgaagtaacttgtccaagatcacaaagctggtgaacatcaagttggtgctatggcaaggctgggaaactgcagcctgacttgggctgccctgatcatcctgctgctccccggaagtctggaggagtgcgggcacatcagtgtctcagcccccatcgtccacctgggggatcccatcacagcctcctgcatcatcaagcagaactgcagccatctggacccggagccacagattctgtggagactgggagcagagcttcagcccgggggcaggcagcagcgtctgtctgatgggacccaggaatctatcatcaccctgccccacctcaaccacactcaggcctttctctcctgctgcctgaactggggcaacagcctgcagatcctggaccaggttgagctgcgcgcaggctaccctccagccataccccacaacctctcctgcctcatgaacctcacaaccagcagcctcatctgccagtgggagccaggacctgagacccacctacccaccagcttcactctgaagagtttcaagagccggggcaactgtcagacccaaggggactccatcctggactgcgtgcccaaggacgggcagagccactgctgcatcccacgcaaacacctgctgttgtaccagaatatgggcatctgggtgcaggcagagaatgcgctggggaccagcatgtccccacaactgtgtcttgatcccatggatgttgtgaaactggagccccccatgctgcggaccatggaccccagccctgaagcggcccctccccaggcaggctgcctacagctgtgctgggagccatggcagccaggcctgcacataaatcagaagtgtgagctgcgccacaagccgcagcgtggagaagccagctgggcactggtgggccccctccccttggaggcccttcagtatgagctctgcgggctcctcccagccacggcctacaccctgcagatacgctgcatccgctggcccctgcctggccactggagcgactggagccccagcctggagctgagaactaccgaacgggcccccactgtcagactggacacatggtggcggcagaggcagctggaccccaggacagtgcagctgttctggaagccagtgcccctggaggaagacagcggacggatccaaggttatgtggtttcttggagaccctcaggccaggctggggccatcctgcccctctgcaacaccacagagctcagctgcaccttccacctgccttcagaagcccaggaggtggcccttgtggcctataactcagccgggacctctcgtcccaccccggtggtcttctcagaaagcagaggcccagctctgaccagactccatgccatggcccgagaccctcacagcctctgggtaggctgggagccccccaatccatggcctcagggctatgtgattgagtggggcctgggcccccccagcgcgagcaatagcaacaagacctggaggatggaacagaatgggagagccacggggtttctgctgaaggagaacatcaggccctttcagctctatgagatcatcgtgactcccttgtaccaggacaccatgggaccctcccagcatgtctatgcctactctcaagaaatggctccctcccatgccccagagctgcatctaaagcacattggcaagacctgggcacagctggagtgggtgcctgagccccctgagctggggaagagcccccttacccactacaccatcttctggaccaacgctcagaaccagtccttctccgccatcctgaatgcctcctcccgtggctttgtcctccatggcctggagcccgccagtctgtatcacatccacctcatggctgccagccaggctggggccaccaacagtacagtcctcaccctgatgaccttgaccccagaggggtcggagctacacatcatcctgggcctgttcggcctcctgctgttgctcacctgcctctgtggaactgcctggctctgttgcagccccaacaggaagaatcccctctggccaagtgtcccagacccagctcacagcagcctgggctcctgggtgcccacaatcatggaggaggatgccttccagctgcccggccttggcacgccacccatcaccaagctcacagtgctggaggaggatgaaaagaagccggtgccctgggagtcccataacagctcagagacctgtggcctccccactctggtccagacctatgtgctccagggggacccaagagcagtttccacccagccccaatcccagtctggcaccagcgatcaggtcctttatgggcagctgctgggcagccccacaagcccagggccagggcactatctccgctgtgactccactcagcccctcttggcgggcctcacccccagccccaagtcctatgagaacctctggttccaggccagccccttggggaccctggtaaccccagccccaagccaggaggacgactgtgtctttgggccactgctcaacttccccctcctgcaggggatccgggtccatgggatggaggcgctggggagcttctagggcttcctggggttcccttcttgggcctgcctcttaaaggcctgagctagctggagaagaggggagggtccataagcccatgactaaaaactaccccagcccaggctctcaccatctccagtcaccagcatctccctctcctcccaatctccataggctgggcctcccaggcgatctgcatactttaaggaccagatcatgctccatccagccccacccaatggccttttgtgcttgtttcctataacttcagtattgtaaactagtttttggtttgcagtttttgttgttgtttatagacactcttgggtgtacctgagtctctgttatttatttttcagggcccagcagtcagggggaaacttctcagagttggtcctttcttcctccctcccttccttcctccctcccttccttccccc

SEQ ID NO: 62742 - DNA, 3244 bp, Homo sapiens
tgcaatccccagcccccgggcctgtcagaggctgagccattaacgacagagctcggggagagaagctggactgcagctggtttcaggaacttctcttgacgagaagagagaccaaggaggccaagcaggggctgggccagaggtgccaacatggggaaactgaggctcggctcggaaaggtgaagtaacttgtccaagatcacaaagctggtgaacatcaagttggtgctatggcaaggctgggaaactgcagcctgacttgggctgccctgatcatcctgctgctccccggaagtctggaggagtgcgggcacatcagtgtctcagcccccatcgtccacctgggggatcccatcacagcctcctgcatcatcaagcagaactgcagccatctggacccggagccacagattctgtggagactgggagcagagcttcagcccgggggcaggcagcagcgtctgtctgatgggacccaggaatctatcatcaccctgccccacctcaaccacactcaggcctttctctcctgctgcctgaactggggcaacagcctgcagatcctggaccaggttgagctgcgcgcaggctaccctccagccataccccacaacctctcctgcctcatgaacctcacaaccagcagcctcatctgccagtgggagccaggacctgagacccacctacccaccagcttcactctgaagagtttcaagagccggggcaactgtcagacccaaggggactccatcctggactgcgtgcccaaggacgggcagagccactgctgcatcccacgcaaacacctgctgttgtaccagaatatgggcatctgggtgcaggcagagaatgcgctggggaccagcatgtccccacaactgtgtcttgatcccatggatgttgtgaaactggagccccccatgctgcggaccatggaccccagccctgaagcggcccctccccaggcaggctgcctacagctgtgctgggagccatggcagccaggcctgcacataaatcagaagtgtgagctgcgccacaagccgcagcgtggagaagccagctgggcactggtgggccccctccccttggaggcccttcagtatgagctctgcgggctcctcccagccacggcctacaccctgcagatacgctgcatccgctggcccctgcctggccactggagcgactggagccccagcctggagctgagaactaccgaacgggcccccactgtcagactggacacatggtggcggcagaggcagctggaccccaggacagtgcagctgttctggaagccagtgcccctggaggaagacagcggacggatccaaggttatgtggtttcttggagaccctcaggccaggctggggccatcctgcccctctgcaacaccacagagctcagctgcaccttccacctgccttcagaagcccaggaggtggcccttgtggcctataactcagccgggacctctcgtcccaccccggtggtcttctcagaaagcagaggcccagctctgaccagactccatgccatggcccgagaccctcacagcctctgggtaggctgggagccccccaatccatggcctcagggctatgtgattgagtggggcctgggcccccccagcgcgagcaatagcaacaagacctggaggatggaacagaatgggagagccacggggtttctgctgaaggagaacatcaggccctttcagctctatgagatcatcgtgactcccttgtaccaggacaccatgggaccctcccagcatgtctatgcctactctcaagaaatggctccctcccatgccccagagctgcatctaaagcacattggcaagacctgggcacagctggagtgggtgcctgagccccctgagctggggaagagcccccttacccactacaccatcttctggaccaacgctcagaaccagtccttctccgccatcctgaatgcctcctcccgtggctttgtcctccatggcctggagcccgccagtctgtatcacatccacctcatggctgccagccaggctggggccaccaacagtacagtcctcaccctgatgaccttgaccccagaggggtcggagctacacatcatcctgggcctgttcggcctcctgctgttgctcacctgcctctgtggaactgcctggctctgttgcagccccaacaggaagaatcccctctggccaagtgtcccagacccagctcacagcagcctgggctcctgggtgcccacaatcatggaggagctgcccggacccagacagggacagtggctggggcagacatctgaaatgagccgtgctctcaccccacatccttgtgtgcaggatgccttccagctgcccggccttggcacgccacccatcaccaagctcacagtgctggaggaggatgaaaagaagccggtgccctgggagtcccataacagctcagagacctgtggcctccccactctggtccagacctatgtgctccagggggacccaagagcagtttccacccagccccaatcccagtctggcaccagcgatcaggtcctttatgggcagctgctgggcagccccacaagcccagggccagggcactatctccgctgtgactccactcagcccctcttggcgggcctcacccccagccccaagtcctatgagaacctctggttccaggccagccccttggggaccctggtaaccccagccccaagccaggaggacgactgtgtctttgggccactgctcaacttccccctcctgcaggggatccgggtccatgggatggaggcgctggggagcttctagggcttcctggggttcccttcttgggcctgcctcttaaaggcctgagctagctggagaagaggggagggtccataagcccatgactaaaaactaccccagcccaggctctcaccatctccagtcaccagcatctccctctcctcccaatctccataggctgggcctcccaggcgatctgcatactttaaggaccagatcatgctccatccagccccacccaatggccttttgtgcttgtttcctataacttcagtattgtaaactagtttttggtttgcagtttttgttgttgtttatagacactcttgggtgtacctgagtctctgttatttatttttcagggcccagcagtcagggggaaacttctcagagttggtcctttcttcctccctcccttccttcctccctcccttccttccccc

SEQ ID NO: 62743 - DNA, 3069 bp, Homo sapiens
tgcaatccccagcccccgggcctgtcagaggctgagccattaacgacagagctcggggagagaagctggactgcagctggtttcaggaacttctcttgacgagaagagagaccaaggaggccaagcaggggctgggccagaggtgccaacatggggaaactgaggctcggctcggaaaggtgaagtaacttgtccaagatcacaaagctggtgaacatcaagttggtgctatggcaaggctgggaaactgcagcctgacttgggctgccctgatcatcctgctgctccccggaagtctggaggagtgcgggcacatcagtgtctcagcccccatcgtccacctgggggatcccatcacagcctcctgcatcatcaagcagaactgcagccatctggacccggagccacagattctgtggagactgggagcagagcttcagcccgggggcaggcagcagcgtctgtctgatgggacccaggaatctatcatcaccctgccccacctcaaccacactcaggcctttctctcctgctgcctgaactggggcaacagcctgcagatcctggaccaggttgagctgcgcgcaggctaccctccagccataccccacaacctctcctgcctcatgaacctcacaaccagcagcctcatctgccagtgggagccaggacctgagacccacctacccaccagcttcactctgaagagtttcaagagccggggcaactgtcagacccaaggggactccatcctggactgcgtgcccaaggacgggcagagccactgctgcatcccacgcaaacacctgctgttgtaccagaatatgggcatctgggtgcaggcagagaatgcgctggggaccagcatgtccccacaactgtgtcttgatcccatggatgttgtgaaactggagccccccatgctgcggaccatggaccccagccctgaagcggcccctccccaggcaggctgcctacagctgtgctgggagccatggcagccaggcctgcacataaatcagaagtgtgagctgcgccacaagccgcagcgtggagaagccagctgggcactggtgggccccctccccttggaggcccttcagtatgagctctgcgggctcctcccagccacggcctacaccctgcagatacgctgcatccgctggcccctgcctggccactggagcgactggagccccagcctggagctgagaactaccgaacgggcccccactgtcagactggacacatggtggcggcagaggcagctggaccccaggacagtgcagctgttctggaagccagtgcccctggaggaagacagcggacggatccaaggttatgtggtttcttggagaccctcaggccaggctggggccatcctgcccctctgcaacaccacagagctcagctgcaccttccacctgccttcagaagcccaggaggtggcccttgtggcctataactcagccgggacctctcgtcccaccccggtggtcttctcagaaagcagaggcccagctctgaccagactccatgccatggcccgagaccctcacagcctctgggtaggctgggagccccccaatccatggcctcagggctatgtgattgagtggggcctgggcccccccagcgcgagcaatagcaacaagacctggaggatggaacagaatgggagagccacggggtttctgctgaaggagaacatcaggccctttcagctctatgagatcatcgtgactcccttgtaccaggacaccatgggaccctcccagcatgtctatgcctactctcaagaaatggctccctcccatgccccagagctgcatctaaagcacattggcaagacctgggcacagctggagtgggtgcctgagccccctgagctggggaagagcccccttacccactacaccatcttctggaccaacgctcagaaccagtccttctccgccatcctgaatgcctcctcccgtggctttgtcctccatggcctggagcccgccagtctgtatcacatccacctcatggctgccagccaggctggggccaccaacagtacagtcctcaccctgatgaccttgaccccagcaggaagaatcccctctggccaagtgtcccagacccagctcacagcagcctgggctcctgggtgcccacaatcatggaggaggatgccttccagctgcccggccttggcacgccacccatcaccaagctcacagtgctggaggaggatgaaaagaagccggtgccctgggagtcccataacagctcagagacctgtggcctccccactctggtccagacctatgtgctccagggggacccaagagcagtttccacccagccccaatcccagtctggcaccagcgatcaggtcctttatgggcagctgctgggcagccccacaagcccagggccagggcactatctccgctgtgactccactcagcccctcttggcgggcctcacccccagccccaagtcctatgagaacctctggttccaggccagccccttggggaccctggtaaccccagccccaagccaggaggacgactgtgtctttgggccactgctcaacttccccctcctgcaggggatccgggtccatgggatggaggcgctggggagcttctagggcttcctggggttcccttcttgggcctgcctcttaaaggcctgagctagctggagaagaggggagggtccataagcccatgactaaaaactaccccagcccaggctctcaccatctccagtcaccagcatctccctctcctcccaatctccataggctgggcctcccaggcgatctgcatactttaaggaccagatcatgctccatccagccccacccaatggccttttgtgcttgtttcctataacttcagtattgtaaactagtttttggtttgcagtttttgttgttgtttatagacactcttgggtgtacctgagtctctgttatttatttttcagggcccagcagtcagggggaaacttctcagagttggtcctttcttcctccctcccttccttcctccctcccttccttccccc

SEQ ID NO: 62744 - DNA, 2743 bp, Homo sapiens
tgcaatccccagcccccgggcctgtcagaggctgagccattaacgacagagctcggggagagaagctggactgcagctggtttcaggaacttctcttgacgagaagagagaccaaggaggccaagcaggggctgggccagaggtgccaacatggggaaactgaggctcggctcggaaaggtgaagtaacttgtccaagatcacaaagctggtgaacatcaagttggtgctatggcaaggctgggaaactgcagcctgacttgggctgccctgatcatcctgctgctccccggaagtctggaggagtgcgggcacatcagtgtctcagcccccatcgtccacctgggggatcccatcacagcctcctgcatcatcaagcagaactgcagccatctggacccggagccacagattctgtggagactgggagcagagcttcagcccgggggcaggcagcagcgtctgtctgatgggacccaggaatctatcatcaccctgccccacctcaaccacactcaggcctttctctcctgctgcctgaactggggcaacagcctgcagatcctggaccaggttgagctgcgcgcaggctaccctccagccataccccacaacctctcctgcctcatgaacctcacaaccagcagcctcatctgccagtgggagccaggacctgagacccacctacccaccagcttcactctgaagagtttcaagagccggggcaactgtcagacccaaggggactccatcctggactgcgtgcccaaggacgggcagagccactgctgcatcccacgcaaacacctgctgttgtaccagaatatgggcatctgggtgcaggcagagaatgcgctggggaccagcatgtccccacaactgtgtcttgatcccatggatgttgtgaaactggagccccccatgctgcggaccatggaccccagccctgaagcggcccctccccaggcaggctgcctacagctgtgctgggagccatggcagccaggcctgcacataaatcagaagtgtgagctgcgccacaagccgcagcgtggagaagccagctgggcactggtgggccccctccccttggaggcccttcagtatgagctctgcgggctcctcccagccacggcctacaccctgcagatacgctgcatccgctggcccctgcctggccactggagcgactggagccccagcctggagctgagaactaccgaacgggcccccactgtcagactggacacatggtggcggcagaggcagctggaccccaggacagtgcagctgttctggaagccagtgcccctggaggaagacagcggacggatccaaggttatgtggtttcttggagaccctcaggccaggctggggccatcctgcccctctgcaacaccacagagctcagctgcaccttccacctgccttcagaagcccaggaggtggcccttgtggcctataactcagccgggacctctcgtcccaccccggtggtcttctcagaaagcagaggcccagctctgaccagactccatgccatggcccgagaccctcacagcctctgggtaggctgggagccccccaatccatggcctcagggctatgtgattgagtggggcctgggcccccccagcgcgagcaatagcaacaagacctggaggatggaacagaatgggagagccacggggtttctgctgaaggagaacatcaggccctttcagctctatgagatcatcgtgactcccttgtaccaggacaccatgggaccctcccagcatgtctatgcctactctcaagaaatggctccctcccatgccccagagctgcatctaaagcacattggcaagacctgggcacagctggagtgggtgcctgagccccctgagctggggaagagcccccttacccactacaccatcttctggaccaacgctcagaaccagtccttctccgccatcctgaatgcctcctcccgtggctttgtcctccatggcctggagcccgccagtctgtatcacatccacctcatggctgccagccaggctggggccaccaacagtacagtcctcaccctgatgaccttgaccccagaggggtcggagctacacatcatcctgggcctgttcggcctcctgctgttgctcacctgcctctgtggaactgcctggctctgttgcagccccaacaggaagaatcccctctggccaagtgtcccagacccagctcacagcagcctgggctcctgggtgcccacaatcatggaggaggatgccttccagctgcccggccttggcacgccacccatcaccaagctcacagtgctggaggaggatgaaaagaagccggtgccctgggagtcccataacagctcagagacctgtggcctccccactctggtccagacctatgtgctccagggggacccaagagcagtttccacccagccccaatcccagtctggcaccagcgatcaggctgggcctcccaggcgatctgcatactttaaggaccagatcatgctccatccagccccacccaatggccttttgtgcttgtttcctataacttcagtattgtaaactagtttttggtttgcagtttttgttgttgtttatagacactcttgggtgtacctgagtctctgttatttatttttcagggcccagcagtcagggggaaacttctcagagttggtcctttcttcctccctcccttccttcctccctcccttccttccccc

SEQ ID NO: 62745 - DNA, 485 bp, Homo sapiens
tagctggcccgagttgtgggacacggggtttctgctgaaggagaacatcaggccctttcagctctatgagatcatcgtgactcccttgtaccaggacaccatgggaccctcccagcatgtctatgcctactctcaagaaatggctccctcccatgccccagagctgcatctaaagcacattggcaagacctgggcacagctggagtgggtgcctgagccccctgagctggggaagagcccccttacccactacaccatcttctggaccaacgctcagaaccagtccttctccgccatcctgaatgcctcctcccgtggctttgtcctccatggcctggagcccgccagtctgtatcacatccacctcatggctgccagccaggctggggccaccaacagtacagtcctcaccctgatgaccttgaccccagagggtcggagctacacatatccgaagcagtgcacagggatcctcagagtactag

SEQ ID NO: 62746 - DNA, 625 bp, Homo sapiens
  misc_feature (358)..(358): n is a, c, g, or t
gacaggaagagacacagaggcaaagagacacattcagtcatgctttcagcgtgtttcctaaagcacccactacatgttaggcactgctctaggtactggggatacaaagcatcaaaaatgccctcagaatgttagattcaagtgggggggaaaataagatagaatttcagatagcaataagcagaaaggagaaattaaaggaggagaagggcatagagagagaggggggaaggggagcactggctattttaatatgctggtcaagaaaggcctcactaagagggtgacaattgagcagatccttgaaggaaatgagggagcaagccgctggatatctggagggaggggatccccaaantgggcagacactgagaggaatggagagggaaacacagaactagcgacagacaagaagacactggaagacctagagacagaggcacagaagagggacagagactaagaaaggtgcagctggagacagagaaatggggacacagacccagagacggcaagagacacagaggcaaagagacacattcacgtcatgctttcagcgtgtttcctaaagcacccactactgttagcactgctctaggtactgggacacttgcatcaagaggtc

SEQ ID NO: 62747 - DNA, 3763 bp, Homo sapiens
aagaatgagccagaatagctggagctgagagaccggtataagctggaactgagagggtcaggcaggggccaggccacaggagctattgaaggatttgagtgtttatcctaatgatggcagcaaatactcacatgccagacactgctctaaatgccttccatatgttatcgcatgtaatccttccagcaacactaaggtagggacgatttttatccccattttacagatgagaaaactgaggcacaggaagtcttagaaatataccaggatcatgtaattaataagcaatagaaccagaatttaaacctaggcagtctagttccaacatccacactcatccatcacaccacactgcctttcagagcaataatgtgccattgaagtgctgcgatggagatggggtagcagaatcagatttgaattgtgaaaagattgctgtggctatgggttcttatcactctaatcactgcttgcaccatccttggggagggcactggggagttaacagtctccatctggtggtgtgctggtgctggcttgcaaaaactaattgtgcacatctcttcccaactccccgatcaatgatgtcacatcaataggctgaaatcagctacagtgagagcacttaacaccgcggaaaggcacacactacaaaccagggtctgcttttctctgccaagctggctgataaacggttaccagcacatcactatctctgtgtcacccccgtagcctctcgaagtctccgtccccatccttccatttccagcccccatatcttgaagggtgagacaggaaggtgaggcctctgagtctaggagtacaaaggcctagattatagcccagctctgctaggcagaggcgtcgttcctggcccattctcttccaccccaggtctggaggagtgcgggcacatcagtgtctcagcccccatcgtccacctgggggatcccatcacagcctcctgcatcatcaagcagaactgcagccatctggacccggagccacagattctgtggagactgggagcagagcttcagcccgggggcaggcagcagcgtctgtctgatgggacccaggaatctatcatcaccctgccccacctcaaccacactcaggcctttctctcctgctgcctgaactggggcaacagcctgcagatcctggaccaggttgagctgcgcgcaggctaccctccagccataccccacaacctctcctgcctcatgaacctcacaaccagcagcctcatctgccagtgggagccaggacctgagacccacctacccaccagcttcactctgaagagtttcaagagccggggcaactgtcagacccaaggggactccatcctggactgcgtgcccaaggacgggcagagccactgctgcatcccacgcaaacacctgctgttgtaccagaatatgggcatctgggtgcaggcagagaatgcgctggggaccagcatgtccccacaactgtgtcttgatcccatggatgttgtgaaactggagccccccatgctgcggaccatggaccccagccctgaagcggcccctccccaggcaggctgcctacagctgtgctgggagccatggcagccaggcctgcacataaatcagaagtgtgagctgcgccacaagccgcagcgtggagaagccagctgggcactggtgggccccctccccttggaggcccttcagtatgagctctgcgggctcctcccagccacggcctacaccctgcagatacgctgcatccgctggcccctgcctggccactggagcgactggagccccagcctggagctgagaactaccgaacgggcccccactgtcagactggacacatggtggcggcagaggcagctggaccccaggacagtgcagctgttctggaagccagtgcccctggaggaagacagcggacggatccaaggttatgtggtttcttggagaccctcaggccaggctggggccatcctgcccctctgcaacaccacagagctcagctgcaccttccacctgccttcagaagcccaggaggtggcccttgtggcctataactcagccgggacctctcgtcccaccccggtggtcttctcagaaagcagaggcccagctctgaccagactccatgccatggcccgagaccctcacagcctctgggtaggctgggagccccccaatccatggcctcagggctatgtgattgagtggggcctgggcccccccagcgcgagcaatagcaacaagacctggaggatggaacagaatgggagagccacggggtttctgctgaaggagaacatcaggccctttcagctctatgagatcatcgtgactcccttgtaccaggacaccatgggaccctcccagcatgtctatgcctactctcaagaaatggctccctcccatgccccagagctgcatctaaagcacattggcaagacctgggcacagctggagtgggtgcctgagccccctgagctggggaagagcccccttacccactacaccatcttctggaccaacgctcagaaccagtccttctccgccatcctgaatgcctcctcccgtggctttgtcctccatggcctggagcccgccagtctgtatcacatccacctcatggctgccagccaggctggggccaccaacagtacagtcctcaccctgatgaccttgaccccagaggggtcggagctacacatcatcctgggcctgttcggcctcctgctgttgctcacctgcctctgtggaactgcctggctctgttgcagccccaacaggaagaatcccctctggccaagtgtcccagacccagctcacagcagcctgggctcctgggtgcccacaatcatggaggaggatgccttccagctgcccggccttggcacgccacccatcaccaagctcacagtgctggaggaggatgaaaagaagccggtgccctgggagtcccataacagctcagagacctgtggcctccccactctggtccagacctatgtgctccagggggacccaagagcagtttccacccagccccaatcccagtctggcaccagcgatcaggtcctttatgggcagctgctgggcagccccacaagcccagggccagggcactatctccgctgtgactccactcagcccctcttggcgggcctcacccccagccccaagtcctatgagaacctctggttccaggccagccccttggggaccctggtaaccccagccccaagccaggaggacgactgtgtctttgggccactgctcaacttccccctcctgcaggggatccgggtccatgggatggaggcgctggggagcttctagggcttcctggggttcccttcttgggcctgcctcttaaaggcctgagctagctggagaagaggggagggtccataagcccatgactaaaaactaccccagcccaggctctcaccatctccagtcaccagcatctccctctcctcccaatctccataggctgggcctcccaggcgatctgcatactttaaggaccagatcatgctccatccagccccacccaatggccttttgtgcttgtttcctataacttcagtattgtaaactagtttttggtttgcagtttttgttgttgtttatagacactcttgggtgtacctgagtctctgttatttatttttcagggcccagcagtcagggggaaacttctcagagttggtcctttcttcctccctcccttccttcctccctcccttccttccccc

SEQ ID NO: 62748 - DNA, 3140 bp, Homo sapiens
tgcaatccccagcccccgggcctgtcagaggctgagccattaacgacagagctcggggagagaagctggactgcagctggtttcaggaacttctcttgacgagaagagagaccaaggaggccaagcaggggctgggccagaggtgccaacggaaaggtgaagtaacttgtccaagatcacaaagctggtgaacatcaagttggtgctatggcaaggctgggaaactgcagcctgacttgggctgccctgatcatcctgctgctccccggaagtctggaggagtgcgggcacatcagtgtctcagcccccatcgtccacctgggggatcccatcacagcctcctgcatcatcaagcagaactgcagccatctggacccggagccacagattctgtggagactgggagcagagcttcagcccgggggcaggcagcagcgtctgtctgatgggacccaggaatctatcatcaccctgccccacctcaaccacactcaggcctttctctcctgctgcctgaactggggcaacagcctgcagatcctggaccaggttgagctgcgcgcaggctaccctccagccataccccacaacctctcctgcctcatgaacctcacaaccagcagcctcatctgccagtgggagccaggacctgagacccacctacccaccagcttcactctgaagagtttcaagagccggggcaactgtcagacccaaggggactccatcctggactgcgtgcccaaggacgggcagagccactgctgcatcccacgcaaacacctgctgttgtaccagaatatgggcatctgggtgcaggcagagaatgcgctggggaccagcatgtccccacaactgtgtcttgatcccatggatgttgtgaaactggagccccccatgctgcggaccatggaccccagccctgaagcggcccctccccaggcaggctgcctacagctgtgctgggagccatggcagccaggcctgcacataaatcagaagtgtgagctgcgccacaagccgcagcgtggagaagccagctgggcactggtgggccccctccccttggaggcccttcagtatgagctctgcgggctcctcccagccacggcctacaccctgcagatacgctgcatccgctggcccctgcctggccactggagcgactggagccccagcctggagctgagaactaccgaacgggcccccactgtcagactggacacatggtggcggcagaggcagctggaccccaggacagtgcagctgttctggaagccagtgcccctggaggaagacagcggacggatccaaggttatgtggtttcttggagaccctcaggccaggctggggccatcctgcccctctgcaacaccacagagctcagctgcaccttccacctgccttcagaagcccaggaggtggcccttgtggcctataactcagccgggacctctcgtcccaccccggtggtcttctcagaaagcagaggcccagctctgaccagactccatgccatggcccgagaccctcacagcctctgggtaggctgggagccccccaatccatggcctcagggctatgtgattgagtggggcctgggcccccccagcgcgagcaatagcaacaagacctggaggatggaacagaatgggagagccacggggtttctgctgaaggagaacatcaggccctttcagctctatgagatcatcgtgactcccttgtaccaggacaccatgggaccctcccagcatgtctatgcctactctcaagaaatggctccctcccatgccccagagctgcatctaaagcacattggcaagacctgggcacagctggagtgggtgcctgagccccctgagctggggaagagcccccttacccactacaccatcttctggaccaacgctcagaaccagtccttctccgccatcctgaatgcctcctcccgtggctttgtcctccatggcctggagcccgccagtctgtatcacatccacctcatggctgccagccaggctggggccaccaacagtacagtcctcaccctgatgaccttgaccccagaggggtcggagctacacatcatcctgggcctgttcggcctcctgctgttgctcacctgcctctgtggaactgcctggctctgttgcagccccaacaggaagaatcccctctggccaagtgtcccagacccagctcacagcagcctgggctcctgggtgcccacaatcatggaggaggatgccttccagctgcccggccttggcacgccacccatcaccaagctcacagtgctggaggaggatgaaaagaagccggtgccctgggagtcccataacagctcagagacctgtggcctccccactctggtccagacctatgtgctccagggggacccaagagcagtttccacccagccccaatcccagtctggcaccagcgatcaggtcctttatgggcagctgctgggcagccccacaagcccagggccagggcactatctccgctgtgactccactcagcccctcttggcgggcctcacccccagccccaagtcctatgagaacctctggttccaggccagccccttggggaccctggtaaccccagccccaagccaggaggacgactgtgtctttgggccactgctcaacttccccctcctgcaggggatccgggtccatgggatggaggcgctggggagcttctagggcttcctggggttcccttcttgggcctgcctcttaaaggcctgagctagctggagaagaggggagggtccataagcccatgactaaaaactaccccagcccaggctctcaccatctccagtcaccagcatctccctctcctcccaatctccataggctgggcctcccaggcgatctgcatactttaaggaccagatcatgctccatccagccccacccaatggccttttgtgcttgtttcctataacttcagtattgtaaactagtttttggtttgcagtttttgttgttgtttatagacactcttgggtgtacctgagtctctgttatttatttttcagggcccagcagtcagggggaaacttctcagagttggtcctttcttcctccctcccttccttcctccctcccttccttccccc

SEQ ID NO: 62749 - DNA, 3074 bp, Homo sapiens
ggtgatctagaggatcttcagaggcacaaggaggcaagcaggggctggccagaggtgcaacatggggaaactgaggctcggctcggaaaggtgaagtaacttgtccaagatcacaaagctggtgaacatcaagttggtgctatggcaaggctgggaaactgcagcctgacttgggctgccctgatcatcctgctgctccccggaagtctggaggagtgcgggcacatcagtgtctcagcccccatcgtccacctgggggatcccatcacagcctcctgcatcatcaagcagaactgcagccatctggacccggagccacagattctgtggagactgggagcagagcttcagcccgggggcaggcagcagcgtctgtctgatgggacccaggaatctatcatcaccctgccccacctcaaccacactcaggcctttctctcctgctgcctgaactggggcaacagcctgcagatcctggaccaggttgagctgcgcgcaggctaccctccagccataccccacaacctctcctgcctcatgaacctcacaaccagcagcctcatctgccagtgggagccaggacctgagacccacctacccaccagcttcactctgaagagtttcaagagccggggcaactgtcagacccaaggggactccatcctggactgcgtgcccaaggacgggcagagccactgctgcatcccacgcaaacacctgctgttgtaccagaatatgggcatctgggtgcaggcagagaatgcgctggggaccagcatgtccccacaactgtgtcttgatcccatggatgttgtgaaactggagccccccatgctgcggaccatggaccccagccctgaagcggcccctccccaggcaggctgcctacagctgtgctgggagccatggcagccaggcctgcacataaatcagaagtgtgagctgcgccacaagccgcagcgtggagaagccagctgggcactggtgggccccctccccttggaggcccttcagtatgagctctgcgggctcctcccagccacggcctacaccctgcagatacgctgcatccgctggcccctgcctggccactggagcgactggagccccagcctggagctgagaactaccgaacgggcccccactgtcagactggacacatggtggcggcagaggcagctggaccccaggacagtgcagctgttctggaagccagtgcccctggaggaagacagcggacggatccaaggttatgtggtttcttggagaccctcaggccaggctggggccatcctgcccctctgcaacaccacagagctcagctgcaccttccacctgccttcagaagcccaggaggtggcccttgtggcctataactcagccgggacctctcgtcccaccccggtggtcttctcagaaagcagaggcccagctctgaccagactccatgccatggcccgagaccctcacagcctctgggtaggctgggagccccccaatccatggcctcagggctatgtgattgagtggggcctgggcccccccagcgcgagcaatagcaacaagacctggaggatggaacagaatgggagagccacggggtttctgctgaaggagaacatcaggccctttcagctctatgagatcatcgtgactcccttgtaccaggacaccatgggaccctcccagcatgtctatgcctactctcaagaaatggctccctcccatgccccagagctgcatctaaagcacattggcaagacctgggcacagctggagtgggtgcctgagccccctgagctggggaagagcccccttacccactacaccatcttctggaccaacgctcagaaccagtccttctccgccatcctgaatgcctcctcccgtggctttgtcctccatggcctggagcccgccagtctgtatcacatccacctcatggctgccagccaggctggggccaccaacagtacagtcctcaccctgatgaccttgaccccagaggggtcggagctacacatcatcctgggcctgttcggcctcctgctgttgctcacctgcctctgtggaactgcctggctctgttgcagccccaacaggaagaatcccctctggccaagtgtcccagacccagctcacagcagcctgggctcctgggtgcccacaatcatggaggaggatgccttccagctgcccggccttggcacgccacccatcaccaagctcacagtgctggaggaggatgaaaagaagccggtgccctgggagtcccataacagctcagagacctgtggcctccccactctggtccagacctatgtgctccagggggacccaagagcagtttccacccagccccaatcccagtctggcaccagcgatcaggtcctttatgggcagctgctgggcagccccacaagcccagggccagggcactatctccgctgtgactccactcagcccctcttggcgggcctcacccccagccccaagtcctatgagaacctctggttccaggccagccccttggggaccctggtaaccccagccccaagccaggaggacgactgtgtctttgggccactgctcaacttccccctcctgcaggggatccgggtccatgggatggaggcgctggggagcttctagggcttcctggggttcccttcttgggcctgcctcttaaaggcctgagctagctggagaagaggggagggtccataagcccatgactaaaaactaccccagcccaggctctcaccatctccagtcaccagcatctccctctcctcccaatctccataggctgggcctcccaggcgatctgcatactttaaggaccagatcatgctccatccagccccacccaatggccttttgtgcttgtttcctataacttcagtattgtaaactagtttttggtttgcagtttttgttgttgtttatagacactcttgggtgtacctgagtctctgttatttatttttcagggcccagcagtcagggggaaacttctcagagttggtcctttcttcctccctcccttccttcctccctcccttccttccccc

SEQ ID NO: 62750 - DNA, 3275 bp, Homo sapiens
tgcaatccccagcccccgggcctgtcagaggctgagccattaacgacagagctcggggagagaagctggactgcagctggtttcaggaacttctcttgacgagaagagagaccaaggaggccaagcaggggctgggccagaggtgccaacatggggaaactgaggctcggctcggaaaggtgaagtaacttgtccaagatcacaaagctggtgaacatcaagttggtgctatggcaaggctgggaaactgcagcctgacttgggctgccctgatcatcctgctgctccccggaagtctggaggagtgcgggcacatcagtgtctcagcccccatcgtccacctgggggatcccatcacagcctcctgcatcatcaagcagaactgcagccatctggacccggagccacagattctgtggagactgggagcagagcttcagcccgggggcaggcagcagcgtctgtctgatgggacccaggaatctatcatcaccctgccccacctcaaccacactcaggcctttctctcctgctgcctgaactggggcaacagcctgcagatcctggaccaggttgagctgcgcgcaggctaccctccagccataccccacaacctctcctgcctcatgaacctcacaaccagcagcctcatctgccagtgggagccaggacctgagacccacctacccaccagcttcactctgaagagtttcaagagccggggcaactgtcagacccaaggggactccatcctggactgcgtgcccaaggacgggcagagccactgctgcatcccacgcaaacacctgctgttgtaccagaatatgggcatctgggtgcaggcagagaatgcgctggggaccagcatgtccccacaactgtgtcttgatcccatggatgttgtgaaactggagccccccatgctgcggaccatggaccccagccctgaagcggcccctccccaggcaggctgcctacagctgtgctgggagccatggcagccaggcctgcacataaatcagaagtgtgagctgcgccacaagccgcagcgtggagaagccagctgggcactggtgggccccctccccttggaggcccttcagtatgagctctgcgggctcctcccagccacggcctacaccctgcagatacgctgcatccgctggcccctgcctggccactggagcgactggagccccagcctggagctgagaactaccgaacgggcccccactgtcagactggacacatggtggcggcagaggcagctggaccccaggacagtgcagctgttctggaagccagtgcccctggaggaagacagcggacggatccaaggttatgtggtttcttggagaccctcaggccaggctggggccatcctgcccctctgcaacaccacagagctcagctgcaccttccacctgccttcagaagcccaggaggtggcccttgtggcctataactcagccgggacctctcgtcccaccccggtggtcttctcagaaagcagaggcccagctctgaccagactccatgccatggcccgagaccctcacagcctctgggtaggctgggagccccccaatccatggcctcagggctatgtgattgagtggggcctgggcccccccagcgcgagcaatagcaacaagacctggaggatggaacagaatgggagagccacggggtttctgctgaaggagaacatcaggccctttcagctctatgagatcatcgtgactcccttgtaccaggacaccatgggaccctcccagcatgtctatgcctactctcaagaaatggctccctcccatgccccagagctgcatctaaagcacattggcaagacctgggcacagctggagtgggtgcctgagccccctgagctggggaagagcccccttacccactacaccatcttctggaccaacgctcagaaccagtccttctgtgagtctatcctcagttcccccacagccccagaaggcctggaagggggtgctcagctgccacggaggcagctttaccatccaggcctatgctgaccgtacacccctcccagccgccatcctgaatgcctcctcccgtggctttgtcctccatggcctggagcccgccagtctgtatcacatccacctcatggctgccagccaggctggggccaccaacagtacagtcctcaccctgatgaccttgaccccagaggggtcggagctacacatcatcctgggcctgttcggcctcctgctgttgctcacctgcctctgtggaactgcctggctctgttgcagccccaacaggaagaatcccctctggccaagtgtcccagacccagctcacagcagcctgggctcctgggtgcccacaatcatggaggaggatgccttccagctgcccggccttggcacgccacccatcaccaagctcacagtgctggaggaggatgaaaagaagccggtgccctgggagtcccataacagctcagagacctgtggcctccccactctggtccagacctatgtgctccagggggacccaagagcagtttccacccagccccaatcccagtctggcaccagcgatcaggtcctttatgggcagctgctgggcagccccacaagcccagggccagggcactatctccgctgtgactccactcagcccctcttggcgggcctcacccccagccccaagtcctatgagaacctctggttccaggccagccccttggggaccctggtaaccccagccccaagccaggaggacgactgtgtctttgggccactgctcaacttccccctcctgcaggggatccgggtccatgggatggaggcgctggggagcttctagggcttcctggggttcccttcttgggcctgcctcttaaaggcctgagctagctggagaagaggggagggtccataagcccatgactaaaaactaccccagcccaggctctcaccatctccagtcaccagcatctccctctcctcccaatctccataggctgggcctcccaggcgatctgcatactttaaggaccagatcatgctccatccagccccacccaatggccttttgtgcttgtttcctataacttcagtattgtaaactagtttttggtttgcagtttttgttgttgtttatagacactcttgggtgtacctgagtctctgttatttatttttcagggcccagcagtcagggggaaacttctcagagttggtcctttcttcctccctcccttccttcctccctcccttccttccccc

SEQ ID NO: 62751 - DNA, 2079 bp, Homo sapiens
tgcaatccccagcccccgggcctgtcagaggctgagccattaacgacagagctcggggagagaagctggactgcagctggtttcaggaacttctcttgacgagaagagagaccaaggaggccaagcaggggctgggccagaggtgccaacatggggaaactgaggctcggctcggaaaggtgaagtaacttgtccaagatcacaaagctggtgaacatcaagttggtgctatggcaaggctgggaaactgcagcctgacttgggctgccctgatcatcctgctgctccccggaacatcctgcccctctgcaacaccacagagctcagctgcaccttccacctgccttcagaagcccaggaggtggcccttgtggcctataactcagccgggacctctcgtcccaccccggtggtcttctcagaaagcagaggcccagctctgaccagactccatgccatggcccgagaccctcacagcctctgggtaggctgggagccccccaatccatggcctcagggctatgtgattgagtggggcctgggcccccccagcgcgagcaatagcaacaagacctggaggatggaacagaatgggagagccacggggtttctgctgaaggagaacatcaggccctttcagctctatgagatcatcgtgactcccttgtaccaggacaccatgggaccctcccagcatgtctatgcctactctcaagaaatggctccctcccatgccccagagctgcatctaaagcacattggcaagacctgggcacagctggagtgggtgcctgagccccctgagctggggaagagcccccttacccactacaccatcttctggaccaacgctcagaaccagtccttctccgccatcctgaatgcctcctcccgtggctttgtcctccatggcctggagcccgccagtctgtatcacatccacctcatggctgccagccaggctggggccaccaacagtacagtcctcaccctgatgaccttgaccccagaggggtcggagctacacatcatcctgggcctgttcggcctcctgctgttgctcacctgcctctgtggaactgcctggctctgttgcagccccaacaggaagaatcccctctggccaagtgtcccagacccagctcacagcagcctgggctcctgggtgcccacaatcatggaggaggatgccttccagctgcccggccttggcacgccacccatcaccaagctcacagtgctggaggaggatgaaaagaagccggtgccctgggagtcccataacagctcagagacctgtggcctccccactctggtccagacctatgtgctccagggggacccaagagcagtttccacccagccccaatcccagtctggcaccagcgatcaggtcctttatgggcagctgctgggcagccccacaagcccagggccagggcactatctccgctgtgactccactcagcccctcttggcgggcctcacccccagccccaagtcctatgagaacctctggttccaggccagccccttggggaccctggtaaccccagccccaagccaggaggacgactgtgtctttgggccactgctcaacttccccctcctgcaggggatccgggtccatgggatggaggcgctggggagcttctagggcttcctggggttcccttcttgggcctgcctcttaaaggcctgagctagctggagaagaggggagggtccataagcccatgactaaaaactaccccagcccaggctctcaccatctccagtcaccagcatctccctctcctcccaatctccataggctgggcctcccaggcgatctgcatactttaaggaccagatcatgctccatccagccccacccaatggccttttgtgcttgtttcctataacttcagtattgtaaactagtttttggtttgcagtttttgttgttgtttatagacactcttgggtgtacctgagtctctgttatttatttttcagggcccagcagtcagggggaaacttctcagagttggtcctttcttcctccctcccttccttcctccctcccttccttccccc

SEQ ID NO: 62752 - DNA, 1531 bp, Homo sapiens
tcagcaccatggaggatgtcagcacctggaggatggaacagaatgggagagccacggggtttctgctgaaggagaacatcaggccctttcagctctatgagatcatcgtgactcccttgtaccaggacaccatgggaccctcccagcatgtctatgcctactctcaagaaatggctccctcccatgccccagagctgcatctaaagcacattggcaagacctgggcacagctggagtgggtgcctgagccccctgagctggggaagagcccccttacccactacaccatcttctggaccaacgctcagaaccagtccttctccgccatcctgaatgcctcctcccgtggctttgtcctccatggcctggagcccgccagtctgtatcacatccacctcatggctgccagccaggctggggccaccaacagtacagtcctcaccctgatgaccttgaccccagaggggtcggagctacacatcatcctgggcctgttcggcctcctgctgttgctcacctgcctctgtggaactgcctggctctgttgcagccccaacaggaagaatcccctctggccaagtgtcccagacccagctcacagcagcctgggctcctgggtgcccacaatcatggaggaggatgccttccagctgcccggccttggcacgccacccatcaccaagctcacagtgctggaggaggatgaaaagaagccggtgccctgggagtcccataacagctcagagacctgtggcctccccactctggtccagacctatgtgctccagggggacccaagagcagtttccacccagccccaatcccagtctggcaccagcgatcaggtcctttatgggcagctgctgggcagccccacaagcccagggccagggcactatctccgctgtgactccactcagcccctcttggcgggcctcacccccagccccaagtcctatgagaacctctggttccaggccagccccttggggaccctggtaaccccagccccaagccaggaggacgactgtgtctttgggccactgctcaacttccccctcctgcaggggatccgggtccatgggatggaggcgctggggagcttctagggcttcctggggttcccttcttgggcctgcctcttaaaggcctgagctagctggagaagaggggagggtccataagcccatgactaaaaactaccccagcccaggctctcaccatctccagtcaccagcatctccctctcctcccaatctccataggctgggcctcccaggcgatctgcatactttaaggaccagatcatgctccatccagccccacccaatggccttttgtgcttgtttcctataacttcagtattgtaaactagtttttggtttgcagtttttgttgttgtttatagacactcttgggtgtacctgagtctctgttatttatttttcagggcccagcagtcagggggaaacttctcagagttggtcctttcttcctccctcccttccttcctccctcccttccttccccc

SEQ ID NO: 62753 - DNA, 1601 bp, Homo sapiens
cgatccgactacgcggctcgatctgactacgcggctcgatctgactacgcggctcgatctgactacgcggctcgatctgactacgcggctcgatctgactacgcggctcgatctgactacgcggctcaatctgactacgcggagaacatcaggccctttcagctctatgagatcatcgtgactcccttgtaccaggacaccatgggaccctcccagcatgtctatgcctactctcaagaaatggctccctcccatgccccagagctgcatctaaagcacattggcaagacctgggcacagctggagtgggtgcctgagccccctgagctggggaagagcccccttacccactacaccatcttctggaccaacgctcagaaccagtccttctccgccatcctgaatgcctcctcccgtggctttgtcctccatggcctggagcccgccagtctgtatcacatccacctcatggctgccagccaggctggggccaccaacagtacagtcctcaccctgatgaccttgaccccagaggggtcggagctacacatcatcctgggcctgttcggcctcctgctgttgctcacctgcctctgtggaactgcctggctctgttgcagccccaacaggaagaatcccctctggccaagtgtcccagacccagctcacagcagcctgggctcctgggtgcccacaatcatggaggaggatgccttccagctgcccggccttggcacgccacccatcaccaagctcacagtgctggaggaggatgaaaagaagccggtgccctgggagtcccataacagctcagagacctgtggcctccccactctggtccagacctatgtgctccagggggacccaagagcagtttccacccagccccaatcccagtctggcaccagcgatcaggtcctttatgggcagctgctgggcagccccacaagcccagggccagggcactatctccgctgtgactccactcagcccctcttggcgggcctcacccccagccccaagtcctatgagaacctctggttccaggccagccccttggggaccctggtaaccccagccccaagccaggaggacgactgtgtctttgggccactgctcaacttccccctcctgcaggggatccgggtccatgggatggaggcgctggggagcttctagggcttcctggggttcccttcttgggcctgcctcttaaaggcctgagctagctggagaagaggggagggtccataagcccatgactaaaaactaccccagcccaggctctcaccatctccagtcaccagcatctccctctcctcccaatctccataggctgggcctcccaggcgatctgcatactttaaggaccagatcatgctccatccagccccacccaatggccttttgtgcttgtttcctataacttcagtattgtaaactagtttttggtttgcagtttttgttgttgtttatagacactcttgggtgtacctgagtctctgttatttatttttcagggcccagcagtcagggggaaacttctcagagttggtcctttcttcctccctcccttccttcctccctcccttccttccccc

SEQ ID NO: 62754 - DNA, 1445 bp, Homo sapiens
ggtagactctagaggattctccgtagcacagatcaccggcacaacatgagaccctcttagcaagactatgcccactctcaagatatggctccctcccatgccccagagctgcatctaaagcacattggcaagacctgggcacagctggagtgggtgcctgagccccctgagctggggaagagcccccttacccactacaccatcttctggaccaacgctcagaaccagtccttctccgccatcctgaatgcctcctcccgtggctttgtcctccatggcctggagcccgccagtctgtatcacatccacctcatggctgccagccaggctggggccaccaacagtacagtcctcaccctgatgaccttgaccccagaggggtcggagctacacatcatcctgggcctgttcggcctcctgctgttgctcacctgcctctgtggaactgcctggctctgttgcagccccaacaggaagaatcccctctggccaagtgtcccagacccagctcacagcagcctgggctcctgggtgcccacaatcatggaggaggatgccttccagctgcccggccttggcacgccacccatcaccaagctcacagtgctggaggaggatgaaaagaagccggtgccctgggagtcccataacagctcagagacctgtggcctccccactctggtccagacctatgtgctccagggggacccaagagcagtttccacccagccccaatcccagtctggcaccagcgatcaggtcctttatgggcagctgctgggcagccccacaagcccagggccagggcactatctccgctgtgactccactcagcccctcttggcgggcctcacccccagccccaagtcctatgagaacctctggttccaggccagccccttggggaccctggtaaccccagccccaagccaggaggacgactgtgtctttgggccactgctcaacttccccctcctgcaggggatccgggtccatgggatggaggcgctggggagcttctagggcttcctggggttcccttcttgggcctgcctcttaaaggcctgagctagctggagaagaggggagggtccataagcccatgactaaaaactaccccagcccaggctctcaccatctccagtcaccagcatctccctctcctcccaatctccataggctgggcctcccaggcgatctgcatactttaaggaccagatcatgctccatccagccccacccaatggccttttgtgcttgtttcctataacttcagtattgtaaactagtttttggtttgcagtttttgttgttgtttatagacactcttgggtgtacctgagtctctgttatttatttttcagggcccagcagtcagggggaaacttctcagagttggtcctttcttcctccctcccttccttcctccctcccttccttccccc

SEQ ID NO: 62755 - DNA, 2194 bp, Homo sapiens
tgcaatccccagcccccgggcctgtcagaggctgagccattaacgacagagctcggggagagaagctggactgcagctggtttcaggaacttctcttgacgagaagagagaccaaggaggccaagcaggggctgggccagaggtgccaacatggggaaactgaggctcggctcggaaaggtgaagtaacttgtccaagatcacaaagctggtgaacatcaagttggtgctatggcaaggctgggaaactgcagcctgacttgggctgccctgatcatcctgctgctccccggaagtctggaggagtgcgggcacatcagtgtctcagcccccatcgtccacctgggggatcccatcacagcctcctgcatcatcaagcagaactgcagccatctggacccggagccacagattctgtggagactgggagcagagcttcagcccgggggcaggcagcagcgtctgtctgatgggacccaggaatctatcatcaccctgccccacctcaaccacactcaggcctttctctcctgctgcctgaactggggcaacagcctgcagatcctggaccaggttgagctgcgcgcaggctaccctccagccataccccacaacctctcctgcctcatgaacctcacaaccagcagcctcatctgccagtgggagccaggacctgagacccacctacccaccagcttcactctgaagagtttcaagagccggggcaactgtcagacccaaggggactccatcctggactgcgtgcccaaggacgggcagagccactgctgcatcccacgcaaacacctgctgttgtaccagaatatgggcatctgggtgcaggcagagaatgcgctggggaccagcatgtccccacaactgtgtcttgatcccatggatgttgtgaaactggagccccccatgctgcggaccatggaccccagccctgaagcggcccctccccaggcaggctgcctacagctgtgctgggagccatggcagccaggcctgcacataaatcagaagtgtgagctgcgccacaagccgcagcgtggagaagccagctgggcactggtgggccccctccccttggaggcccttcagtatgagctctgcgggctcctcccagccacggcctacaccctgcagatacgctgcatccgctggcccctgcctggccactggagcgactggagccccagcctggagctgagaactaccgaacgggcccccactgtcagactggacacatggtggcggcagaggcagctggaccccaggacagtgcagctgttctggaagccagtgcccctggaggaagacagcggacggatccaaggttatgtggtttcttggagaccctcaggccaggctggggccatcctgcccctctgcaacaccacagagctcagctgcaccttccacctgccttcagaagcccaggaggtggcccttgtggcctataactcagccgggacctctcgtcccaccccggtggtcttctcagaaagcagaggcccagctctgaccagactccatgccatggcccgagaccctcacagcctctgggtaggctgggagccccccaatccatggcctcagggctatgtgattgagtggggcctgggcccccccagcgcgagcaatagcaacaagacctggaggatggaacagaatgggagagccacggggtttctgctgaaggagaacatcaggccctttcagctctatgagatcatcgtgactcccttgtaccaggacaccatgggaccctcccagcatgtctatgcctactctcaagaaatggctccctcccatgccccagagctgcatctaaagcacattggcaagacctgggcacagctggagtgggtgcctgagccccctgagctggggaagagcccccttacccactacaccatcttctggaccaacgctcagaaccagtccttctctctccactcgggagtggagagagaaggtcctgggcattggcctctggctggaaagtgaggctggtccaagtcccctgttggaacctccaatgccaagctcaagctgagatgcgttccctctaagcccccatactgtggttgagttacttgttattctttgatgataagatctggggaatttccgtgtgctggtggacaggaagccaggcccttgatggctgaaaggaatccagttgtctc

SEQ ID NO: 62756 - DNA, 2223 bp, Homo sapiens
tgcaatccccagcccccgggcctgtcagaggctgagccattaacgacagagctcggggagagaagctggactgcagctggtttcaggaacttctcttgacgagaagagagaccaaggaggccaagcaggggctgggccagaggtgccaacatggggaaactgaggctcggctcggaaaggtgaagtaacttgtccaagatcacaaagctggtgaacatcaagttggtgctatggcaaggctgggaaactgcagcctgacttgggctgccctgatcatcctgctgctccccggaagtctggaggagtgcgggcacatcagtgtctcagcccccatcgtccacctgggggatcccatcacagcctcctgcatcatcaagcagaactgcagccatctggacccggagccacagattctgtggagactgggagcagagcttcagcccgggggcaggcagcagcgtctgtctgatgggacccaggaatctatcatcaccctgccccacctcaaccacactcaggcctttctctcctgctgcctgaactggggcaacagcctgcagatcctggaccaggttgagctgcgcgcaggctaccctccagccataccccacaacctctcctgcctcatgaacctcacaaccagcagcctcatctgccagtgggagccaggacctgagacccacctacccaccagcttcactctgaagagtttcaagagccggggcaactgtcagacccaaggggactccatcctggactgcgtgcccaaggacgggcagagccactgctgcatcccacgcaaacacctgctgttgtaccagaatatgggcatctgggtgcaggcagagaatgcgctggggaccagcatgtccccacaactgtgtcttgatcccatggatgttgtgaaactggagccccccatgctgcggaccatggaccccagccctgaagcggcccctccccaggcaggctgcctacagctgtgctgggagccatggcagccaggcctgcacataaatcagaagtgtgagctgcgccacaagccgcagcgtggagaagccagctgggcactggtgggccccctccccttggaggcccttcagtatgagctctgcgggctcctcccagccacggcctacaccctgcagatacgctgcatccgctggcccctgcctggccactggagcgactggagccccagcctggagctgagaactaccgaacgggcccccactgtcagactggacacatggtggcggcagaggcagctggaccccaggacagtgcagctgttctggaagccagtgcccctggaggaagacagcggacggatccaaggttatgtggtttcttggagaccctcaggccaggctggggccatcctgcccctctgcaacaccacagagctcagctgcaccttccacctgccttcagaagcccaggaggtggcccttgtggcctataactcagccgggacctctcgtcccaccccggtggtcttctcagaaagcagaggcccagctctgaccagactccatgccatggcccgagaccctcacagcctctgggtaggctgggagccccccaatccatggcctcagggctatgtgattgagtggggcctgggcccccccagcgcgagcaatagcaacaagacctggaggatggaacagaatgggagagccacggggtttctgctgaaggagaacatcaggccctttcagctctatgagatcatcgtgactcccttgtaccaggacaccatgggaccctcccagcatgtctatgcctactctcaagaaatggctccctcccatgccccagagctgcatctaaagcacattggcaagacctgggcacagctggagtgggtgcctgagccccctgagctggggaagagcccccttacccactacaccatcttctggaccaacgctcagaaccagtccttctctctccactcccaggccctgcgagtctgtccggagtgacctcgttttgtcagtgagagccagggggctgcctccagcacagggggccaggacctggggcgaggacccactacaccagacagggcctgtacctgcagccaagaggggctgagacccacccagtgtgttctgcgtgtgcacccgcgggcagggctgggcctgggagggtcttggcagtggtgagagcacagcgcctgcctgggctcagcctcagcctcactgctttctctcg

SEQ ID NO: 62757 - DNA, 1030 bp, Homo sapiens
gaaacccgaccacgggccattgtggaactgcctggctctgttgcagcccctatagcaggaagaatcccctctggccaagtgtcccagacccagctcacagcagcctgggctcctgggtgcccacaatcatggaggaggatgccttccagctgcccggccttggcacgccacccatcaccaagctcacagtgctggaggaggatgaaaagaagccggtgccctgggagtcccataacagctcagagacctgtggcctccccactctggtccagacctatgtgctccagggggacccaagagcagtttccacccagccccaatcccagtctggcaccagcgatcaggtcctttatgggcagctgctgggcagccccacaagcccagggccagggcactatctccgctgtgactccactcagcccctcttggcgggcctcacccccagccccaagtcctatgagaacctctggttccaggccagccccttggggaccctggtaaccccagccccaagccaggaggacgactgtgtctttgggccactgctcaacttccccctcctgcaggggatccgggtccatgggatggaggcgctggggagcttctagggcttcctggggttcccttcttgggcctgcctcttaaaggcctgagctagctggagaagaggggagggtccataagcccatgactaaaaactaccccagcccaggctctcaccatctccagtcaccagcatctccctctcctcccaatctccataggctgggcctcccaggcgatctgcatactttaaggaccagatcatgctccatccagccccacccaatggccttttgtgcttgtttcctataacttcagtattgtaaactagtttttggtttgcagtttttgttgttgtttatagacactcttgggtgtacctgagtctctgttatttatttttcagggcccagcagtcagggggaaacttctcagagttggtcctttcttcctccctcccttccttcctccctcccttccttccccc

SEQ ID NO: 62758 - DNA, 1230 bp, Homo sapiens
tgcaatccccagcccccgggcctgtcagaggctgagccattaacgacagagctcggggagagaagctggactgcagctggtttcaggaacttctcttgacgagaagagagaccaaggaggccaagcaggggctgggccagaggtgccaacatggggaaactgaggctcggctcggaaaggtgaagtaacttgtccaagatcacaaagctggtgaacatcaagttggtgctatggcaaggctgggaaactgcagcctgacttgggctgccctgatcatcctgctgctccccggaagtctggaggagtgcgggcacatcagtgtctcagcccccatcgtccacctgggggatcccatcacagcctcctgcatcatcaagcagaactgcagccatctggacccggagccacagattctgtggagactgggagcagagcttcagcccgggggcaggcagcagcgtctgtctgatgggacccaggaatctatcatcaccctgccccacctcaaccacactcaggcctttctctcctgctgcctgaactggggcaacagcctgcagatcctggaccaggttgagctgcgcgcaggctaccctccagccataccccacaacctctcctgcctcatgaacctcacaaccagcagcctcatctgccagtgggagccaggacctgagacccacctacccaccagcttcactctgaagagtttcaagagccggggcaactgtcagacccaaggggactccatcctggactgcgtgcccaaggacgggcagagccactgctgcatcccacgcaaacacctgctgttgtaccagaatatgggcatctgggtgcaggcagagaatgcgctggggaccagcatgtccccacaactgtgtcttgatcccatggatgttgtgaaactggagccccccatgctgcggaccatggaccccagccctgaagcggcccctccccaggcaggctgcctacagctgtgctgggagccatggcagccaggcctgcacataaatcagaagtgtgagctgcgccacaagccgcagcgtggagaagccagctgggcactggtgggccccctccccttggaggcccttcagtatgagctctgcgggctcctcccagccacggcctacaccctgacagcacctaacggcatgtatccccctccaccacagcagcagccaccgccaccaccaccgcagatggggtccctccgcctcctgc

SEQ ID NO: 62759 - DNA, 1373 bp, Homo sapiens
aagaatgagccagaatagctggagctgagagaccggtataagctggaactgagagggtcaggcaggggccaggccacaggagctattgaaggatttgagtgtttatcctaatgatggcagcaaatactcacatgccagacactgctctaaatgccttccatatgttatcgcatgtaatccttccagcaacactaaggtagggacgatttttatccccattttacagatgagaaaactgaggcacaggaagtcttagaaatataccaggatcatgtaattaataagcaatagaaccagaatttaaacctaggcagtctagttccaacatccacactcatccatcacaccacactgcctttcagagcaataatgtgccattgaagtgctgcgatggagatggggtagcagaatcagatttgaattgtgaaaagattgctgtggctatgggttcttatcactctaatcactgcttgcaccatccttggggagggcactggggagttaacagtctccatctggtggtgtgctggtgctggcttgcaaaaactaattgtgcacatctcttcccaactccccgatcaatgatgtcacatcaataggctgaaatcagctacagtgagagcacttaacaccgcggaaaggcacacactacaaaccagggtctgcttttctctgccaagctggctgataaacggttaccagcacatcactatctctgtgtcacccccgtagcctctcgaagtctccgtccccatccttccatttccagcccccatatcttgaagggtgagacaggaaggtgaggcctctgagtctaggagtacaaaggcctagattatagcccagctctgctaggcagaggcgtcgttcctggcccattctcttccaccccaggtctggaggagtgcgggcacatcagtgtctcagcccccatcgtccacctgggggatcccatcacagcctcctgcatcatcaagcagaactgcagccatctggacccggagccacagattctgtggagactgggagcagagcttcagcccgggggcaggcagcagcgtctgtctgatgggacccaggaatctatcatcaccctgccccacctcaaccacactcaggcctttctctcctgctgcctgaactggggcaacagcctgcagatcctggaccaggttgagctgcgcgcaggctgtaagtccttccagccatccaactactctgcctccaacaccctcctgccaatactaataagaatattaccagccgggcacgttggctcacgcctgtattcccagcactttgggaggccgaggcaggcggatcacctgaggtcaggagttcatgattcagcctggccagcaaggcgaaacccc

SEQ ID NO: 62760 - DNA, 927 bp, Homo sapiens
tgcaatccccagcccccgggcctgtcagaggctgagccattaacgacagagctcggggagagaagctggactgcagctggtttcaggaacttctcttgacgagaagagagaccaaggaggccaagcaggggctgggccagaggtgccaacatggggaaactgaggctcggctcggaaaggtgaagtaacttgtccaagatcacaaagctggtgaacatcaagttggtgctatggcaaggctgggaaactgcagcctgacttgggctgccctgatcatcctgctgctccccggaagtgagtatggccaaggatgagggtgcagtggggaggggaagctacaaggagagatattgggaatttccttgcactgccacatggctcctgggattcccagagaatcccacaagattcaagtctgagccacagatgtggggtagctggtctcccacccacagacttccacaggcaaaccaccacccaagaggaatggtgagacgacccgggctggtcatcctggaaaaggccagtgaggcgcagatcttgtccgcaaatctctaccaagctgtcagaagcaacccatgggtcctatgcagccttggtgggcagcaaagggatcaggatggaagctacaaggggacaggtttcatcctgaaataaagaagcccaggcagagcttggtttccaaccatggaaactctgtcttgagaggtagagaacttcccatccccaggggtatgcaagctaaagccaggattgataaagatgctgtgcagcaggggttggcaaactttttctgacagtaatgtttaggctttgcaggccacatactgtctctgttccttgtttgtttgtttgtttgtttgtttgttcgtttgtgagacagggtctccactccagcctgagtgacagagcaagaacttgaagaaa

SEQ ID NO: 62761 - DNA, 295 bp, Homo sapiens
ctcagaatgttagattcaagtgggggggaaaataagatagaatttcagatagcaataagcagaaaggagaaattaaaggaggagaagggcatagagagagaggggggaaggggagcactggctattttaatatgctggtcaagaaaggcctcactaagagggtgacaattgagcagatccttgaaggaaatgagggagcaagccgctggatatctggagggaaaacatttcaagcagaagtaacaaccagtgcaaaggccctggggcaagagcggaaacagagacctagagagaa

SEQ ID NO: 62762 - DNA, 485 bp, Homo sapiens
catgaacctgtagtcccagctactcaggaggctgaggtgggaagatcacttgagcctaggaggtcaagggtgcactgagccgtgatcgtgccactgcactccagcctgagtgacagagcaagaacttgaagaaaaaaaagaaaagaaaaagaaaaccaaaacaaaacaacaacaacaaaaaaaaaaaaacagcagggacaaagatccagagattagaaagattttggagttttcaaagaatagcaagaatgagccagaatagctggagctgagagaccggtataagctggaactgagagggtcaggcaggggccaggccacaggagctattgaaggatttgagtgtttatcctaatgatggcagcaaatactcacatgccagacactgctctaaatgccttccatatgttatcgcatgtaatccttccagcaacactaaggtagggacgatttttatccccattttacagatgagaaaactgagg

SEQ ID NO: 62763 - DNA, 408 bp, Homo sapiens
ggccctagaatggcccagcgatccaaggctcagagtcctgtccacccctcaccaggtgggccccctccccttggaggcccttcagtatgagctctgcgggctcctcccagccacggcctacaccctgcagatacgctgcatccgctggcccctgcctggccactggagcgactggagccccagcctggagctgagaactaccgaacggggtaaggaggtgatgagaggctgggagcagccaacagtatccagtccaggccccaggcccctccccaactggcaccccctcttcttgttccatccacagcccccactgtcagactggacacatggtggcggcagaggcagctggaccccaggacagtgcagctgttctggaaggtgactccctctgaaggccatccctcc

SEQ ID NO: 62764 - DNA, 397 bp, Homo sapiens
gagtggagagagaacggggagtgggagagaatgggagagccacggggtttctgctgaaggagaacatcaggccctttcagctctatgagatcatcgtgactcccttgtaccaggacaccatgggaccctcccagcatgtctatgcctactctcaagaaatggctccctcccatgccccagagctgcatctaaagcacattggcaagacctgggcacagctggagtgggtgcctgagccccctgagctggggaagagcccccttacccactacaccatcttctggaccaacgctcagaaccagtccttctccgccaacccatcgctgggtcaatagtacttgccgcagaactcttaaaactaggcggctatggtataatacgcctcacactcattctc

SEQ ID NO: 62765 - DNA, 2974 bp, Homo sapiens
tgcaatccccagcccccgggcctgtcagaggctgagccattaacgacagagctcggggagagaagctggactgcagctggtttcaggaacttctcttgacgagaagagagaccaaggaggccaagcaggggctgggccagaggtgccaacatggggaaactgaggctcggctcggaaaggtgaagtaacttgtccaagatcacaaagctggtgaacatcaagttggtgctatggcaaggctgggaaactgcagcctgacttgggctgccctgatcatcctgctgctccccggaagtctggaggagtgcgggcacatcagtgtctcagcccccatcgtccacctgggggatcccatcacagcctcctgcatcatcaagcagaactgcagccatctggacccggagccacagattctgtggagactgggagcagagcttcagcccgggggcaggcagcagcgtctgtctgatgggacccaggaatctatcatcaccctgccccacctcaaccacactcaggcctttctctcctgctgcctgaactggggcaacagcctgcagatcctggaccaggttgagctgcgcgcaggctaccctccagccataccccacaacctctcctgcctcatgaacctcacaaccagcagcctcatctgccagtgggagccaggacctgagacccacctacccaccagcttcactctgaagagtttcaagagccggggcaactgtcagacccaaggggactccatcctggactgcgtgcccaaggacgggcagagccactgctgcatcccacgcaaacacctgctgttgtaccagaatatgggcatctgggtgcaggcagagaatgcgctggggaccagcatgtccccacaactgtgtcttgatcccatggatgttgtgaaactggagccccccatgctgcggaccatggaccccagccctgaagcggcccctccccaggcaggctgcctacagctgtgctgggagccatggcagccaggcctgcacataaatcagaagtgtgagctgcgccacaagccgcagcgtggagaagccagctgggcactggtgggccccctccccttggaggcccttcagtatgagctctgcgggctcctcccagccacggcctacaccctgcagatacgctgcatccgctggcccctgcctggccactggagcgacatcctgcccctctgcaacaccacagagctcagctgcaccttccacctgccttcagaagcccaggaggtggcccttgtggcctataactcagccgggacctctcgtcccaccccggtggtcttctcagaaagcagaggcccagctctgaccagactccatgccatggcccgagaccctcacagcctctgggtaggctgggagccccccaatccatggcctcagggctatgtgattgagtggggcctgggcccccccagcgcgagcaatagcaacaagacctggaggatggaacagaatgggagagccacggggtttctgctgaaggagaacatcaggccctttcagctctatgagatcatcgtgactcccttgtaccaggacaccatgggaccctcccagcatgtctatgcctactctcaagaaatggctccctcccatgccccagagctgcatctaaagcacattggcaagacctgggcacagctggagtgggtgcctgagccccctgagctggggaagagcccccttacccactacaccatcttctggaccaacgctcagaaccagtccttctccgccatcctgaatgcctcctcccgtggctttgtcctccatggcctggagcccgccagtctgtatcacatccacctcatggctgccagccaggctggggccaccaacagtacagtcctcaccctgatgaccttgaccccagaggggtcggagctacacatcatcctgggcctgttcggcctcctgctgttgctcacctgcctctgtggaactgcctggctctgttgcagccccaacaggaagaatcccctctggccaagtgtcccagacccagctcacagcagcctgggctcctgggtgcccacaatcatggaggaggatgccttccagctgcccggccttggcacgccacccatcaccaagctcacagtgctggaggaggatgaaaagaagccggtgccctgggagtcccataacagctcagagacctgtggcctccccactctggtccagacctatgtgctccagggggacccaagagcagtttccacccagccccaatcccagtctggcaccagcgatcaggtcctttatgggcagctgctgggcagccccacaagcccagggccagggcactatctccgctgtgactccactcagcccctcttggcgggcctcacccccagccccaagtcctatgagaacctctggttccaggccagccccttggggaccctggtaaccccagccccaagccaggaggacgactgtgtctttgggccactgctcaacttccccctcctgcaggggatccgggtccatgggatggaggcgctggggagcttctagggcttcctggggttcccttcttgggcctgcctcttaaaggcctgagctagctggagaagaggggagggtccataagcccatgactaaaaactaccccagcccaggctctcaccatctccagtcaccagcatctccctctcctcccaatctccataggctgggcctcccaggcgatctgcatactttaaggaccagatcatgctccatccagccccacccaatggccttttgtgcttgtttcctataacttcagtattgtaaactagtttttggtttgcagtttttgttgttgtttatagacactcttgggtgtacctgagtctctgttatttatttttcagggcccagcagtcagggggaaacttctcagagttggtcctttcttcctccctcccttccttcctccctcccttccttccccc

SEQ ID NO: 62766 - DNA, 2597 bp, Homo sapiens
ggcgggccggagctcacagcctcggcacacagctcggtttctgcctggagctgctcctgcagctgcaatttctctgccatgagctgagactgcagcgtctccatccctgagacccacctacccaccagcttcactctgaagagtttcaagagccggggcaactgtcagacccaaggggactccatcctggactgcgtgcccaaggacgggcagagccactgctgcatcccacgcaaacacctgctgttgtaccagaatatgggcatctgggtgcaggcagagaatgcgctggggaccagcatgtccccacaactgtgtcttgatcccatggatgttgtgaaactggagccccccatgctgcggaccatggaccccagccctgaagcggcccctccccaggcaggctgcctacagctgtgctgggagccatggcagccaggcctgcacataaatcagaagtgtgagctgcgccacaagccgcagcgtggagaagccagctgggcactggtgggccccctccccttggaggcccttcagtatgagctctgcgggctcctcccagccacggcctacaccctgcagatacgctgcatccgctggcccctgcctggccactggagcgactggagccccagcctggagctgagaactaccgaacgggcccccactgtcagactggacacatggtggcggcagaggcagctggaccccaggacagtgcagctgttctggaagccagtgcccctggaggaagacagcggacggatccaaggttatgtggtttcttggagaccctcaggccaggctggggccatcctgcccctctgcaacaccacagagctcagctgcaccttccacctgccttcagaagcccaggaggtggcccttgtggcctataactcagccgggacctctcgtcccaccccggtggtcttctcagaaagcagaggcccagctctgaccagactccatgccatggcccgagaccctcacagcctctgggtaggctgggagccccccaatccatggcctcagggctatgtgattgagtggggcctgggcccccccagcgcgagcaatagcaacaagacctggaggatggaacagaatgggagagccacggggtttctgctgaaggagaacatcaggccctttcagctctatgagatcatcgtgactcccttgtaccaggacaccatgggaccctcccagcatgtctatgcctactctcaagaaatggctccctcccatgccccagagctgcatctaaagcacattggcaagacctgggcacagctggagtgggtgcctgagccccctgagctggggaagagcccccttacccactacaccatcttctggaccaacgctcagaaccagtccttctccgccatcctgaatgcctcctcccgtggctttgtcctccatggcctggagcccgccagtctgtatcacatccacctcatggctgccagccaggctggggccaccaacagtacagtcctcaccctgatgaccttgaccccagaggggtcggagctacacatcatcctgggcctgttcggcctcctgctgttgctcacctgcctctgtggaactgcctggctctgttgcagccccaacaggaagaatcccctctggccaagtgtcccagacccagctcacagcagcctgggctcctgggtgcccacaatcatggaggaggatgccttccagctgcccggccttggcacgccacccatcaccaagctcacagtgctggaggaggatgaaaagaagccggtgccctgggagtcccataacagctcagagacctgtggcctccccactctggtccagacctatgtgctccagggggacccaagagcagtttccacccagccccaatcccagtctggcaccagcgatcaggtcctttatgggcagctgctgggcagccccacaagcccagggccagggcactatctccgctgtgactccactcagcccctcttggcgggcctcacccccagccccaagtcctatgagaacctctggttccaggccagccccttggggaccctggtaaccccagccccaagccaggaggacgactgtgtctttgggccactgctcaacttccccctcctgcaggggatccgggtccatgggatggaggcgctggggagcttctagggcttcctggggttcccttcttgggcctgcctcttaaaggcctgagctagctggagaagaggggagggtccataagcccatgactaaaaactaccccagcccaggctctcaccatctccagtcaccagcatctccctctcctcccaatctccataggctgggcctcccaggcgatctgcatactttaaggaccagatcatgctccatccagccccacccaatggccttttgtgcttgtttcctataacttcagtattgtaaactagtttttggtttgcagtttttgttgttgtttatagacactcttgggtgtacctgagtctctgttatttatttttcagggcccagcagtcagggggaaacttctcagagttggtcctttcttcctccctcccttccttcctccctcccttccttccccc

SEQ ID NO: 62767 - DNA, 3332 bp, Homo sapiens
tgcaatccccagcccccgggcctgtcagaggctgagccattaacgacagagctcggggagagaagctggactgcagctggtttcaggaacttctcttgacgagaagagagaccaaggaggccaagcaggggctgggccagaggtgccaacatggggaaactgaggctcggctcggaaaggtgaagtaacttgtccaagatcacaaagctggtgaacatcaagttggtgctatggcaaggctgggaaactgcagcctgacttgggctgccctgatcatcctgctgctccccggaagtctggaggagtgcgggcacatcagtgtctcagcccccatcgtccacctgggggatcccatcacagcctcctgcatcatcaagcagaactgcagccatctggacccggagccacagattctgtggagactgggagcagagcttcagcccgggggcaggcagcagcgtctgtctgatgggacccaggaatctatcatcaccctgccccacctcaaccacactcaggcctttctctcctgctgcctgaactggggcaacagcctgcagatcctggaccaggttgagctgcgcgcaggctaccctccagccataccccacaacctctcctgcctcatgaacctcacaaccagcagcctcatctgccagtgggagccaggacctgagacccacctacccaccagcttcactctgaagagtttcaagagccggggcaactgtcagacccaaggggactccatcctggactgcgtgcccaaggacgggcagagccactgctgcatcccacgcaaacacctgctgttgtaccagaatatgggcatctgggtgcaggcagagaatgcgctggggaccagcatgtccccacaactgtgtcttgatcccatggatgttgtgaaactggagccccccatgctgcggaccatggaccccagccctgaagcggcccctccccaggcaggctgcctacagctgtgctgggagccatggcagccaggcctgcacataaatcagaagtgtgagctgcgccacaagccgcagcgtggagaagccagctgggcactggtgggccccctccccttggaggcccttcagtatgagctctgcgggctcctcccagccacggcctacaccctgcagatacgctgcatccgctggcccctgcctggccactggagcgactggagccccagcctggagctgagaactaccgaacgggcccccactgtcagactggacacatggtggcggcagaggcagctggaccccaggacagtgcagctgttctggaagccagtgcccctggaggaagacagcggacggatccaaggttatgtggtttcttggagaccctcaggccaggctggggccatcctgcccctctgcaacaccacagagctcagctgcaccttccacctgccttcagaagcccaggaggtggcccttgtggcctataactcagccgggacctctcgtcccaccccggtggtcttctcagaaagcagaggcccagctctgaccagactccatgccatggcccgagaccctcacagcctctgggtaggctgggagccccccaatccatggcctcagggctatgtgattgagtggggcctgggcccccccagcgcgagcaatagcaacaagacctggaggatggaacagaatgggagagccacggggtttctgctgaaggagaacatcaggccctttcagctctatgagatcatcgtgactcccttgtaccaggacaccatgggaccctcccagcatgtctatgcctactctcaagaaatggctccctcccatgccccagagctgcatctaaagcacattggcaagacctgggcacagctggagtgggtgcctgagccccctgagctggggaagagcccccttacccactacaccatcttctggaccaacgctcagaaccagtccttctccgccatcctgaatgcctcctcccgtggctttgtcctccatggcctggagcccgccagtctgtatcacatccacctcatggctgccagccaggctggggccaccaacagtacagtcctcaccctgatgaccttgaccccagtaaggggagacgggggctgggcagagatggctgtttggagggtaccccacccaaaggatgctgattttgagagtagctggggactgactttgaatcccctggtcggagggaggagacccagccttcccaacatgcattctaacttcttccggccctgccctcactgcagaggggtcggagctacacatcatcctgggcctgttcggcctcctgctgttgctcacctgcctctgtggaactgcctggctctgttgcagccccaacaggaagaatcccctctggccaagtgtcccagacccagctcacagcagcctgggctcctgggtgcccacaatcatggaggaggatgccttccagctgcccggccttggcacgccacccatcaccaagctcacagtgctggaggaggatgaaaagaagccggtgccctgggagtcccataacagctcagagacctgtggcctccccactctggtccagacctatgtgctccagggggacccaagagcagtttccacccagccccaatcccagtctggcaccagcgatcaggtcctttatgggcagctgctgggcagccccacaagcccagggccagggcactatctccgctgtgactccactcagcccctcttggcgggcctcacccccagccccaagtcctatgagaacctctggttccaggccagccccttggggaccctggtaaccccagccccaagccaggaggacgactgtgtctttgggccactgctcaacttccccctcctgcaggggatccgggtccatgggatggaggcgctggggagcttctagggcttcctggggttcccttcttgggcctgcctcttaaaggcctgagctagctggagaagaggggagggtccataagcccatgactaaaaactaccccagcccaggctctcaccatctccagtcaccagcatctccctctcctcccaatctccataggctgggcctcccaggcgatctgcatactttaaggaccagatcatgctccatccagccccacccaatggccttttgtgcttgtttcctataacttcagtattgtaaactagtttttggtttgcagtttttgttgttgtttatagacactcttgggtgtacctgagtctctgttatttatttttcagggcccagcagtcagggggaaacttctcagagttggtcctttcttcctccctcccttccttcctccctcccttccttccccc

SEQ ID NO: 62768 - DNA, 1500 bp, Homo sapiens
tagctggcccgagttgtgggacacggggtttctgctgaaggagaacatcaggccctttcagctctatgagatcatcgtgactcccttgtaccaggacaccatgggaccctcccagcatgtctatgcctactctcaagaaatggctccctcccatgccccagagctgcatctaaagcacattggcaagacctgggcacagctggagtgggtgcctgagccccctgagctggggaagagcccccttacccactacaccatcttctggaccaacgctcagaaccagtccttctccgccatcctgaatgcctcctcccgtggctttgtcctccatggcctggagcccgccagtctgtatcacatccacctcatggctgccagccaggctggggccaccaacagtacagtcctcaccctgatgaccttgaccccagaggggtcggagctacacatcatcctgggcctgttcggcctcctgctgttgctcacctgcctctgtggaactgcctggctctgttgcagccccaacaggaagaatcccctctggccaagtgtcccagacccagctcacagcagcctgggctcctgggtgcccacaatcatggaggaggatgccttccagctgcccggccttggcacgccacccatcaccaagctcacagtgctggaggaggatgaaaagaagccggtgccctgggagtcccataacagctcagagacctgtggcctccccactctggtccagacctatgtgctccagggggacccaagagcagtttccacccagccccaatcccagtctggcaccagcgatcaggtcctttatgggcagctgctgggcagccccacaagcccagggccagggcactatctccgctgtgactccactcagcccctcttggcgggcctcacccccagccccaagtcctatgagaacctctggttccaggccagccccttggggaccctggtaaccccagccccaagccaggaggacgactgtgtctttgggccactgctcaacttccccctcctgcaggggatccgggtccatgggatggaggcgctggggagcttctagggcttcctggggttcccttcttgggcctgcctcttaaaggcctgagctagctggagaagaggggagggtccataagcccatgactaaaaactaccccagcccaggctctcaccatctccagtcaccagcatctccctctcctcccaatctccataggctgggcctcccaggcgatctgcatactttaaggaccagatcatgctccatccagccccacccaatggccttttgtgcttgtttcctataacttcagtattgtaaactagtttttggtttgcagtttttgttgttgtttatagacactcttgggtgtacctgagtctctgttatttatttttcagggcccagcagtcagggggaaacttctcagagttggtcctttcttcctccctcccttccttcctccctcccttccttccccc

SEQ ID NO: 62769 - DNA, 1519 bp, Homo sapiens
gagtggagagagaacggggagtgggagagaatgggagagccacggggtttctgctgaaggagaacatcaggccctttcagctctatgagatcatcgtgactcccttgtaccaggacaccatgggaccctcccagcatgtctatgcctactctcaagaaatggctccctcccatgccccagagctgcatctaaagcacattggcaagacctgggcacagctggagtgggtgcctgagccccctgagctggggaagagcccccttacccactacaccatcttctggaccaacgctcagaaccagtccttctccgccatcctgaatgcctcctcccgtggctttgtcctccatggcctggagcccgccagtctgtatcacatccacctcatggctgccagccaggctggggccaccaacagtacagtcctcaccctgatgaccttgaccccagaggggtcggagctacacatcatcctgggcctgttcggcctcctgctgttgctcacctgcctctgtggaactgcctggctctgttgcagccccaacaggaagaatcccctctggccaagtgtcccagacccagctcacagcagcctgggctcctgggtgcccacaatcatggaggaggatgccttccagctgcccggccttggcacgccacccatcaccaagctcacagtgctggaggaggatgaaaagaagccggtgccctgggagtcccataacagctcagagacctgtggcctccccactctggtccagacctatgtgctccagggggacccaagagcagtttccacccagccccaatcccagtctggcaccagcgatcaggtcctttatgggcagctgctgggcagccccacaagcccagggccagggcactatctccgctgtgactccactcagcccctcttggcgggcctcacccccagccccaagtcctatgagaacctctggttccaggccagccccttggggaccctggtaaccccagccccaagccaggaggacgactgtgtctttgggccactgctcaacttccccctcctgcaggggatccgggtccatgggatggaggcgctggggagcttctagggcttcctggggttcccttcttgggcctgcctcttaaaggcctgagctagctggagaagaggggagggtccataagcccatgactaaaaactaccccagcccaggctctcaccatctccagtcaccagcatctccctctcctcccaatctccataggctgggcctcccaggcgatctgcatactttaaggaccagatcatgctccatccagccccacccaatggccttttgtgcttgtttcctataacttcagtattgtaaactagtttttggtttgcagtttttgttgttgtttatagacactcttgggtgtacctgagtctctgttatttatttttcagggcccagcagtcagggggaaacttctcagagttggtcctttcttcctccctcccttccttcctccctcccttccttccccc

SEQ ID NO: 62770 - DNA, 2108 bp, Homo sapiens
tgcaatccccagcccccgggcctgtcagaggctgagccattaacgacagagctcggggagagaagctggactgcagctggtttcaggaacttctcttgacgagaagagagaccaaggaggccaagcaggggctgggccagaggtgccaacatggggaaactgaggctcggctcggaaaggtgaagtaacttgtccaagatcacaaagctggtgaacatcaagttggtgctatggcaaggctgggaaactgcagcctgacttgggctgccctgatcatcctgctgctccccggaagtctggaggagtgcgggcacatcagtgtctcagcccccatcgtccacctgggggatcccatcacagcctcctgcatcatcaagcagaactgcagccatctggacccggagccacagattctgtggagactgggagcagagcttcagcccgggggcaggcagcagcgtctgtctgatgggacccaggaatctatcatcaccctgccccacctcaaccacactcaggcctttctctcctgctgcctgaactggggcaacagcctgcagatcctggaccaggttgagctgcgcgcaggctaccctccagccataccccacaacctctcctgcctcatgaacctcacaaccagcagcctcatctgccagtgggagccaggacctgagacccacctacccaccagcttcactctgaagagtttcaagagccggggcaactgtcagacccaaggggactccatcctggactgcgtgcccaaggacgggcagagccactgctgcatcccacgcaaacacctgctgttgtaccagaatatgggcatctgggtgcaggcagagaatgcgctggggaccagcatgtccccacaactgtgtcttgatcccatggatgttgtgaaactggagccccccatgctgcggaccatggaccccagccctgaagcggcccctccccaggcaggctgcctacagctgtgctgggagccatggcagccaggcctgcacataaatcagaagtgtgagctgcgccacaagccgcagcgtggagaagccagctgggcactggtgggccccctccccttggaggcccttcagtatgagctctgcgggctcctcccagccacggcctacaccctgcagatacgctgcatccgctggcccctgcctggccactggagcgactggagccccagcctggagctgagaactaccgaacgggcccccactgtcagactggacacatggtggcggcagaggcagctggaccccaggacagtgcagctgttctggaagccagtgcccctggaggaagacagcggacggatccaaggttatgtggtttcttggagaccctcaggccaggctggggccatcctgcccctctgcaacaccacagagctcagctgcaccttccacctgccttcagaagcccaggaggtggcccttgtggcctataactcagccgggacctctcgtcccaccccggtggtcttctcagaaagcagaggcccagctctgaccagactccatgccatggcccgagaccctcacagcctctgggtaggctgggagccccccaatccatggcctcagggctatgtgattgagtggggcctgggcccccccagcgcgagcaatagcaacaagacctggaggatggaacagaatgggagagccacggggtttctgctgaaggagaacatcaggccctttcagctctatgagatcatcgtgactcccttgtaccaggacaccatgggaccctcccagcatgtctatgcctactctcaagaaatggctccctcccatgccccagagctgcatctaaagcacattggcaagacctgggcacagctggagtgggtgcctgagccccctgagctggggaagagcccccttacccactacaccatcttctggaccaacgctcagaaccagtccttctccgccatcctgaatgcctcctcccgtggctttgtcctccatggcctggagcccgccagtctgtatcacatccacctcatggctgccagccaggctggggccaccaacagtacagtcctctgtagttggccaggcctctggagttggggagttggg

SEQ ID NO: 62771 - DNA, 1383 bp, Homo sapiens
gtaaagctgcctccgtggcagctgagcacccccttccagcccttctgggtctgtgggggaactgaggatagactcacagaaggactggttctgagcgttggtccagaagatggtgtagtgggtaagggggctcttccccagctcataaggggagacgggggctgggcagagatggctgtttggagggtaccccacccaaaggatgctgattttgagagtagctggggactgactttgaatcccctggtcggagggaggagacccagccttcccaacatgcattctaacttcttccggccctgccctcactgcagaggggtcggagctacacatcatcctgggcctgttcggcctcctgctgttgctcacctgcctctgtggaactgcctggctctgttgcagccccaacaggaagaatcccctctggccaagtgtcccagacccagctcacagcagcctgggctcctgggtgcccacaatcatggaggaggatgccttccagctgcccggccttggcacgccacccatcaccaagctcacagtgctggaggaggatgaaaagaagccggtgccctgggagtcccataacagctcagagacctgtggcctccccactctggtccagacctatgtgctccagggggacccaagagcagtttccacccagccccaatcccagtctggcaccagcgatcaggtcctttatgggcagctgctgggcagccccacaagcccagggccagggcactatctccgctgtgactccactcagcccctcttggcgggcctcacccccagccccaagtcctatgagaacctctggttccaggccagccccttggggaccctggtaaccccagccccaagccaggaggacgactgtgtctttgggccactgctcaacttccccctcctgcaggggatccgggtccatgggatggaggcgctggggagcttctagggcttcctggggttcccttcttgggcctgcctcttaaaggcctgagctagctggagaagaggggagggtccataagcccatgactaaaaactaccccagcccaggctctcaccatctccagtcaccagcatctccctctcctcccaatctccataggctgggcctcccaggcgatctgcatactttaaggaccagatcatgctccatccagccccacccaatggccttttgtgcttgtttcctataacttcagtattgtaaactagtttttggtttgcagtttttgttgttgtttatagacactcttgggtgtacctgagtctctgttatttatttttcagggcccagcagtcagggggaaacttctcagagttggtcctttcttcctccctcccttccttcctccctcccttccttccccc

SEQ ID NO: 62772 - DNA, 2048 bp, Homo sapiens
tgcaatccccagcccccgggcctgtcagaggctgagccattaacgacagagctcggggagagaagctggactgcagctggtttcaggaacttctcttgacgagaagagagaccaaggaggccaagcaggggctgggccagaggtgccaacatggggaaactgaggctcggctcggaaaggtgaagtaacttgtccaagatcacaaagctggtgaacatcaagttggtgctatggcaaggctgggaaactgcagcctgacttgggctgccctgatcatcctgctgctccccggaagtctggaggagtgcgggcacatcagtgtctcagcccccatcgtccacctgggggatcccatcacagcctcctgcatcatcaagcagaactgcagccatctggacccggagccacagattctgtggagactgggagcagagcttcagcccgggggcaggcagcagcgtctgtctgatgggacccaggaatctatcatcaccctgccccacctcaaccacactcaggcctttctctcctgctgcctgaactggggcaacagcctgcagatcctggaccaggttgagctgcgcgcaggctaccctccagccataccccacaacctctcctgcctcatgaacctcacaaccagcagcctcatctgccagtgggagccaggacctgagacccacctacccaccagcttcactctgaagagtttcaagagccggggcaactgtcagacccaaggggactccatcctggactgcgtgcccaaggacgggcagagccactgctgcatcccacgcaaacacctgctgttgtaccagaatatgggcatctgggtgcaggcagagaatgcgctggggaccagcatgtccccacaactgtgtcttgatcccatggatgttgtgaaactggagccccccatgctgcggaccatggaccccagccctgaagcggcccctccccaggcaggctgcctacagctgtgctgggagccatggcagccaggcctgcacataaatcagaagtgtgagctgcgccacaagccgcagcgtggagaagccagctgggcactggtgggccccctccccttggaggcccttcagtatgagctctgcgggctcctcccagccacggcctacaccctgcagatacgctgcatccgctggcccctgcctggccactggagcgactggagccccagcctggagctgagaactaccgaacgggcccccactgtcagactggacacatggtggcggcagaggcagctggaccccaggacagtgcagctgttctggaagccagtgcccctggaggaagacagcggacggatccaaggttatgtggtttcttggagaccctcaggccaggctggggccatcctgcccctctgcaacaccacagagctcagctgcaccttccacctgccttcagaagcccaggaggtggcccttgtggcctataactcagccgggacctctcgtcccaccccggtggtcttctcagaaagcagaggcccagctctgaccagactccatgccatggcccgagaccctcacagcctctgggtaggctgggagccccccaatccatggcctcagggctatgtgatttgacgttgggtggcctgtgtgcccccccccaagctgccggacgccaaaattaaggccaaaccaaaaggaacccccttggtgcaagggggacttgggaaacaccaatggacacacttgcggtggaacggaaggccccaacacgggctgggtgtatttacattaggcccttcgaaaacgcggggaccgaacaaccgactttcaagggacccccatttttttccaaaggccttccctaatcaggaagaattcccattcaggtgtggaaaccttcccccctttagtttaaacccacacgttggaaaccacgcgcccaatgttgggggggaaaccccccttacgaccccaagggaccaattgggttcccgttaaatttggccccttaaatcgttcctgtccaacagggcacacaattgggggcctccccctttcccccac

SEQ ID NO: 62773 - DNA, 1048 bp, Homo sapiens
tgcaatccccagcccccgggcctgtcagaggctgagccattaacgacagagctcggggagagaagctggactgcagctggtttcaggaacttctcttgacgagaagagagaccaaggaggccaagcaggggctgggccagaggtgccaacatggggaaactgaggctcggctcggaaaggtgaagtaacttgtccaagatcacaaagctggtgaacatcaagttggtgctatggcaaggctgggaaactgcagcctgacttgggctgccctgatcatcctgctgctccccggaagtctggaggagtgcgggcacatcagtgtctcagcccccatcgtccacctgggggatcccatcacagcctcctgcatcatcaagcagaactgcagccatctggacccggagccacagattctgtggagactgggagcagagcttcagcccgggggcaggcagcagcgtctgtctgatgggacccaggaatctatcatcaccctgccccacctcaaccacactcaggcctttctctcctgctgcctgaactggggcaacagcctgcagatcctggaccaggttgagctgcgcgcaggctaccctccagccataccccacaacctctcctgcctcatgaacctcacaaccagcagcctcatctgccagtgggagccaggacctgagacccacctacccaccagcttcactctgaagagtttcaagagccggggcaactgtcagacccaaggggactccatcctggactgcgtgcccaaggacgggcagagccactgctgcatcccacgcaaacacctgctgttgtaccagaatatgggcatctgggtgcaggcagagaatgcgctggggaccagcatgtccccacaactgtgtcttgatcccatggatgttggtgggtgatgcaggggagggaggggatccccaaaatgggcagacactgagaggaatggagagggaaacacagaactagcgacagacaagaagacactggaagacctagagacagaggcacagaagagggacagagacaaagaaag

SEQ ID NO: 62774 - DNA, 901 bp, Homo sapiens
caggcagctggagggaaggaagcgatggcggaggagcgggagcctgaattgtacctgaagtggaagcactgcgagacgccaggcgtgaagaccctgtgtaatctgaagcactgcgagacgccaggagtgaagaccctgtgtaatctgaagaaacttctgaatcggcttcagaaagaccaccgggaggacgtctacctctacatctctggacacctgaaccccaacaagctctaccagcctccggagacgatcttacagcactggcccaatgcccaccggcccaagggggagcgcgcctctgaggtgggagagccgcccgcagggaaggtggcgaggatgaaggaggccctggcccacttcaccatccacacggccctggtccccagtgaggcccaggacaccccgctgttcaggtacctgaacccccaggcctctctttcccacacttcagaggaggatttccttccagtggaggctgtcagagaggggaaggaagaaaagaaaggaggccctcctggacggggccctcctggatggcgcaggagggaagaactccggctgcccgacttgaaggtgctgtgctaccaggaggccgggtccagaggcaccagggaccggcaccactatgtcagctcctacctggccggagccaccagcgcagacaggtacaggatgttcctgcgtttccagaaggaagtgctcgccaagcaagatctcctgaagaatgacttcactgggagcaaggcggccgcgggccacgagagaaagctgcagcaggagctccagaaaaattgttgcacgttgcgcccccagagttcacagactggccgtctttggcacagttctcgacagattttgggacagtcttggaatggggagccctgaacaagtaggcagaatg

SEQ ID NO: 62775 - DNA, 1113 bp, Homo sapiens
agcgtggggttggagtctccggaagcctgaagaggaggaggaggaggagggacgaagcggcaggttgcaggctgttcagagggtgattttaaaaagccgcacttcagagcattccctggcatgctgcctttccgcgctcctataaatgaccacaaagctcagcgcgtccacattcatcaagtcagaagtcctttattttgtctctgtgaccctgaaggctggtgctattaatgtgatttacgcatgggagtctgtggggagtgtacctgaagtggaagcactgcgagacgccaggcgtgaagaccctgtgtaatctgaagcactgcgagacgccaggagtgaagaccctgtgtaatctgaagaaacttctgaatcggcttcagaaagaccaccgggaggacgtctacctctacatctctggacacctgaaccccaacaagctctaccagcctccggagacgatcttacagcactggcccaatgcccaccggcccaagggggagcgcgcctctgaggtgggagagccgcccgcagggaaggtggcgaggatgaaggaggccctggcccacttcaccatccacacggccctggtccccagtgaggcccaggacaccccgctgttcaggtacctgaacccccaggcctctctttcccacacttcagaggaggatttccttccagtggaggctgtcagagaggggaaggaagaaaagaaaggaggccctcctggacggggccctcctggatggcgcaggagggaagaactccggctgcccgacttgaaggtgctgtgctaccaggaggccgggtccagaggcaccagggaccggcaccactatgtcagctcctacctggccggagccaccagcgcagacaggtacaggatgttcctgcgtttccagaaggaagtgctcgccaagcaagatctcctgaagaatgacttcactgggagcaaggcggccgcgggccacgagagaaagctgcagcaggagctccagaaaaattgttgcacgttgcgcccccagagttcacagactggccgtctttggcacagttctcgacagattttgggacagtcttggaatggggagccctgaacaagtaggcagaatg

SEQ ID NO: 62776 - DNA, 707 bp, Homo sapiens
ataaggtcatcttttttccatgatgagtgtaacatctttgccccatcctgggattcaggagcctctggaatgtctatggagacagagtctcatacaagtgaatgtttttagttccattttggaaaaatgcaaagataagaatctctgaaagttaccagtatcaaacacattatttacacattatttacaatgcaccattggtggtgagtagaattccccgtgttaggtttactaagtcctggagaaaactgctctgagattggcagtgctatggaaaattacaacatctgcaatttataaagatggtccgcccatctagactaataatgacattggaaaatgctgtgatgtgtgagacaagaagcatctggtgtgtgacaaacacaaatacatcacatatcgagaaagaaggaggtgacacagcttgaagacctcccacgccagagctgaaagcctgagtcaactgccagtggtgttttgaatcattttttaaatagactatgctacaagaaaatcttacttcttccaaacagtgtgatattgctactttcattaaatgaatgtcctttttgtgtgttttgtggtagaagtggttaaggcagtggtgttcagtctttgggcttccctgggccacactggaaaaaagaagaattgtcttgggctacacataaaatactctaacgatcgctggtgagctaaaaaaaaaa

SEQ ID NO: 62777 - DNA, 509 bp, Homo sapiens
taatttatttacataactacagaatcctttaacatcttatggaaatgggattggattttagaagatagtaatgatggtgggaagttgttctggaaggttttaggaaacactgtagtattataaggatttcttctgaacttgtgttggtctctggtcatcgttgtggagaacagaatccacagagtagctagattaagcacaaaagaatgcattgaggtatatagatagatcacagaattgtcgggacaggctgaagaaacagggctgcgggtgggagcttcttgatagtctgcagaactggtctgccaagagagctgttgcctatgccaccatcgagaagcttctcccacaactgcctctgccagattgggaagccactgggtccacagttgtgtgtctctatcctagcaggaagtggggctgggcagtttgttttcagtcctattttaggaaggagggactttacactaaggtgaactatcaaatgtggagagaatgtctaaaagacg

SEQ ID NO: 62778 - DNA, 213 bp, Homo sapiens
ttgttatgtgagagaaataacccaatatagtaaggctatcatcagcagattccattacatgtggccaagtgcaattcctaatcaatgctcttgatctctacatttcctcatcttccactcactctcaagccatgtcattctggcttctggcctgtcattccactgagctcactgatgatctacatgttgtgaaatccaggagacatttttagg

SEQ ID NO: 62779 - DNA, 485 bp, Homo sapiens
agtagcacagagctgaaggctttttgaaccaggagtctgggttgtggcttgggtcgcagtaagggcttagcctatcaatgcagaattcacattgaaaaagactttcctctcttgtcccaacacaaaaaagcaagccaagatctgatgcccatatcactgcctcctctgacttgggctacaggagtttcctgaaggaaaccaaattttacatctctgtcacattccagatcaccttagaggccacgctcccaagattagttatcaccctggcagtatgaatacttccctaaggcctcccatccatggaggggaagagtgggaaccagctgttacactcagcatctactgagcactgatgggagccctgcctgggccatgtgctgtggggccaaatggacatcactccctaacttcttgaggtctgtctcctctgtggattcacgcatgtatcaacctcattaaactatgccaaacttttacctcct

SEQ ID NO: 62780 - DNA, 1698 bp, Homo sapiens
gattgggggaatgcaggaaaaaccccatccctccctacagagcctcagcagtgacagctacttcccggatgagaagggcggccgtgaagccagcagggaagccagccccacagccaagggccccccagcctcctcacagctccccatagcctggacctgccggccctccctccaggaccgaggggctcccaagggaaactcaggcgtgtgctggtcccaatgtcagtgaaacccagctgggggcctggcccctcggagggggtcaccgcagtgcctaccagtgaccttggagagatccacaactggaccgagctgcttgacctcttcaaccacactttgtctgagtgccacgtggagctcagccagagcaccaagcgcgtggtcctctttgccctctacctggccatgtttgtggttgggctggtggagaacctcctggtgatatgcgtcaactggcgcggctcaggccgggcagggctgatgaacctctacatcctcaacatggccatcgcggacctgggcattgtcctgtctctgcccgtgtggatgctggaggtcacgctggactacacctggctctggggcagcttctcctgccgcttcactcactacttctactttgtcaacatgtatagcagcatcttcttcctggtgtgcctcagtgtcgaccgctatgtcaccctcaccagcgcctccccctcctggcagcgttaccagcaccgagtgcggcgggccatgtgtgcaggcatctgggtcctctcggccatcatcccgctgcctgaggtggtccacatccagctggtggagggccctgagcccatgtgcctcttcatggcaccttttgaaacgtacagcacctgggccctggcggtggccctgtccaccaccatcctgggcttcctgctgcccttccctctcatcacagtcttcaatgtgctgacagcctgccggctgcggcagccaggacaacccaagagccggcgccactgcttgctgctgtgcgcctacgtggccgtctttgtcatgtgctggctgccctatcatgtgaccctgctgctgctcacactgcatgggacccacatctccctccactgccacctggtccacctgctctacttcttctatgatgtcattgactgcttctccatgctgcactgtgtcatcaaccccatcctttacaactttctcagcccacacttccggggccggctcctgaatgctgtagtccattaccttcctaaggaccagaccaaggcgggcacatgcgcctcctcttcctcctgttccacccagcattccatcatcatcaccaagggtgatagccagcctgctgcagcagccccccaccctgagccaagcctgagctttcaggcacaccatttgcttccaaatacttcccccatctctcccactcagcctcttacacccagctgaggtagaggccagactcctccaacagtgaaggaaaaggcacaggtgagagtataggtgggagatttggggggatgtagaggggagggtcaaagcactcgtggtcaattttgaatctatcttaaaatactgaggtgtggagagagagacaggatcaggagcgatagagagcaggccctcagtgttgtactatttgtctcggtccttgtgtctaaggagcaatgcagaaaaaaaggtgaaataaatggaagagatagccatggactc

SEQ ID NO: 62781 - DNA, 1466 bp, Homo sapiens
gattgggggaatgcaggaaaaaccccatccctccctacagagcctcagcagtgacagctacttcccggatgagaagggcggccgtgaagccagcagggaagccagccccacagccaagggccccccagcctcctcacagctccccatagcctggacctgccggccctccctccaggaccgaggggctcccaagggaaactcaggcgtgtgctggtcccaatgtcagtgaaacccagctgggggcctggcccctcggagggggtcaccgcagtgcctaccagtgaccttggagagatccacaactggaccgagctgcttgacctcttcaaccacactttgtctgagtgccacgtggagctcagccagagcaccaagcgcgtggtcctctttgccctctacctggccatgtttgtggttgggctggtggagaacctcctggtgatatgcgtcaactggcgcggctcaggccgggcagggctgatgaacctctacatcctcaacatggccatcgcggacctgggcattgtcctgtctctgcccgtgtggatgctggaggtcacgctggactacacctggctctggggcagcttctcctgccgcttcactcactacttctactttgtcaacatgtatagcagcatcttcttcctggtgtgcctcagtgtcgaccgctatgtcaccctcaccagcgcctccccctcctggcagcgttaccagcaccgagtgcggcgggccatgtgtgcaggcatctgggtcctctcggccatcatcccgctgcctgaggtggtccacatccagctggtggagggccctgagcccatgtgcctcttcatggcaccttttgaaacgtacagcacctgggccctggcggtggccctgtccaccaccatcctgggcttcctgctgcccttccctctcatcacagtcttcaatgtgctgacagcctgccggctgcggcagccaggacaacccaagagccggcgccactgcttgctgctgtgcgcctacgtggccgtctttgtcatgtgctggctgccctatcatgtgaccctgctgctgctcacactgcatgggacccacatctccctccactgccacctggtccacctgctctacttcttctatgatgtcattgactgcttctccatgctgcactgtgtcatcaaccccatcctttacaactttctcagcccacacttccggggccggctcctgaatgctgtagtccattaccttcctaaggaccagaccaaggcgggcacatgcgcctcctcttcctcctgttccacccagcattccatcatcatcaccaagggtgatagccagcctgctgcagcagccccccaccctgagccaagcctgagctttcaggcacaccatttgcttccaaatacttcccccatctctcccactcagcctcttacacccagctgaggtactagaattcagcggccgctgaattctag

SEQ ID NO: 62782 - DNA, 1734 bp, Homo sapiens
gattgggggaatgcaggaaaaaccccatccctccctacagagcctcagcagtgacagctacttcccggatgagaagggcggccgtgaagccagcagggaagccagccccacagccaagggccccccagcctcctcacagctccccatagcctggacctgccggccctccctccaggaccgaggggctcccaagggaaactcaggcgtgtgctggtcccaatgtcagtgaaacccagctgggggcctggcccctcggagggggtcaccgcagtgcctaccagtgaccttggagagatccacaactggaccgagctgcttgacctcttcaaccacactttgtctgagtgccacgtggagctcagccagagcaccaagcgcgtggtcctctttgccctctacctggccatgtttgtggttgggctggtggagaacctcctggtgatatgcgtcaactggcgcggctcaggccgggcagggctgatgaacctctacatcctcaacatggccatcgcggacctgggcattgtcctgtctctgcccgtgtggatgctggaggtcacgctggactacacctggctctggggcagcttctcctgccgcttcactcactacttctactttgtcaacatgtatagcagcatcttcttcctggtgtgcctcagtgtcgaccgctatgtcaccctcaccagcgcctccccctcctggcagcgttaccagcaccgagtgcggcgggccatgtgtgcaggcatctgggtcctctcggccatcatcccgctgcctgaggtggtccacatccagctggtggagggccctgagcccatgtgcctcttcatggcaccttttgaaacgtacagcacctgggccctggcggtggccctgtccaccaccatcctgggcttcctgctgcccttccctctcatcacagtcttcaatgtgctgacagcctgccggctgcggcagccaggacaacccaagagccggcgccactgcttgctgctgtgcgcctacgtggccgtctttgtcatgtgctggctgccctatcatgtgaccctgctgctgctcacactgcatgggacccacatctccctccactgccacctggtccacctgctctacttcttctatgatgtcattgactgcttctccatgctgcactgtgtcatcaaccccatcctttacaactttctcagcccacacttccggggccggctcctgaatgctgtagtccattaccttcctaaggaccagaccaaggcgggcacatgcgcctcctcttcctcctgttccacccagcattccatcatcatcaccaagggtgatagccagcctgctgcagcagccccccaccctgagccaagcctgagctttcaggcacaccatttgcttccaaatacttcccccatctctcccactcagcctcttacacccagctgaggtagaggccagactcctccaacagtgaaggaaaaggcacagatcaccttagaggccacgctcccaagattagttatcaccctggcagtatgaatacttccctaaggcctcccatccatggaggggaagagtgggaaccagctgttacactcagcatctactgagcactgatgggagccctgcctgggccatgtgctgtggggccaaatggacatcactccctaacttcttgaggtctgtctcctctgtggattcacgcatgtatcaacctcattaaactatgccaaacttttacctcct

SEQ ID NO: 62783 - DNA, 653 bp, Homo sapiens
atccaggccaaatcagcgctggctatgccgctgtactgtattgccacacggctcacattgcatgcaagtttgctgagctgaaggaaaagattgattgccgttctggtaaaaagctggaagatggccctaaattcttgaagtctggtgatgctgccattgttgatatggttcctggcaagcccatgtgtgttgagagcttctcagactatccacctttgggtcgctttgctgttcgtgatatgagacagacagttgcggtgggtgtcatcaaagcagtggacaagaaggctgctggagctggcaaggtcaccaagtctgcccagaaagctcagaaggctaaatgaatattatccctaatacctgccaccccactcttaatcagtggtggaagaacggtctcagaactgtttgtttcaattggccatttaagtttagtagtaaaagactggttaatgataacaatgcatcgtaaaaccttcagaaggaaaggagaatgttttgtggaccactttggttttcttttttgcgtgtggcagttttaagttattagtttttaaaatcagtactttttaatggaaacaacttgaccaaaaatttgtcacagaattttgagacccattaaaaaagttaaattgagaaaaaaaaaaaaaaaa

SEQ ID NO: 62784 - DNA, 344 bp, Homo sapiens
ctccctatcctagcagagactaggaggcaggaaccttacttgtatgacaacatgtttttcccaaggcagtgagcaatctcaaggacactgcaggccaggtaaaatagaaacagcacaggttaacccttgacagtcccaaggacaaacactggtcaaatggattccaaaaacagaacgctttactcagacaaaatctctgtctgaaccccaaaagtaaagcagataaaagtggaggccatttaggtgaagcagggttgatgacacagaacccctggcctggggcatctttggaatcccaagaacaccttaaaatgaagtccacagactttaaatctcctcctttt

SEQ ID NO: 62785 - DNA, 1916 bp, Homo sapiens
  misc_feature (419)..(419): n is a, c, g, or t
  misc_feature (515)..(515): n is a, c, g, or t
cgctgaggctctggcacctgaaggagccctgggaggatggcgatgttgcctatggatgcagctgcctccgtaagtatcctcttgcagctggtccagcgatgctctcttctccccttccaggctctccttccttctcagacaagatgtcttatcagaaaaagcagcccacccctcagcccccagtggactgcgtgaagacctctggcggcggtggcggtggcggcggcggcggcggtggtggctgcggcttcttcggcggcggcggctcagggggcggtagcagcggttctggctgcggctactccggcggcggtggctactctggcggcggctgcggcgggggctcctccggcggcgggggcgggggcggcattggaggctgcggagggggctccggtgggagcgtcaagtactccggnggcggcggctcctccggcgggggctctggctgtttctccagcggtgggggcggctccggctgcttctcctccggtggcggcggctcctccgggggnggctccggctgcttctccagcggtgggggcggctcctccgggggcggctccggctgcttctcctccggcggcggcggcttctcgggccaggcggtccagtgccagagctacggaggcgtctctagcggcggctcctccgggggcggctccggctgcttctccagcggcgggggcggcggctctgtctgcggctactctggcggcggctctggcggcggctctggctgcggcggaggctcctctggcggcagcggctccggctacgtctcctcgcagcaggtcactcagacctcgtgcgcgccccagccgagttacggaggggggtcgtccggcggcggcggcagcggcggaagcggctgcttctccagcggcgggggcggcgggagctccggctgcggcggcggctcctccgggattggcagcggctgcatcatcagtggcgggggctccgtctgcggaggtggttcctctggaggcggcggcggcggctcctccgtgggtggctccgggagtggcaagggcgtcccgatctgccaccagacccagcagaagcaggcgcctacctggccgtccaaatagatcccccagggtaccacggaggcgaaggagttggaggtgttttccaggggcaccgatgggcttagagctctcatgatgctacccgaggtttgcaaatccttcatgtcttaacctacctggaagaagccattgagctctccggctgcatctagttctgctgtttagcctctttggtttctgtacaactacctcccaaccccagtgcctcagtcaataaatttgcaaattcatgagaaaaaacaaaaaaaaaaaaaaaaaaaaaaaaaaaaaaaaaaaaaaaaaaaaaaaaaaaaaaaaaagaaacaaaaaaaagaaagaaaaaaacacaaaacgaacaaacagacaacaaaaacaataacaacaccacagaagaacaccagggaaagcggacggtgggcgcgcgccatgcatcactcactccaccacgaggccgcaccggcacaactgaccacagccacaccaccgagcttatcgttatcgccaagccacgccgagacccactagtagagtgagaaacaattaatacagacccgacgcgacgcggacgcccatctctattcaatacactccgaagaaaaaccaaccctaccacccacgacaccatcgccacgacatcacatatacactaacacactacaccaacagacacaacccccactgactacgacccttgcacaaacaccaatcagacaagcccgcgccactacccccacacatccacgaacaacgcgtcttgtttcaccacggatatcatcaccaacaaaccaatccaactcgtcacccccgtccatccgcacgccacacactcagaagagcccaaac

SEQ ID NO: 62786 - DNA, 1827 bp, Homo sapiens
  misc_feature (330)..(330): n is a, c, g, or t
  misc_feature (426)..(426): n is a, c, g, or t
ctctcctcactcacccttcctggtgctttgggctctccttccttctcagacaagatgtcttatcagaaaaagcagcccacccctcagcccccagtggactgcgtgaagacctctggcggcggtggcggtggcggcggcggcggcggtggtggctgcggcttcttcggcggcggcggctcagggggcggtagcagcggttctggctgcggctactccggcggcggtggctactctggcggcggctgcggcgggggctcctccggcggcgggggcgggggcggcattggaggctgcggagggggctccggtgggagcgtcaagtactccggnggcggcggctcctccggcgggggctctggctgtttctccagcggtgggggcggctccggctgcttctcctccggtggcggcggctcctccgggggnggctccggctgcttctccagcggtgggggcggctcctccgggggcggctccggctgcttctcctccggcggcggcggcttctcgggccaggcggtccagtgccagagctacggaggcgtctctagcggcggctcctccgggggcggctccggctgcttctccagcggcgggggcggcggctctgtctgcggctactctggcggcggctctggcggcggctctggctgcggcggaggctcctctggcggcagcggctccggctacgtctcctcgcagcaggtcactcagacctcgtgcgcgccccagccgagttacggaggggggtcgtccggcggcggcggcagcggcggaagcggctgcttctccagcggcgggggcggcgggagctccggctgcggcggcggctcctccgggattggcagcggctgcatcatcagtggcgggggctccgtctgcggaggtggttcctctggaggcggcggcggcggctcctccgtgggtggctccgggagtggcaagggcgtcccgatctgccaccagacccagcagaagcaggcgcctacctggccgtccaaatagatcccccagggtaccacggaggcgaaggagttggaggtgttttccaggggcaccgatgggcttagagctctcatgatgctacccgaggtttgcaaatccttcatgtcttaacctacctggaagaagccattgagctctccggctgcatctagttctgctgtttagcctctttggtttctgtacaactacctcccaaccccagtgcctcagtcaataaatttgcaaattcatgagaaaaaacaaaaaaaaaaaaaaaaaaaaaaaaaaaaaaaaaaaaaaaaaaaaaaaaaaaaaaaaaagaaacaaaaaaaagaaagaaaaaaacacaaaacgaacaaacagacaacaaaaacaataacaacaccacagaagaacaccagggaaagcggacggtgggcgcgcgccatgcatcactcactccaccacgaggccgcaccggcacaactgaccacagccacaccaccgagcttatcgttatcgccaagccacgccgagacccactagtagagtgagaaacaattaatacagacccgacgcgacgcggacgcccatctctattcaatacactccgaagaaaaaccaaccctaccacccacgacaccatcgccacgacatcacatatacactaacacactacaccaacagacacaacccccactgactacgacccttgcacaaacaccaatcagacaagcccgcgccactacccccacacatccacgaacaacgcgtcttgtttcaccacggatatcatcaccaacaaaccaatccaactcgtcacccccgtccatccgcacgccacacactcagaagagcccaaac

SEQ ID NO: 62787 - DNA, 373 bp, Homo sapiens
tatggatgtctagtttttccaataccatttactgaagagactatcttttctccattcaattgcctttccacctttgttaaaaatcaactgatcaggggaggggccaagatggccaaatagaaacaactccagtctgcagctcccagcaagaccaatgcagaaaagtgagtgatttctgcatttccaactgaggtacccagttcatccaactgggactggttaggcagtggaagcgacccacagagagtgagtagaagcagggtggggcgtcacttcatctgggaagtgcacagagccaggggaccttcctccccagccaagggaagtggtgagggactgtgctacctgcctgggatactatgcttttcccacg

SEQ ID NO: 62788 - DNA, 440 bp, Homo sapiens
ttctggatttccatttcctgtgcacttcctaattcatgtagacatacatgttttcttggacaaaggtatgttaaatatccttaacaacataggatgcttccctgaccaatactacatgaaagaaggaaacaattagtattctgctgtaggtggattactgtatttttttctaggaattcctaagtgtaagttaatattgtcaaaacatactgtgaacatttacaaattctgaattatagcatgattactattttttggagcgattaatcttctcatccctcatgcttcaatcctaaagtggtaatttcactgtatgtctgtgggatttctgttgaagatgttatccaattataaagtatttggagagaagctttgaaaatagaatatgtaaaaaagtttcccaaattttcaacttaataaaaatatatctcacatttgga

SEQ ID NO: 62789 - DNA, 376 bp, Homo sapiens
  misc_feature (8)..(8): n is a, c, g, or t
  misc_feature (105)..(105): n is a, c, g, or t
  misc_feature (124)..(124): n is a, c, g, or t
ccccccgnggaagcagctgaagccattagccccttgggacaagccctaaacacacaatcctgcatggaaggagcccccctgatcagcctgggccttcaagatccncctatcctcaggcacaggnaagcaccctcaacagcaccccttgtatatataccataaaggggattctgggagttggaagaggccaacttttcctacctgcagtttgaagattaaggacttagagatttgttgagaggctgcttccgagaggttactgatacactgaggacaggaactactgactactctgaatgagggaaaaacatccagtttggggtgatcctgttttgcaatggcagctgtcagccataacatggtgggaaataacggt

SEQ ID NO: 62790 - DNA, 372 bp, Homo sapiens
cctggtttgcacagtttaagtttccccataatatgcagccaggattacagtattgaaggtggggtctgtggaccagcagcatcgggatttccatgttagaaatgcagaatgtcctggtccaccccagatctgtgaattcaactctgtattttaacaagacccccagatggtttgtatgtgcgataaagtttgaaaaatacttgtctacagcatcttccatagtctcccaaacaggtgtgcaaatgcttcatcaatcattttttgtttgagttgaaatggatgaaccttttgtcagcaaaccaagttttagcctttttagtcttggaagcctgtcattgtgtggatcttgattacaaataattgtaccttagt

SEQ ID NO: 62791 - DNA, 658 bp, Homo sapiens
cacagttcctggccagacagctgcttcccagtgacaaatctactttatatcaagagtgaaatcatccagaatagagtgaattcgggcttcagagcggctgtttaggattcagagctctaccaacatgagcaatctgttggcatgacaggtcagagaagccgtgaaggacatggaaggaagtagatggaactggaaacaggaggccaaccccagcagtcagtggtgctcagaaaaaaataagacactgaaatttgaggacttaatggagtttggtgccttcagttagctgatgtctatgaagcctgaccagtctacttctagtctataagatcatgtggaagcttcagtgacaaacttctactttactaatgattttctgatcctgttacccattgcaattgcttaaatggtattttaattagctgctttaaatgactttgcttttttacaaaaagcagtgtgtgctttagtttaaaatatgggtcactggtgtttctttctagaagatgactgtgtttagtaccagggaaaattggtgatgtatttggagaggttttaacttctgtaactcaggttgatatctggaatgtgagtgtttccatacttccgtggatgcagcaaatttatataaagcgttattaaatttgttctagttttt

SEQ ID NO: 62792 - DNA, 1297 bp, Homo sapiens
cattctgaatgaggtttctttttttgattttctttaaaaaaaaaaaacaacctgctttgatttgctttacattccttgccctccatttttcttattatattgtaaacattagaaaaatgaactaaaaagaatttcatgaatgtacattaaaacaagatcttaaacatttgataaaactagtaaaaatgttaatagaaaaggatgaactttaatagcttcaaaaatattatactcttctttgttcagaaaagaaaaataaaaccaaaagggtatcatacttaaataaatctacagtatagtcatctctcagttatccttggatataacattacttttatattgtatccgcagcaaaccttgctttcagatttcacgattagcccctgctaattacatgctttgttgacttctgtttattcttaatttgtacacggcttgaagctcattccttcaactttgaaaccaccctcaactgcaggggaggtttgaaagacagcagctttgctggagggactctctattctcagcatggactaagttactggaaggaattgagtttaaggggtctaatttgggaccccttaaactagatagcttctagttttgctagctcttgatagtgtggtttgggcatttggtcaaaattattttcctagcataagataaatccactttgaaacaaataacaaaggtcatacaaaagctgcatgtttgtgattattttttaaaaagttatcctacattttaaattttagtagataatgttccctgatgttagtgtgtataactgagagttaggtattgcaaaaggaaaaaattttaattctaagacctcgtgcctatttgtcagaaaataaaaattgtcgtttcaagaactttaaaagttaatttacatgatgtttcttgagtgtttttacaaactgcacaactctattggaggtggattttctgttcatctttattttatgtatgttttctttctgggaaatttgattgggagctagcactgtaatgctaccctcaccaggatctatatgggaaatatatgtggccaattctatgttagtaataccaaattcctcttggtcatttatcttgcatagtactgaggaacacagtttgagatagcactatgctcaaacttattaaggccatgacaagatgccctatataactgaaaacaaatagaggagaaatagtgcctttcagatagagtgttgcaattagcatctgggctcaagtgatcttcctgcttcagcttcccgagtagctgggattacatatgcacaccaccatg

SEQ ID NO: 62793 - DNA, 5810 bp, Homo sapiens
tagtacgaggctcgggtgtttagcaattgagattcggagttaaaacagggatgtgcagatggaggtcggaggagacactgctgccccggcccccgggggcgcggaggacttggaggacacgcagttccccagtgaggaagctagagaaggtggaggggttcacgcggtcccgccggatcccgaagacgagggcctggaggaaacaggatccaaggacaaggaccagccacccagcccatcaccaccgccccagtcagaggccctgtcaagcacctctcggctctggagtcctgcagcccctgagaatagtcccacatgtagccctgagagtagctctggaggccagggcggggaccccagtgatgaggagtggcgcagccagcggaagcatgtgtttgtgctgagtgaggctggcaagcccatctactcgcggtatggtagtgtggaggcgctgtcggctaccatgggtgtaatgaccgccctggtgtcctttgtgcagagtgcgggagatgccatccgtgccatctacgctgaggaccacaagctggtgttcctacaacagggcccactgttgctcgtggccatgtcacggacttctcagtcagcagcccagctgcggggggagctgctagctgtgcacgcacagatcgtgagcacacttacacgtgcaagtgtcgcccgcatcttcgcacacaagcagaactatgacctccgccgcctgctggctggttcagagcgcacactggaccgacttctggacagtatggagcaggacccaggagccctgctcctgggtgccgtgcgctgtgtgccccttgcccgcccgctgcgagacgcactaggtgcgctcctccgacgttgcacagcgcctggcctggcgctgtcagtgctggcagtaggcggtcgacttataacagcagcccaggagcggaatgtgctggccgagtgccggctggacccagctgacctgcagttgctgctcgactgggtgggtgcaccagcctttgcggcgggtgaggcttgggcacctgtgtgcctgccccgcttcaaccctgatggttttttctacgcctacgtggcccgcctggatgctatgcctgtctgcctgctgctgcttggcacccaacgtgaagccttccatgccatggccgcctgccggcgcctggtcgaagatgggatgcatgcccttggtgccatgcgtgcccttggggaggctgccagcttctctaatgcctcatcagccagtgctcctgcctacagcgtgcaggctgtcggggcgccgggcctccggcacttcctgtataagccgctggacatccctgaccaccaccgccaactgccccagtttaccagccctgagctagaggccccctacagcagagaggaggagcggcagcggctgtcggacctgtaccaccgcctgcatgctcgtctccacagcacctcccgacccctgcgcctcatttaccacgtggctgagaaggagacactactggcctgggtgacctccaaattcgagctctatacctgcctcagccctctggtgaccaaggcaggtgcaatcttggtagtgaccaaactcctgcgctgggtgaagaaagaggaggaccggctcttcattcgttacccacccaagtactccacaccaccagccacctctacggaccaagctgcccataatggcttgttcactggactctgatagttggagctcccagaccaggcagtgctgggagcaaccacctttgttttttaccttctgtctaccctggaaatgtgtgtgggggtgtgtctgtggccagtcattgtctccctaagcaatggggcaaggtctgagggcccaccgatgagagagatggtggcagccgccaggcgagcaggctgctttccctgcccagtcatgcacctccccctctggggaaatccttaggcctccctctcccttccctctgtctcatctcctccacttggatgatgctctagcctctgtcagggactgtcccctccaaacttgcttccgtggtctgcctcctagttgaatctcagccctgagtgtccagatctggccaaggtgtctagggtggcccacgggggtgctggaattggcacttcagggccaggctatgcttgggactggcctgagggtattttaaagaaaaaaactacataaaaggcctaaaagtaagacccacaaggatattcctttgcccttcttgtacttttttcatctttaccctgccagaaatgacccgccctcaatgctggctgctgctaacattaatgagaaggtggccttcagtgtccacctgtggaacccaggacacagcacctgactgcacacagtggctgaaatccagcatttttacataggagatgcacttagcctctaagcctcgttttactcatctgtgaaacagagataagtaaccctctctcatgaactctttgatgaggatttgtaaacgaaaacagactcgaactattgtgtaccaccacatagcacatgcacgtctgtcccagactttgacaacctgcacaagacaagcagcctaaagcaggagagacctccctagggttttgtgtgtgtgcacactaccctcactccccaactggccattaccctagttctgcccttgtttgtggagttacagcctcaaggttgtagcatgtgtgctggcaatcagggccgcagtgtgttctgcgcctgcccagagctgactcctgatttaaccgctggcgtaaccgcgggttgcacgcatgcgtgctgaaaagcctttcaccctcacgtggtttcttttttaaccagtcatcaagcgaggctcgcgcgcaggccccgcgttggaaaatggcggggaagctgaaacctctgaatgtggaggcgccagaagctgctgaggaggctgaaggtagtgagggcaagtgggctgcactcctttctctccaaccagggcagaaaggagggaggattcgtcccattacaataatgaaataatgatattctaatttttttaaataaaatgttaagccttttgttattgaagaaaaacaattttttaaccgttcagcacagtggagataaattaacaggcatattcttatcaccgagattaacttttgtcaactgtagtgtatacgttgttgaaagtaaacaacatgtagttcagtacgaaagtcttcaaacaaaagtggggcggtggggatgttctcataacaatcaccgtgctgcagccaccccttattaacagtaattcccagtgtcgccatttcacacctaacacatatgacactttgatggactcttaaacctcctaatcgaacatggcctcccccacagcctcttttctccagggtattgacttgaatgacaggcaaaggagggtggaggggtgtcggcctagacactattggaaattgtattccatccaaaagaaaaaaaaatctcaggccgggcacggaggctcacgcctgtaatcccagcactttgggaggccgaggcgggcagatcacgaggttaggagttcgaggccagcctgaccaacatggtgaaacaccatctctactaaaaaactatatatacatatacatatgtgtgtatgtgtatttatatgtatgtatgtatgtgtgtgtgtatatatatatatatatgtatatgtgtatatatatatatatgtgtatatatatatatatatacacacactaatcagccgggcacggtggtgtgggcctgtaatcgcagctactcaggaagctgaggcaggagaatcacttgaacccgagaggcggaggttgcagtgagccgagatcatgtcactgcactccagcctgggtgacagagtgagactccgtctcaaaagaaaaaaaattctcccttggccgggcttggtggcttatgcctgtaatcccagcactttggaaggccgaggcgggtgggtcacctgaggtcaggagtttgagaccagcctggccagcatggcgaaacctcgtctctactaaaaatacaaaaattgtccgggtgtggtggcgggcgcctgtagtcccagctactggggaggctgaggcaggggaattgcttgaacccgggaggcagaggttatcgtgagctgacattgcgccactgcactccagcgcggaagacagagtgagccaaaaaaaaaaaaaaaaaagaaaaagaaaacaaaaagaaaaaaatctcccaaggcagtcatgcatttgtatgccactagcatttttttgttatagaaatattcaaagtgtaccaacgtagagaaaatagctttaaacaaagcccatgtgtacctatcagtatgctttaactgttgtcacctttctgccccacttttatctatctcgaacacccctttctgcacactctttaaaccactgtattaacaaacacattagactgcatcctgccagacctacccatacagacatcaaagtaatgattattgcttattgcctgacctaggatgtgagctccatgagaacagagactgtttacctctcgctcccctgcacctaaaacaatgcctgcttggtgtaaagtaagtgctcagtaattttttaatgtgtgaccaatgaaataacttcaagagcagagagctcttttagattagaggcacatactaagtgccagcattcaacaaaagacagacggaaataagacagatgcaaatagatctcatttattaactgtgtaatgcagctgccactgcaattaaaaaaaaaattttagtatcaacctttcaaattcctcaaaattaaagttatgactaacttcaccagcaaaggaaaaattgaaggatgtatcaagttgccatttctagcccatcaaatcggctttataaagggaagcatagtatctggtattgacgaccttgtagagaaacaggccttttcctgcctcagggaagagagctgactcaaagtaaaggctttgctagaggcagtcggcagagtatttttagcatctaaaatgctcttccacttcggcagtgaccatgcgatgtaatcaaaggagaatacgtaagtgtatggaccaggaatggtcactggagtgttgatgtaggcacaacacaagaagtagtcacagaaattgctaagtctaggtttatgtgtgcatgctgtggagtgtctctgtggtggatttctttttaagaggcagaaaaaaattctaatttaaatgtattaaattataagttctaatttaaatgtattaaaattaaattataagttgataggattattattgacacacaaggagctccaaaagagatcgtatttttattagagacaagccagttgggattgaaacaaaaatggaggggggtatagccctgtgtatgttgcacagaaaaagtatctgaatgataaaggcctaagtgataactctggacaagggatttggattttgggagtagtgcagaggtagaggcatttttgtgatttattgttctattttttcttctagaaaaatgtaagtagtcatatataattttaaaatataaaggagaagaggcaaaatgttgaatggcacctgaggatcctatattcatattggatcagtattaacatccaggttttgattgttgtactatggttacctggtagattccctttgtatataggaaatagacactggaatagtaaggagtagtgggtcaagatgtctgcaacttattgttcagaatcactcacaaatgggaaatctgatataaggacaaaatgggagcactgtggcctatttttacaacttttgtgtacatctgcaattgtttcaaaataaaatgtttaaaagggtgaaaaaaaaa

SEQ ID NO: 62794 - DNA, 5652 bp, Homo sapiens
ggcgaagtgggcctcgctctcccgggttcgcagccgtagccagatccgttgaaaggagtgcagagaggtctcattgcgctcccgaacagacctgacgtagatccgaagtggcccgcgccatctcaactatgaggggacacccgtaggcggcgggagagggacgccgcgaggagccaataaagctccgcaaccggaagtgtcttctgggaggggtcgtacccggaagtgtggcacctcccgggccgcacccggaagtgtgatgccaccgccgctacggggaagtaatggtatccggccaattgagattcggagttaaaacagggatgtgcagatggaggtcggaggagacactgctgccccggcccccgggggcgcggaggacttggaggacacgcagttccccagtgaggaagctagagaaggtggaggggttcacgcggtcccgccggatcccgaagacgagggcctggaggaaacaggatccaaggacaaggaccagccacccagcccatcaccaccgccccagtcagaggccctgtcaagcacctctcggctctggagtcctgcagcccctgagaatagtcccacatgtagccctgagagtagctctggaggccagggcggggaccccagtgatgaggagtggcgcagccagcggaagcatgtgtttgtgctgagtgaggctggcaagcccatctactcgcggtatggtagtgtggaggcgctgtcggctaccatgggtgtaatgaccgccctggtgtcctttgtgcagagtgcgggagatgccatccgtgccatctacgctgaggaccacaagctggtgttcctacaacagggcccactgttgctcgtggccatgtcacggacttctcagtcagcagcccagctgcggggggagctgctagctgtgcacgcacagatcgtgagcacacttacacgtgcaagtgtcgcccgcatcttcgcacacaagcagaactatgacctccgccgcctgctggctggttcagagcgcacactggaccgacttctggacagtatggagcaggacccaggagccctgctcctgggtgccgtgcgctgtgtgccccttgcccgcccgctgcgagacgcactaggtgcgctcctccgacgttgcacagcgcctggcctggcgctgtcagtgctggcagtaggcggtcgacttataacagcagcccaggagcggaatgtgctggccgagtgccggctggacccagctgacctgcagttgctgctcgactgggtgggtgcaccagcctttgcggcgggtgaggcttgggcacctgtgtgcctgccccgcttcaaccctgatggttttttctacgcctacgtggcccgcctggatgctatgcctgtctgcctgctgctgcttggcacccaacgtgaagccttccatgccatggccgcctgccggcgcctggtcgaagatgggatgcatgcccttggtgccatgcgtgcccttggggaggctgccagcttctctaatgcctcatcagccagtgctcctgcctacagcgtgcaggctgtcggggcgccgggcctccggcacttcctgtataagccgctggacatccctgaccaccaccgccaactgccccagtttaccagccctgagctagaggccccctacagcagagaggaggagcggcagcggctgtcggacctgtaccaccgcctgcatgctcgtctccacagcacctcccgacccctgcgcctcatttaccacgtggctgagaaggagacactactggcctgggtgacctccaaattcgagctctatacctgcctcagccctctggtgaccaaggcaggtgcaatcttggtagtgaccaaactcctgcgctgggtgaagaaagaggaggaccggctcttcattcgttacccacccaagtactccacaccaccagccacctctacggaccaagctgcccataatggcttgttcactggactctgatagttggagctcccagaccaggcagtgctgggagcaaccacctttgttttttaccttctgtctaccctggaaatgtgtgtgggggtgtgtctgtggccagtcattgtctccctaagcaatggggcaaggtctgagggcccaccgatgagagagatggtggcagccgccaggcgagcaggctgctttccctgcccagtcatgcacctccccctctggggaaatccttaggcctccctctcccttccctctgtctcatctcctccacttggatgatgctctagcctctgtcagggactgtcccctccaaacttgcttccgtggtctgcctcctagttgaatctcagccctgagtgtccagatctggccaaggtgtctagggtggcccacgggggtgctggaattggcacttcagggccaggctatgcttgggactggcctgagggtattttaaagaaaaaaactacataaaaggcctaaaagtaagacccacaaggatattcctttgcccttcttgtacttttttcatctttaccctgccagaaatgacccgccctcaatgctggctgctgctaacattaatgagaaggtggccttcagtgtccacctgtggaacccaggacacagcacctgactgcacacagtggctgaaatccagcatttttacataggagatgcacttagcctctaagcctcgttttactcatctgtgaaacagagataagtaaccctctctcatgaactctttgatgaggatttgtaaacgaaaacagactcgaactattgtgtaccaccacatagcacatgcacgtctgtcccagactttgacaacctgcacaagacaagcagcctaaagcaggagagacctccctagggttttgtgtgtgtgcacactaccctcactccccaactggccattaccctagttctgcccttgtttgtggagttacagcctcaaggttgtagcatgtgtgctggcaatcagggccgcagtgtgttctgcgcctgcccagagctgactcctgatttaaccgctggcgtaaccgcgggttgcacgcatgcgtgctgaaaagcctttcaccctcacgtggtttcttttttaaccagtcatcaagcgaggctcgcgcgcaggccccgcgttggaaaatggcggggaagctgaaacctctgaatgtggaggcgccagaagctgctgaggaggctgaaggtagtgagggcaagtgggctgcactcctttctctccaaccagggcagaaaggagggaggattcgtcccattacaataatgaaataatgatattctaatttttttaaataaaatgttaagccttttgttattgaagaaaaacaattttttaaccgttcagcacagtggagataaattaacaggcatattcttatcaccgagattaacttttgtcaactgtagtgtatacgttgttgaaagtaaacaacatgtagttcagtacgaaagtcttcaaacaaaagtggggcggtggggatgttctcataacaatcaccgtgctgcagccaccccttattaacagtaattcccagtgtcgccatttcacacctaacacatatgacactttgatggactcttaaacctcctaatcgaacatggcctcccccacagcctcttttctccagggtattgacttgaatgacaggcaaaggagggtggaggggtgtcggcctagacactattggaaattgtattccatccaaaagaaaaaaaaatctcaggccgggcacggaggctcacgcctgtaatcccagcactttgggaggccgaggcgggcagatcacgaggttaggagttcgaggccagcctgaccaacatggtgaaacaccatctctataaaaatacaaaaattgtccgggtgtggtggcgggcgcctgtagtcccagctactggggaggctgaggcaggggaattgcttgaacccgggaggcagaggttatcgtgagctgacattgcgccactgcactccagcgcggaagacagagtgagccaaaaaaaaaaaaaaaaaagaaaaagaaaacaaaaagaaaaaaatctcccaaggcagtcatgcatttgtatgccactagcatttttttgttatagaaatattcaaagtgtaccaacgtagagaaaatagctttaaacaaagcccatgtgtacctatcagtatgctttaactgttgtcacctttctgccccacttttatctatctcgaacacccctttctgcacactctttaaaccactgtattaacaaacacattagactgcatcctgccagacctacccatacagacatcaaagtaatgattattgcttattgcctgacctaggatgtgagctccatgagaacagagactgtttacctctcgctcccctgcacctaaaacaatgcctgcttggtgtaaagtaagtgctcagtaattttttaatgtgtgaccaatgaaataacttcaagagcagagagctcttttagattagaggcacatactaagtgccagcattcaacaaaagacagacggaaataagacagatgcaaatagatctcatttattaactgtgtaatgcagctgccactgcaattaaaaaaaaaattttagtatcaacctttcaaattcctcaaaattaaagttatgactaacttcaccagcaaaggaaaaattgaaggatgtatcaagttgccatttctagcccatcaaatcggctttataaagggaagcatagtatctggtattgacgaccttgtagagaaacaggccttttcctgcctcagggaagagagctgactcaaagtaaaggctttgctagaggcagtcggcagagtatttttagcatctaaaatgctcttccacttcggcagtgaccatgcgatgtaatcaaaggagaatacgtaagtgtatggaccaggaatggtcactggagtgttgatgtaggcacaacacaagaagtagtcacagaaattgctaagtctaggtttatgtgtgcatgctgtggagtgtctctgtggtggatttctttttaagaggcagaaaaaaattctaatttaaatgtattaaattataagttctaatttaaatgtattaaaattaaattataagttgataggattattattgacacacaaggagctccaaaagagatcgtatttttattagagacaagccagttgggattgaaacaaaaatggaggggggtatagccctgtgtatgttgcacagaaaaagtatctgaatgataaaggcctaagtgataactctggacaagggatttggattttgggagtagtgcagaggtagaggcatttttgtgatttattgttctattttttcttctagaaaaatgtaagtagtcatatataattttaaaatataaaggagaagaggcaaaatgttgaatggcacctgaggatcctatattcatattggatcagtattaacatccaggttttgattgttgtactatggttacctggtagattccctttgtatataggaaatagacactggaatagtaaggagtagtgggtcaagatgtctgcaacttattgttcagaatcactcacaaatgggaaatctgatataaggacaaaatgggagcactgtggcctatttttacaacttttgtgtacatctgcaattgtttcaaaataaaatgtttaaaagggtgaaaaaaaaa

SEQ ID NO: 62795 - DNA, 5524 bp, Homo sapiens
ggcgaagtgggcctcgctctcccgggttcgcagccgtagccagatccgttgaaaggagtgcagagaggtctcattgcgctcccgaacagacctgacgtagatccgaagtggcccgcgccatctcaactatgaggggacacccgtaggcggcgggagagggacgccgcgaggagccaataaagctccgcaaccggaagtgtcttctgggaggggtcgtacccggaagtgtggcacctcccgggccgcacccggaagtgtgatgccaccgccgctacggggaagtaatggtatccggccaattgagattcggagttaaaacagggatgtgcagatggaggtcggaggagacactgctgccccggcccccgggggcgcggaggacttggaggacacgcagttccccagtgaggaagctagagaaggtggaggggttcacgcggtcccgccggatcccgaagacgagggcctggaggaaacaggatccaaggacaaggaccagccacccagcccatcaccaccgccccagtcagaggccctgtcaagcacctctcggctctggagtcctgcagcccctgagaatagtcccacatgtagccctgagagtagctctggaggccagggcggggaccccagtgatgaggagtggcgcagccagcggaagcatgtgtttgtgctgagtgaggctggcaagcccatctactcgcggtatggtagtgtggaggcgctgtcggctaccatgggtgtaatgaccgccctggtgtcctttgtgcagagtgcgggagatgccatccgtgccatctacgctgaggaccacaagctggtgttcctacaacagggcccactgttgctcgtggccatgtcacggacttctcagtcagcagcccagctgcggggggagctgctagctgtgcacgcacagatcgtgagcacacttacacgtgcaagtgtcgcccgcatcttcgcacacaagcagaactatgacctccgccgcctgctggctggttcagagcgcacactggaccgacttctggacagtatggagcaggacccaggagccctgctcctgggtgccgtgcgctgtgtgccccttgcccgcccgctgcgagacgcactaggtgcgctcctccgacgttgcacagcgcctggcctggcgctgtcagtgctggcagtaggcggtcgacttataacagcagcccaggagcggaatgtgctggccgagtgccggctggacccagctgacctgcagttgctgctcgactgggtgggtgcaccagcctttgcggcgggtgaggcttgggcacctgtgtgcctgccccgcttcaaccctgatggttttttctacgcctacgtggcccgcctggatgctatgcctgtctgcctgctgctgcttggcacccaacgtgaagccttccatgccatggccgcctgccggcgcctggtcgaagatgggatgcatgcccttggtgccatgcgtgcccttggggaggctgccagcttctctaatgcctcatcagccagtgctcctgcctacagcgtgcaggctgtcggggcgccgggcctccggcacttcctgtataagccgctggacatccctgaccaccaccgccaactgccccagtttaccagccctgagctagaggccccctacagcagagaggaggagcggcagcggctgtcggacctgtaccaccgcctgcatgctcgtctccacagcacctcccgacccctgcgcctcatttaccacgtggctgagaaggagacactactggcctgggtgacctccaaattcgagctctatacctgcctcagccctctggtgaccaaggcaggtgcaatcttggtagtgaccaaactcctgcgctgggtgaagaaagaggaggaccggctcttcattcgttacccacccaagtactccacaccaccagccacctctacggaccaagctgcccataatggcttgttcactggactctgatagttggagctcccagaccaggcagtgctgggagcaaccacctttgttttttaccttctgtctaccctggaaatgtgtgtgggggtgtgtctgtggccagtcattgtctccctaagcaatggggcaaggtctgagggcccaccgatgagagagatggtggcagccgccaggcgagcaggctgctttccctgcccagtcatgcacctccccctctggggaaatccttaggcctccctctcccttccctctgtctcatctcctccacttggatgatgctctagcctctgtcagggactgtcccctccaaacttgcttccgtggtctgcctcctagttgaatctcagccctgagtgtccagatctggccaaggtgtctagggtggcccacgggggtgctggaattggcacttcagggccaggctatgcttgggactggcctgagggtattttaaagaaaaaaactacataaaaggcctaaaagtaagacccacaaggatattcctttgcccttcttgtacttttttcatctttaccctgccagaaatgacccgccctcaatgctggctgctgctaacattaatgagaaggtggccttcagtgtccacctgtggaacccaggacacagcacctgactgcacacagtggctgaaatccagcatttttacataggagatgcacttagcctctaagcctcgttttactcatctgtgaaacagagataagtaaccctctctcatgaactctttgatgaggatttgtaaacgaaaacagactcgaactattgtgtaccaccacatagcacatgcacgtctgtcccagactttgacaacctgcacaagacaagcagcctaaagcaggagagacctccctagggttttgtgtgtgtgcacactaccctcactccccaactggccattaccctagttctgcccttgtttgtggagttacagcctcaaggttgtagcatgtgtgctggcaatcagggccgcagtgtgttctgcgcctgcccagagctgactcctgatttaaccgctggcgtaaccgcgggttgcacgcatgcgtgtgaggaggctgaaggtagtgagggcaagtgggctgcactcctttctctccaaccagggcagaaaggagggaggattcgtcccattacaataatgaaataatgatattctaatttttttaaataaaatgttaagccttttgttattgaagaaaaacaattttttaaccgttcagcacagtggagataaattaacaggcatattcttatcaccgagattaacttttgtcaactgtagtgtatacgttgttgaaagtaaacaacatgtagttcagtacgaaagtcttcaaacaaaagtggggcggtggggatgttctcataacaatcaccgtgctgcagccaccccttattaacagtaattcccagtgtcgccatttcacacctaacacatatgacactttgatggactcttaaacctcctaatcgaacatggcctcccccacagcctcttttctccagggtattgacttgaatgacaggcaaaggagggtggaggggtgtcggcctagacactattggaaattgtattccatccaaaagaaaaaaaaatctcaggccgggcacggaggctcacgcctgtaatcccagcactttgggaggccgaggcgggcagatcacgaggttaggagttcgaggccagcctgaccaacatggtgaaacaccatctctataaaaatacaaaaattgtccgggtgtggtggcgggcgcctgtagtcccagctactggggaggctgaggcaggggaattgcttgaacccgggaggcagaggttatcgtgagctgacattgcgccactgcactccagcgcggaagacagagtgagccaaaaaaaaaaaaaaaaaagaaaaagaaaacaaaaagaaaaaaatctcccaaggcagtcatgcatttgtatgccactagcatttttttgttatagaaatattcaaagtgtaccaacgtagagaaaatagctttaaacaaagcccatgtgtacctatcagtatgctttaactgttgtcacctttctgccccacttttatctatctcgaacacccctttctgcacactctttaaaccactgtattaacaaacacattagactgcatcctgccagacctacccatacagacatcaaagtaatgattattgcttattgcctgacctaggatgtgagctccatgagaacagagactgtttacctctcgctcccctgcacctaaaacaatgcctgcttggtgtaaagtaagtgctcagtaattttttaatgtgtgaccaatgaaataacttcaagagcagagagctcttttagattagaggcacatactaagtgccagcattcaacaaaagacagacggaaataagacagatgcaaatagatctcatttattaactgtgtaatgcagctgccactgcaattaaaaaaaaaattttagtatcaacctttcaaattcctcaaaattaaagttatgactaacttcaccagcaaaggaaaaattgaaggatgtatcaagttgccatttctagcccatcaaatcggctttataaagggaagcatagtatctggtattgacgaccttgtagagaaacaggccttttcctgcctcagggaagagagctgactcaaagtaaaggctttgctagaggcagtcggcagagtatttttagcatctaaaatgctcttccacttcggcagtgaccatgcgatgtaatcaaaggagaatacgtaagtgtatggaccaggaatggtcactggagtgttgatgtaggcacaacacaagaagtagtcacagaaattgctaagtctaggtttatgtgtgcatgctgtggagtgtctctgtggtggatttctttttaagaggcagaaaaaaattctaatttaaatgtattaaattataagttctaatttaaatgtattaaaattaaattataagttgataggattattattgacacacaaggagctccaaaagagatcgtatttttattagagacaagccagttgggattgaaacaaaaatggaggggggtatagccctgtgtatgttgcacagaaaaagtatctgaatgataaaggcctaagtgataactctggacaagggatttggattttgggagtagtgcagaggtagaggcatttttgtgatttattgttctattttttcttctagaaaaatgtaagtagtcatatataattttaaaatataaaggagaagaggcaaaatgttgaatggcacctgaggatcctatattcatattggatcagtattaacatccaggttttgattgttgtactatggttacctggtagattccctttgtatataggaaatagacactggaatagtaaggagtagtgggtcaagatgtctgcaacttattgttcagaatcactcacaaatgggaaatctgatataaggacaaaatgggagcactgtggcctatttttacaacttttgtgtacatctgcaattgtttcaaaataaaatgtttaaaagggtgaaaaaaaaa

SEQ ID NO: 62796 - DNA, 4526 bp, Homo sapiens
acaacgtagtacgtgtcgtgtagtccgttgtcagtgctggcagtaggcggtcgacttataacagcagcccaggagcggaatgtgctggccgagtgccggctggacccagctgacctgcagttgctgctcgactgggtgggtgcaccagcctttgcggcgggtgaggcttgggcacctgtgtgcctgccccgcttcaaccctgatggttttttctacgcctacgtggcccgcctggatgctatgcctgtctgcctgctgctgcttggcacccaacgtgaagccttccatgccatggccgcctgccggcgcctggtcgaagatgggatgcatgcccttggtgccatgcgtgcccttggggaggctgccagcttctctaatgcctcatcagccagtgctcctgcctacagcgtgcaggctgtcggggcgccgggcctccggcacttcctgtataagccgctggacatccctgaccaccaccgccaactgccccagtttaccagccctgagctagaggccccctacagcagagaggaggagcggcagcggctgtcggacctgtaccaccgcctgcatgctcgtctccacagcacctcccgacccctgcgcctcatttaccacgtggctgagaaggagacactactggcctgggtgacctccaaattcgagctctatacctgcctcagccctctggtgaccaaggcaggtgcaatcttggtagtgaccaaactcctgcgctgggtgaagaaagaggaggaccggctcttcattcgttacccacccaagtactccacaccaccagccacctctacggaccaagctgcccataatggcttgttcactggactctgatagttggagctcccagaccaggcagtgctgggagcaaccacctttgttttttaccttctgtctaccctggaaatgtgtgtgggggtgtgtctgtggccagtcattgtctccctaagcaatggggcaaggtctgagggcccaccgatgagagagatggtggcagccgccaggcgagcaggctgctttccctgcccagtcatgcacctccccctctggggaaatccttaggcctccctctcccttccctctgtctcatctcctccacttggatgatgctctagcctctgtcagggactgtcccctccaaacttgcttccgtggtctgcctcctagttgaatctcagccctgagtgtccagatctggccaaggtgtctagggtggcccacgggggtgctggaattggcacttcagggccaggctatgcttgggactggcctgagggtattttaaagaaaaaaactacataaaaggcctaaaagtaagacccacaaggatattcctttgcccttcttgtacttttttcatctttaccctgccagaaatgacccgccctcaatgctggctgctgctaacattaatgagaaggtggccttcagtgtccacctgtggaacccaggacacagcacctgactgcacacagtggctgaaatccagcatttttacataggagatgcacttagcctctaagcctcgttttactcatctgtgaaacagagataagtaaccctctctcatgaactctttgatgaggatttgtaaacgaaaacagactcgaactattgtgtaccaccacatagcacatgcacgtctgtcccagactttgacaacctgcacaagacaagcagcctaaagcaggagagacctccctagggttttgtgtgtgtgcacactaccctcactccccaactggccattaccctagttctgcccttgtttgtggagttacagcctcaaggttgtagcatgtgtgctggcaatcagggccgcagtgtgttctgcgcctgcccagagctgactcctgatttaaccgctggcgtaaccgcgggttgcacgcatgcgtgctgaaaagcctttcaccctcacgtggtttcttttttaaccagtcatcaagcgaggctcgcgcgcaggccccgcgttggaaaatggcggggaagctgaaacctctgaatgtggaggcgccagaagctgctgaggaggctgaaggtagtgagggcaagtgggctgcactcctttctctccaaccagggcagaaaggagggaggattcgtcccattacaataatgaaataatgatattctaatttttttaaataaaatgttaagccttttgttattgaagaaaaacaattttttaaccgttcagcacagtggagataaattaacaggcatattcttatcaccgagattaacttttgtcaactgtagtgtatacgttgttgaaagtaaacaacatgtagttcagtacgaaagtcttcaaacaaaagtggggcggtggggatgttctcataacaatcaccgtgctgcagccaccccttattaacagtaattcccagtgtcgccatttcacacctaacacatatgacactttgatggactcttaaacctcctaatcgaacatggcctcccccacagcctcttttctccagggtattgacttgaatgacaggcaaaggagggtggaggggtgtcggcctagacactattggaaattgtattccatccaaaagaaaaaaaaatctcaggccgggcacggaggctcacgcctgtaatcccagcactttgggaggccgaggcgggcagatcacgaggttaggagttcgaggccagcctgaccaacatggtgaaacaccatctctataaaaatacaaaaattgtccgggtgtggtggcgggcgcctgtagtcccagctactggggaggctgaggcaggggaattgcttgaacccgggaggcagaggttatcgtgagctgacattgcgccactgcactccagcgcggaagacagagtgagccaaaaaaaaaaaaaaaaaagaaaaagaaaacaaaaagaaaaaaatctcccaaggcagtcatgcatttgtatgccactagcatttttttgttatagaaatattcaaagtgtaccaacgtagagaaaatagctttaaacaaagcccatgtgtacctatcagtatgctttaactgttgtcacctttctgccccacttttatctatctcgaacacccctttctgcacactctttaaaccactgtattaacaaacacattagactgcatcctgccagacctacccatacagacatcaaagtaatgattattgcttattgcctgacctaggatgtgagctccatgagaacagagactgtttacctctcgctcccctgcacctaaaacaatgcctgcttggtgtaaagtaagtgctcagtaattttttaatgtgtgaccaatgaaataacttcaagagcagagagctcttttagattagaggcacatactaagtgccagcattcaacaaaagacagacggaaataagacagatgcaaatagatctcatttattaactgtgtaatgcagctgccactgcaattaaaaaaaaaattttagtatcaacctttcaaattcctcaaaattaaagttatgactaacttcaccagcaaaggaaaaattgaaggatgtatcaagttgccatttctagcccatcaaatcggctttataaagggaagcatagtatctggtattgacgaccttgtagagaaacaggccttttcctgcctcagggaagagagctgactcaaagtaaaggctttgctagaggcagtcggcagagtatttttagcatctaaaatgctcttccacttcggcagtgaccatgcgatgtaatcaaaggagaatacgtaagtgtatggaccaggaatggtcactggagtgttgatgtaggcacaacacaagaagtagtcacagaaattgctaagtctaggtttatgtgtgcatgctgtggagtgtctctgtggtggatttctttttaagaggcagaaaaaaattctaatttaaatgtattaaattataagttctaatttaaatgtattaaaattaaattataagttgataggattattattgacacacaaggagctccaaaagagatcgtatttttattagagacaagccagttgggattgaaacaaaaatggaggggggtatagccctgtgtatgttgcacagaaaaagtatctgaatgataaaggcctaagtgataactctggacaagggatttggattttgggagtagtgcagaggtagaggcatttttgtgatttattgttctattttttcttctagaaaaatgtaagtagtcatatataattttaaaatataaaggagaagaggcaaaatgttgaatggcacctgaggatcctatattcatattggatcagtattaacatccaggttttgattgttgtactatggttacctggtagattccctttgtatataggaaatagacactggaatagtaaggagtagtgggtcaagatgtctgcaacttattgttcagaatcactcacaaatgggaaatctgatataaggacaaaatgggagcactgtggcctatttttacaacttttgtgtacatctgcaattgtttcaaaataaaatgtttaaaagggtgaaaaaaaaa

SEQ ID NO: 62797 - DNA, 4345 bp, Homo sapiens
ggcgaagtgggcctcgctctcccgggttcgcagccgtagccagatccgttgaaaggagtgcagagaggtctcattgcgctcccgaacagacctgacgtagatccgaagtggcccgcgccatctcaactatgaggggacacccgtaggcggcgggagagggacgccgcgaggagccaataaagctccgcaaccggaagtgtcttctgggaggggtcgtacccggaagtgtggcacctcccgggccgcacccggaagtgtgatgccaccgccgctacggggaagtaatggtatccggccaattgagattcggagttaaaacagggatgtgcagatggaggtcggaggagacactgctgccccggcccccgggggcgcggaggacttggaggacacgcagttccccagtgaggaagctagagaaggtggaggggttcacgcggtcccgccggatcccgaagacgagggcctggaggaaacaggatccaaggacaaggaccagccacccagcccatcaccaccgccccagtcagaggccctgtcaagcacctctcggctctggagtcctgcagcccctgagaatagtcccacatgtagccctgagagtagctctggaggccagggcggggaccccagtgatgaggagtggcgcagccacggcagcggctgtcggacctgtaccaccgcctgcatgctcgtctccacagcacctcccgacccctgcgcctcatttaccacgtggctgagaaggagacactactggcctgggtgacctccaaattcgagctctatacctgcctcagccctctggtgaccaaggcaggtgcaatcttggtagtgaccaaactcctgcgctgggtgaagaaagaggaggaccggctcttcattcgttacccacccaagtactccacaccaccagccacctctacggaccaagctgcccataatggcttgttcactggactctgatagttggagctcccagaccaggcagtgctgggagcaaccacctttgttttttaccttctgtctaccctggaaatgtgtgtgggggtgtgtctgtggccagtcattgtctccctaagcaatggggcaaggtctgagggcccaccgatgagagagatggtggcagccgccaggcgagcaggctgctttccctgcccagtcatgcacctccccctctggggaaatccttaggcctccctctcccttccctctgtctcatctcctccacttggatgatgctctagcctctgtcagggactgtcccctccaaacttgcttccgtggtctgcctcctagttgaatctcagccctgagtgtccagatctggccaaggtgtctagggtggcccacgggggtgctggaattggcacttcagggccaggctatgcttgggactggcctgagggtattttaaagaaaaaaactacataaaaggcctaaaagtaagacccacaaggatattcctttgcccttcttgtacttttttcatctttaccctgccagaaatgacccgccctcaatgctggctgctgctaacattaatgagaaggtggccttcagtgtccacctgtggaacccaggacacagcacctgactgcacacagtggctgaaatccagcatttttacataggagatgcacttagcctctaagcctcgttttactcatctgtgaaacagagataagtaaccctctctcatgaactctttgatgaggatttgtaaacgaaaacagactcgaactattgtgtaccaccacatagcacatgcacgtctgtcccagactttgacaacctgcacaagacaagcagcctaaagcaggagagacctccctagggttttgtgtgtgtgcacactaccctcactccccaactggccattaccctagttctgcctcctttctctccaaccagggcagaaaggagggaggattcgtcccattacaataatgaaataatgatattctaatttttttaaataaaatgttaagccttttgttattgaagaaaaacaattttttaaccgttcagcacagtggagataaattaacaggcatattcttatcaccgagattaacttttgtcaactgtagtgtatacgttgttgaaagtaaacaacatgtagttcagtacgaaagtcttcaaacaaaagtggggcggtggggatgttctcataacaatcaccgtgctgcagccaccccttattaacagtaattcccagtgtcgccatttcacacctaacacatatgacactttgatggactcttaaacctcctaatcgaacatggcctcccccacagcctcttttctccagggtattgacttgaatgacaggcaaaggagggtggaggggtgtcggcctagacactattggaaattgtattccatccaaaagaaaaaaaaatctcaggccgggcacggaggctcacgcctgtaatcccagcactttgggaggccgaggcgggcagatcacgaggttaggagttcgaggccagcctgaccaacatggtgaaacaccatctctataaaaatacaaaaattgtccgggtgtggtggcgggcgcctgtagtcccagctactggggaggctgaggcaggggaattgcttgaacccgggaggcagaggttatcgtgagctgacattgcgccactgcactccagcgcggaagacagagtgagccaaaaaaaaaaaaaaaaaagaaaaagaaaacaaaaagaaaaaaatctcccaaggcagtcatgcatttgtatgccactagcatttttttgttatagaaatattcaaagtgtaccaacgtagagaaaatagctttaaacaaagcccatgtgtacctatcagtatgctttaactgttgtcacctttctgccccacttttatctatctcgaacacccctttctgcacactctttaaaccactgtattaacaaacacattagactgcatcctgccagacctacccatacagacatcaaagtaatgattattgcttattgcctgacctaggatgtgagctccatgagaacagagactgtttacctctcgctcccctgcacctaaaacaatgcctgcttggtgtaaagtaagtgctcagtaattttttaatgtgtgaccaatgaaataacttcaagagcagagagctcttttagattagaggcacatactaagtgccagcattcaacaaaagacagacggaaataagacagatgcaaatagatctcatttattaactgtgtaatgcagctgccactgcaattaaaaaaaaaattttagtatcaacctttcaaattcctcaaaattaaagttatgactaacttcaccagcaaaggaaaaattgaaggatgtatcaagttgccatttctagcccatcaaatcggctttataaagggaagcatagtatctggtattgacgaccttgtagagaaacaggccttttcctgcctcagggaagagagctgactcaaagtaaaggctttgctagaggcagtcggcagagtatttttagcatctaaaatgctcttccacttcggcagtgaccatgcgatgtaatcaaaggagaatacgtaagtgtatggaccaggaatggtcactggagtgttgatgtaggcacaacacaagaagtagtcacagaaattgctaagtctaggtttatgtgtgcatgctgtggagtgtctctgtggtggatttctttttaagaggcagaaaaaaattctaatttaaatgtattaaattataagttctaatttaaatgtattaaaattaaattataagttgataggattattattgacacacaaggagctccaaaagagatcgtatttttattagagacaagccagttgggattgaaacaaaaatggaggggggtatagccctgtgtatgttgcacagaaaaagtatctgaatgataaaggcctaagtgataactctggacaagggatttggattttgggagtagtgcagaggtagaggcatttttgtgatttattgttctattttttcttctagaaaaatgtaagtagtcatatataattttaaaatataaaggagaagaggcaaaatgttgaatggcacctgaggatcctatattcatattggatcagtattaacatccaggttttgattgttgtactatggttacctggtagattccctttgtatataggaaatagacactggaatagtaaggagtagtgggtcaagatgtctgcaacttattgttcagaatcactcacaaatgggaaatctgatataaggacaaaatgggagcactgtggcctatttttacaacttttgtgtacatctgcaattgtttcaaaataaaatgtttaaaagggtgaaaaaaaaa

SEQ ID NO: 62798 - DNA, 3148 bp, Homo sapiens
cccgcgagaattcctgctgctcccgcgagaattcctgctgctaacattaatgagaaggtggccttcagtgtccacctgtggaacccaggacacagcacctgactgcacacagtggctgaaatccagcatttttacataggagatgcacttagcctctaagcctcgttttactcatctgtgaaacagagataagtaaccctctctcatgaactctttgatgaggatttgtaaacgaaaacagactcgaactattgtgtaccaccacatagcacatgcacgtctgtcccagactttgacaacctgcacaagacaagcagcctaaagcaggagagacctccctagggttttgtgtgtgtgcacactaccctcactccccaactggccattaccctagttctgcccttgtttgtggagttacagcctcaaggttgtagcatgtgtgctggcaatcagggccgcagtgtgttctgcgcctgcccagagctgactcctgatttaaccgctggcgtaaccgcgggttgcacgcatgcgtgctgaaaagcctttcaccctcacgtggtttcttttttaaccagtcatcaagcgaggctcgcgcgcaggccccgcgttggaaaatggcggggaagctgaaacctctgaatgtggaggcgccagaagctgctgaggaggctgaaggtagtgagggcaagtgggctgcactcctttctctccaaccagggcagaaaggagggaggattcgtcccattacaataatgaaataatgatattctaatttttttaaataaaatgttaagccttttgttattgaagaaaaacaattttttaaccgttcagcacagtggagataaattaacaggcatattcttatcaccgagattaacttttgtcaactgtagtgtatacgttgttgaaagtaaacaacatgtagttcagtacgaaagtcttcaaacaaaagtggggcggtggggatgttctcataacaatcaccgtgctgcagccaccccttattaacagtaattcccagtgtcgccatttcacacctaacacatatgacactttgatggactcttaaacctcctaatcgaacatggcctcccccacagcctcttttctccagggtattgacttgaatgacaggcaaaggagggtggaggggtgtcggcctagacactattggaaattgtattccatccaaaagaaaaaaaaatctcaggccgggcacggaggctcacgcctgtaatcccagcactttgggaggccgaggcgggcagatcacgaggttaggagttcgaggccagcctgaccaacatggtgaaacaccatctctataaaaatacaaaaattgtccgggtgtggtggcgggcgcctgtagtcccagctactggggaggctgaggcaggggaattgcttgaacccgggaggcagaggttatcgtgagctgacattgcgccactgcactccagcgcggaagacagagtgagccaaaaaaaaaaaaaaaaaagaaaaagaaaacaaaaagaaaaaaatctcccaaggcagtcatgcatttgtatgccactagcatttttttgttatagaaatattcaaagtgtaccaacgtagagaaaatagctttaaacaaagcccatgtgtacctatcagtatgctttaactgttgtcacctttctgccccacttttatctatctcgaacacccctttctgcacactctttaaaccactgtattaacaaacacattagactgcatcctgccagacctacccatacagacatcaaagtaatgattattgcttattgcctgacctaggatgtgagctccatgagaacagagactgtttacctctcgctcccctgcacctaaaacaatgcctgcttggtgtaaagtaagtgctcagtaattttttaatgtgtgaccaatgaaataacttcaagagcagagagctcttttagattagaggcacatactaagtgccagcattcaacaaaagacagacggaaataagacagatgcaaatagatctcatttattaactgtgtaatgcagctgccactgcaattaaaaaaaaaattttagtatcaacctttcaaattcctcaaaattaaagttatgactaacttcaccagcaaaggaaaaattgaaggatgtatcaagttgccatttctagcccatcaaatcggctttataaagggaagcatagtatctggtattgacgaccttgtagagaaacaggccttttcctgcctcagggaagagagctgactcaaagtaaaggctttgctagaggcagtcggcagagtatttttagcatctaaaatgctcttccacttcggcagtgaccatgcgatgtaatcaaaggagaatacgtaagtgtatggaccaggaatggtcactggagtgttgatgtaggcacaacacaagaagtagtcacagaaattgctaagtctaggtttatgtgtgcatgctgtggagtgtctctgtggtggatttctttttaagaggcagaaaaaaattctaatttaaatgtattaaattataagttctaatttaaatgtattaaaattaaattataagttgataggattattattgacacacaaggagctccaaaagagatcgtatttttattagagacaagccagttgggattgaaacaaaaatggaggggggtatagccctgtgtatgttgcacagaaaaagtatctgaatgataaaggcctaagtgataactctggacaagggatttggattttgggagtagtgcagaggtagaggcatttttgtgatttattgttctattttttcttctagaaaaatgtaagtagtcatatataattttaaaatataaaggagaagaggcaaaatgttgaatggcacctgaggatcctatattcatattggatcagtattaacatccaggttttgattgttgtactatggttacctggtagattccctttgtatataggaaatagacactggaatagtaaggagtagtgggtcaagatgtctgcaacttattgttcagaatcactcacaaatgggaaatctgatataaggacaaaatgggagcactgtggcctatttttacaacttttgtgtacatctgcaattgtttcaaaataaaatgtttaaaagggtgaaaaaaaaa

SEQ ID NO: 62799 - DNA, 2869 bp, Homo sapiens
ggcgaagtgggcctcgctctcccgggttcgcagccgtagccagatccgttgaaaggagtgcagagaggtctcattgcgctcccgaacagacctgacgtagatccgaagtggcccgcgccatctcaactatgaggggacacccgtaggcggcgggagagggacgccgcgaggagccaataaagctccgcaaccggaagtgtcttctgggaggggtcgtacccggaagtgtggcacctcccgggccgcacccggaagtgtgatgccaccgccgctacggggaagtaatggtatccggccaattgagattcggagttaaaacagggatgtgcagatggaggtcggaggagacactgctgccccggcccccgggggcgcggaggacttggaggacacgcagttccccagtgaggaagctagagaaggtggaggggttcacgcggtcccgccggatcccgaagacgagggcctggaggaaacaggatccaaggacaaggaccagccacccagcccatcaccaccgccccagtcagaggccctgtcaagcacctctcggctctggagtcctgcagcccctgagaatagtcccacatgtagccctgagagtagctctggaggccagggcggggaccccagtgatgaggagtggcgcagccagcggaagcatgtgtttgtgctgagtgaggctggcaagcccatctactcgcggtatggtagtgtggaggcgctgtcggctaccatgggtgtaatgaccgccctggtgtcctttgtgcagagtgcgggagatgccatccgtgccatctacgctgaggaccacaagctggtgttcctacaacagggcccactgttgctcgtggccatgtcacggacttctcagtcagcagcccagctgcggggggagctgctagctgtgcacgcacagatcgtgagcacacttacacgtgcaagtgtcgcccgcatcttcgcacacaagcagaactatgacctccgccgcctgctggctggttcagagcgcacactggaccgacttctggacagtatggagcaggacccaggagccctgctcctgggtgccgtgcgctgtgtgccccttgcccgcccgctgcgagacgcactaggtgcgctcctccgacgttgcacagcgcctggcctggcgctgtcagtgctggcagtaggcggtcgacttataacagcagcccaggagcggaatgtgctggccgagtgccggctggacccagctgacctgcagttgctgctcgactgggtgggtgcaccagcctttgcggcgggtgaggcttgggcacctgtgtgcctgccccgcttcaaccctgatggttttttctacgcctacgtggcccgcctggatgctatgcctgtctgcctgctgctgcttggcacccaacgtgaagccttccatgccatggccgcctgccggcgcctggtcgaagatgggatgcatgcccttggtgccatgcgtgcccttggggaggctgccagcttctctaatgcctcatcagccagtgctcctgcctacagcgtgcaggctgtcggggcgccgggcctccggcacttcctgtataagccgctggacatccctgaccaccaccgccaactgccccagtttaccagccctgagctagaggccccctacagcagagaggaggagcggcagcggctgtcggacctgtaccaccgcctgcatgctcgtctccacagcacctcccgacccctgcgcctcatttaccacgtggctgagaaggagacactactggcctgggtgacctccaaattcgagctctatacctgcctcagccctctggtgaccaaggcaggtgcaatcttggtagtgaccaaactcctgcgctgggtgaagaaagaggaggaccggctcttcattcgttacccacccaagtactccacaccaccagccacctctacggaccaagctgcccataatggcttgttcactggactctgatagttggagctcccagaccaggcagtgctgggagcaaccacctttgttttttaccttctgtctaccctggaaatgtgtgtgggggtgtgtctgtggccagtcattgtctccctaagcaatggggcaaggtctgagggcccaccgatgagagagatggtggcagccgccaggcgagcaggctgctttccctgcccagtcatgcacctccccctctggggaaatccttaggcctccctctcccttccctctgtctcatctcctccacttggatgatgctctagcctctgtcagggactgtcccctccaaacttgcttccgtggtctgcctcctagttgaatctcagccctgagtgtccagatctggccaaggtgtctagggtggcccacgggggtgctggaattggcacttcagggccaggctatgcttgggactggcctgagggtattttaaagaaaaaaactacataaaaggcctaaaagtaagacccacaaggatattcctttgcccttcttgtacttttttcatctttaccctgccagaaatgacccgccctcaatgctggctgctgctaacattaatgagaaggtggccttcagtgtccacctgtggaacccaggacacagcacctgactgcacacagtggctgaaatccagcatttttacataggagatgcacttagcgctcgcgcgcaggccccgcgttggaaaatggcggggaagctgaaacctctgaatgtggaggcgccagaagctgctgaggaggctgaaggtagtgagggcaagtgggctgcactcctttctctccaaccagggcagaaaggagggaggattcgtcccattacaataatgaaataatgatattctaatttttttaaataaaatgttaagccttt

SEQ ID NO: 62800 - DNA, 2260 bp, Homo sapiens
ggcgaagtgggcctcgctctcccgggttcgcagccgtagccagatccgttgaaaggagtgcagagaggtctcattgcgctcccgaacagacctgacgtagatccgaagtggcccgcgccatctcaactatgaggggacacccgtaggcggcgggagagggacgccgcgaggagccaataaagctccgcaaccggaagtgtcttctgggaggggtcgtacccggaagtgtggcacctcccgggccgcacccggaagtgtgatgccaccgccgctacggggaagtaatggtatccggccaattgagattcggagttaaaacagggatgtgcagatggaggtcggaggagacactgctgccccggcccccgggggcgcggaggacttggaggacacgcagttccccagtgaggaagctagagaaggtggaggggttcacgcggtcccgccggatcccgaagacgagggcctggaggaaacaggatccaaggacaaggaccagccacccagcccatcaccaccgccccagtcagaggccctgtcaagcacctctcggctctggagtcctgcagcccctgagaatagtcccacatgtagccctgagagtagctctggaggccagggcggggaccccagtgatgaggagtggcgcagccagcggaagcatgtgtttgtgctgagtgaggctggcaagcccatctactcgcggtatggtagtgtggaggcgctgtcggctaccatgggtgtaatgaccgccctggtgtcctttgtgcagagtgcgggagatgccatccgtgccatctacgctgaggaccacaagctggtgttcctacaacagggcccactgttgctcgtggccatgtcacggacttctcagtcagcagcccagctgcggggggagctgctagctgtgcacgcacagatcgtgagcacacttacacgtgcaagtgtcgcccgcatcttcgcacacaagcagaactatgacctccgccgcctgctggctggttcagagcgcacactggaccgacttctggacagtatggagcaggacccaggagccctgctcctgggtgccgtgcgctgtgtgccccttgcccgcccgctgcgagacgcactaggtgcgctcctccgacgttgcacagcgcctggcctggcgctgtcagtgctggcagtaggcggtcgacttataacagcagcccaggagcggaatgtgctggccgagtgccggctggacccagctgacctgcagttgctgctcgactgggtgggtgcaccagcctttgcggcgggtgaggcttgggcacctgtgtgcctgccccgcttcaaccctgatggttttttctacgcctacgtggcccgcctggatgctatgcctgtctgcctgctgctgcttggcacccaacgtgaagccttccatgccatggccgcctgccggcgcctggtcgaagatgggatgcatgcccttggtgccatgcgtgcccttggggaggctgccagcttctctaatgcctcatcagccagtgctcctgcctacagcgtgcaggctgtcggggcgccgggcctccggcacttcctgtataagccgctggacatccctgaccaccaccgccaactgccccagtttaccagccctgagctagaggccccctacagcagagaggaggagcggcagcggctgtcggacctgtaccaccgcctgcatgctcgtctccacagcacctcccgacccctgcgcctcatttaccacgtggctgagaaggagacactactggcctgggtgacctccaaattcgagctctatacctgcctcagccctctggtgaccaaggcaggtgcaatcttggtagtgaccaaactcctgcgctgggtgaagaaagaggaggaccggctcttcattcgttacccacccaagtactccacaccaccagccacctctacggaccaagctgcccataatggcttgttcactggactctgatagttggagctcccagaccaggcagtgctgggagcaaccacctttgttttttaccttctgtctaccctggaaatgtgtgtgggggtgtgtctgtggccagtcattgtctctacaaaaaattaaataagttggccaggctttctggtgcatgcctgtagtccttgctacttgggaggatgaggccagaggattgcttgagcctgggaagtcaaggctggagtgggtcatgatcgcatcactgtactctagcctgggtaacagagtggaagtggagactctgtctca

SEQ ID NO: 62801 - DNA, 5800 bp, Homo sapiens
tagtacgaggctcgggtgtttagcaattgagattcggagttaaaacagggatgtgcagatggaggtcggaggagacactgctgccccggcccccgggggcgcggaggacttggaggacacgcagttccccagtgaggaagctagagaaggtggaggggttcacgcggtcccgccggatcccgaagacgagggcctggaggaaacaggatccaaggacaaggaccagccacccagcccatcaccaccgccccagtcagaggccctgtcaagcacctctcggctctggagtcctgcagcccctgagaatagtcccacatgtagccctgagagtagctctggaggccagggcggggaccccagtgatgaggagtggcgcagccagcggaagcatgtgtttgtgctgagtgaggctggcaagcccatctactcgcggtatggtagtgtggaggcgctgtcggctaccatgggtgtaatgaccgccctggtgtcctttgtgcagagtgcgggagatgccatccgtgccatctacgctgaggaccacaagctggtgttcctacaacagggcccactgttgctcgtggccatgtcacggacttctcagtcagcagcccagctgcggggggagctgctagctgtgcacgcacagatcgtgagcacacttacacgtgcaagtgtcgcccgcatcttcgcacacaagcagaactatgacctccgccgcctgctggctggttcagagcgcacactggaccgacttctggacagtatggagcaggacccaggagccctgctcctgggtgccgtgcgctgtgtgccccttgcccgcccgctgcgagacgcactaggtgcgctcctccgacgttgcacagcgcctggcctggcgctgtcagtgctggcagtaggcggtcgacttataacagcagcccaggagcggaatgtgctggccgagtgccggctggacccagctgacctgcagttgctgctcgactgggtgggtgcaccagcctttgcggcgggtgaggcttgggcacctgtgtgcctgccccgcttcaaccctgatggttttttctacgcctacgtggcccgcctggatgctatgcctgtctgcctgctgctgcttggcacccaacgtgaagccttccatgccatggccgcctgccggcgcctggtcgaagatgggatgcatgcccttggtgccatgcgtgcccttggggaggctgccagcttctctaatgcctcatcagccagtgctcctgcctacagcgtgcaggctgtcggggcgccgggcctccggcacttcctgtataagccgctggacatccctgaccaccaccgccaactgccccagtttaccagccctgagctagaggccccctacagcagagaggaggagcggcagcggctgtcggacctgtaccaccgcctgcatgctcgtctccacagcacctcccgacccctgcgcctcatttaccacgtggctgagaaggagacactactggcctgggtgacctccaaattcgagctctatacctgcctcagccctctggtgaccaaggcaggtgcaatcttggtagtgaccaaactcctgcgctgggtgaagaaagaggaggaccggctcttcattcgttacccacccaagtactccacaccaccagccacctctacggaccaagctgcccataatggcttgttcactggactctgatagttggagctcccagaccaggcagtgctgggagcaaccacctttgttttttaccttctgtctaccctggaaatgtgtgtgggggtgtgtctgtggccagtcattgtctccctaagcaatggggcaaggtctgagggcccaccgatgagagagatggtggcagccgccaggcgagcaggctgctttccctgcccagtcatgcacctccccctctggggaaatccttaggcctccctctcccttccctctgtctcatctcctccacttggatgatgctctagcctctgtcagggactgtcccctccaaacttgcttccgtggtctgcctcctagttgaatctcagccctgagtgtccagatctggccaaggtgtctagggtggcccacgggggtgctggaattggcacttcagggccaggctatgcttgggactggcctgagggtattttaaagaaaaaaactacataaaaggcctaaaagtaagacccacaaggatattcctttgcccttcttgtacttttttcatctttaccctgccagaaatgacccgccctcaatgctggctgctgctaacattaatgagaaggtggccttcagtgtccacctgtggaacccaggacacagcacctgactgcacacagtggctgaaatccagcatttttacataggagatgcacttagcctctaagcctcgttttactcatctgtgaaacagagataagtaaccctctctcatgaactctttgatgaggatttgtaaacgaaaacagactcgaactattgtgtaccaccacatagcacatgcacgtctgtcccagactttgacaacctgcacaagacaagcagcctaaagcaggagagacctccctagggttttgtgtgtgtgcacactaccctcactccccaactggccattaccctagttctgcccttgtttgtggagttacagcctcaaggttgtagcatgtgtgctggcaatcagggccgcagtgtgttctgcgcctgcccagagctgactcctgatttaaccgctggcgtaaccgcgggttgcacgcatgcgtgctgaaaagcctttcaccctcacgtggtttcttttttaaccagtcatcaagcgaggctcgcgcgcaggccccgcgttggaaaatggcggggaagctgaaacctctgaatgtggaggcgccagaagctgctgaggaggctgaaggtagtgagggcaagtgggctgcactcctttctctccaaccagggcagaaaggagggaggattcgtcccattacaataatgaaataatgatattctaatttttttaaataaaatgttaagccttttgttattgaagaaaaacaattttttaaccgttcagcacagtggagataaattaacaggcatattcttatcaccgagattaacttttgtcaactgtagtgtatacgttgttgaaagtaaacaacatgtagttcagtacgaaagtcttcaaacaaaagtggggcggtggggatgttctcataacaatcaccgtgctgcagccaccccttattaacagtaattcccagtgtcgccatttcacacctaacacatatgacactttgatggactcttaaacctcctaatcgaacatggcctcccccacagcctcttttctccagggtattgacttgaatgacaggcaaaggagggtggaggggtgtcggcctagacactattggaaattgtattccatccaaaagaaaaaaaaatctcaggccgggcacggaggctcacgcctgtaatcccagcactttgggaggccgaggcgggcagatcacgaggttaggagttcgaggccagcctgaccaacatggtgaaacaccatctctactaaaaaactatatatacatatacatatgtgtgtatgtgtatttatatgtatgtatgtatgtgtgtgtgtatatatatatatatatgtatatgtgtatatatatatatatgtgtatatatatatatatatacacacactaatcagccgggcacggtggtgtgggcctgtaatcgcagctactcaggaagctgaggcaggagaatcacttgaacccgagaggcggaggttgcagtgagccgagatcatgtcactgcactccagcctgggtgacagagtgagactccgtctcaaaagaaaaaaaattctcccttggccgggcttggtggcttatgcctgtaatcccagcactttggaaggccgaggcgggtgggtcacctgaggtcaggagtttgagaccagcctggccagcatggcgaaacctcgtctctactaaaaatacaaaaattgtccgggtgtggtggcgggcgcctgtagtcccagctactggggaggctgaggcaggggaattgcttgaacccgggaggcagaggttatcgtgagctgacattgcgccactgcactccagcgcggaagacagagtgagccaaaaaaaaaaaaaaaaaagaaaaagaaaacaaaaagaaaaaaatctcccaaggcagtcatgcatttgtatgccactagcatttttttgttatagaaatattcaaagtgtaccaacgtagagaaaatagctttaaacaaagcccatgtgtacctatcagtatgctttaactgttgtcacctttctgccccacttttatctatctcgaacacccctttctgcacactctttaaaccactgtattaacaaacacattagactgcatcctgccagacctacccatacagacatcaaagtaatgattattgcttattgcctgacctaggatgtgagctccatgagaacagagactgtttacctctcgctcccctgcacctaaaacaatgcctgcttggtgtaaagtaagtgctcagtaattttttaatgtgtgaccaatgaaataacttcaagagcagagagctcttttagattagaggcacatactaagtgccagcattcaacaaaagacagacggaaataagacagatgcaaatagatctcatttattaactgtgtaatgcagctgccactgcaattaaaaaaaaaattttagtatcaacctttcaaattcctcaaaattaaagttatgactaacttcaccagcaaaggaaaaattgaaggatgtatcaagttgccatttctagcccatcaaatcggctttataaagggaagcatagtatctggtattgacgaccttgtagagaaacaggccttttcctgcctcagggaagagagctgactcaaagtaaaggctttgctagaggcagtcggcagagtatttttagcatctaaaatgctcttccacttcggcagtgaccatgcgatgtaatcaaaggagaatacgtaagtgtatggaccaggaatggtcactggagtgttgatgtaggcacaacacaagaagtagtcacagaaattgctaagtctaggtttatgtgtgcatgctgtggagtgtctctgtggtggatttctttttaagaggcagaaaaaaattctaatttaaatgtattaaattataagttctaatttaaatgtattaaaattaaattataagttgataggattattattgacacacaaggagctccaaaagagatcgtatttttattagagacaagccagttgggattgaaacaaaaatggaggggggtatagccctgtgtatgttgcacagaaaaagtatctgaatgataaaggcctaagtgataactctggacaagggatttggattttgggagtagtgcagaggtagaggcatttttgtgatttattgttctattttttcttctagaaaaatgtaagtagtcatatataattttaaaatataaaggagaagaggcaaaatgttgaatggcacctgaggatcctatattcatattggatcagtattaacatccaggttttgattgttgtactatggttacctggtagattccctttgtatataggaaataggtcccgtacagctaggggttccgcgggtataaggtctgaatatttcggtccaaaggccctacaaattggaatttgtaagtgaggaccaaactggaccctctggaacgattcaaatccactagtgtgccatactgcaatcgtttgtaaatataatgttttcaagggt

SEQ ID NO: 62802 - DNA, 5354 bp, Homo sapiens
ggcgaagtgggcctcgctctcccgggttcgcagccgtagccagatccgttgaaaggagtgcagagaggtctcattgcgctcccgaacagacctgacgtagatccgaagtggcccgcgccatctcaactatgaggggacacccgtaggcggcgggagagggacgccgcgaggagccaataaagctccgcaaccggaagtgtcttctgggaggggtcgtacccggaagtgtggcacctcccgggccgcacccggaagtgtgatgccaccgccgctacggggaagtaatggtatccggccaattgagattcggagttaaaacagggatgtgcagatggaggtcggaggagacactgctgccccggcccccgggggcgcggaggacttggaggacacgcagttccccagtgaggaagctagagaaggtggaggggttcacgcggtcccgccggatcccgaagacgagggcctggaggaaacaggatccaaggacaaggaccagccacccagcccatcaccaccgccccagtcagaggccctgtcaagcacctctcggctctggagtcctgcagcccctgagaatagtcccacatgtagccctgagagtagctctggaggccagggcggggaccccagtgatgaggagtggcgcagccagcggaagcatgtgtttgtgctgagtgaggctggcaagcccatctactcgcggtatggtagtgtggaggcgctgtcggctaccatgggtgtaatgaccgccctggtgtcctttgtgcagagtgcgggagatgccatccgtgccatctacgctgaggaccacaagctggtgttcctacaacagggcccactgttgctcgtggccatgtcacggacttctcagtcagcagcccagctgcggggggagctgctagctgtgcacgcacagatcgtgagcacacttacacgtgcaagtgtcgcccgcatcttcgcacacaagcagaactatgacctccgccgcctgctggctggttcagagcgcacactggaccgacttctggacagtatggagcaggacccaggagccctgctcctgggtgccgtgcgctgtgtgccccttgcccgcccgctgcgagacgcactaggtgcgctcctccgacgttgcacagcgcctggcctggcgctgtcagtgctggcagtaggcggtcgacttataacagcagcccaggagcggaatgtgctggccgagtgccggctggacccagctgacctgcagttgctgctcgactgggtgggtgcaccagcctttgcggcgggtgaggcttgggcacctgtgtgcctgccccgcttcaaccctgatggttttttctacgcctacgtggcccgcctggatgctatgcctgtctgcctgctgctgcttggcacccaacgtgaagccttccatgccatggccgcctgccggcgcctggtcgaagatgggatgcatgcccttggtgccatgcgtgcccttggggaggctgccagcttctctaatgcctcatcagccagtgctcctgcctacagcgtgcaggctgtcggggcgccgggcctccggcacttcctgtataagccgctggacatccctgaccaccaccgccaactgccccagtttaccagccctgagctagaggccccctacagcagagaggaggagcggcagcggctgtcggacctgtaccaccgcctgcatgctcgtctccacagcacctcccgacccctgcgcctcatttaccacgtggctgagaaggagacactactggcctgggtgacctccaaattcgagctctatacctgcctcagccctctggtgaccaaggcaggtgcaatcttggtagtgaccaaactcctgcgctgggtgaagaaagaggaggaccggctcttcattcgttacccacccaagtactccacaccaccagccacctctacggaccaagctgcccataatggcttgttcactggactctgatagttggagctcccagaccaggcagtgctgggagcaaccacctttgttttttaccttctgtctaccctggaaatgtgtgtgggggtgtgtctgtggccagtcattgtctccctaagcaatggggcaaggtctgagggcccaccgatgagagagatggtggcagccgccaggcgagcaggctgctttccctgcccagtcatgcacctccccctctggggaaatccttaggcctccctctcccttccctctgtctcatctcctccacttggatgatgctctagcctctgtcagggactgtcccctccaaacttgcttccgtggtctgcctcctagttgaatctcagccctgagtgtccagatctggccaaggtgtctagggtggcccacgggggtgctggaattggcacttcagggccaggctatgcttgggactggcctgagggtattttaaagaaaaaaactacataaaaggcctaaaagtaagacccacaaggatattcctttgcccttcttgtacttttttcatctttaccctgccagaaatgacccgccctcaatgctggctgctgctaacattaatgagaaggtggccttcagtgtccacctgtggaacccaggacacagcacctgactgcacacagtggctgaaatccagcatttttacataggagatgcacttagcctctaagcctcgttttactcatctgtgaaacagagataagtaaccctctctcatgaactctttgatgaggatttgtaaacgaaaacagactcgaactattgtgtaccaccacatagcacatgcacgtctgtcccagactttgacaacctgcacaagacaagcagcctaaagcaggagagacctccctagggttttgtgtgtgtgcacactaccctcactccccaactggccattaccctagttctgcctcctttctctccaaccagggcagaaaggagggaggattcgtcccattacaataatgaaataatgatattctaatttttttaaataaaatgttaagccttttgttattgaagaaaaacaattttttaaccgttcagcacagtggagataaattaacaggcatattcttatcaccgagattaacttttgtcaactgtagtgtatacgttgttgaaagtaaacaacatgtagttcagtacgaaagtcttcaaacaaaagtggggcggtggggatgttctcataacaatcaccgtgctgcagccaccccttattaacagtaattcccagtgtcgccatttcacacctaacacatatgacactttgatggactcttaaacctcctaatcgaacatggcctcccccacagcctcttttctccagggtattgacttgaatgacaggcaaaggagggtggaggggtgtcggcctagacactattggaaattgtattccatccaaaagaaaaaaaaatctcaggccgggcacggaggctcacgcctgtaatcccagcactttgggaggccgaggcgggcagatcacgaggttaggagttcgaggccagcctgaccaacatggtgaaacaccatctctataaaaatacaaaaattgtccgggtgtggtggcgggcgcctgtagtcccagctactggggaggctgaggcaggggaattgcttgaacccgggaggcagaggttatcgtgagctgacattgcgccactgcactccagcgcggaagacagagtgagccaaaaaaaaaaaaaaaaaagaaaaagaaaacaaaaagaaaaaaatctcccaaggcagtcatgcatttgtatgccactagcatttttttgttatagaaatattcaaagtgtaccaacgtagagaaaatagctttaaacaaagcccatgtgtacctatcagtatgctttaactgttgtcacctttctgccccacttttatctatctcgaacacccctttctgcacactctttaaaccactgtattaacaaacacattagactgcatcctgccagacctacccatacagacatcaaagtaatgattattgcttattgcctgacctaggatgtgagctccatgagaacagagactgtttacctctcgctcccctgcacctaaaacaatgcctgcttggtgtaaagtaagtgctcagtaattttttaatgtgtgaccaatgaaataacttcaagagcagagagctcttttagattagaggcacatactaagtgccagcattcaacaaaagacagacggaaataagacagatgcaaatagatctcatttattaactgtgtaatgcagctgccactgcaattaaaaaaaaaattttagtatcaacctttcaaattcctcaaaattaaagttatgactaacttcaccagcaaaggaaaaattgaaggatgtatcaagttgccatttctagcccatcaaatcggctttataaagggaagcatagtatctggtattgacgaccttgtagagaaacaggccttttcctgcctcagggaagagagctgactcaaagtaaaggctttgctagaggcagtcggcagagtatttttagcatctaaaatgctcttccacttcggcagtgaccatgcgatgtaatcaaaggagaatacgtaagtgtatggaccaggaatggtcactggagtgttgatgtaggcacaacacaagaagtagtcacagaaattgctaagtctaggtttatgtgtgcatgctgtggagtgtctctgtggtggatttctttttaagaggcagaaaaaaattctaatttaaatgtattaaattataagttctaatttaaatgtattaaaattaaattataagttgataggattattattgacacacaaggagctccaaaagagatcgtatttttattagagacaagccagttgggattgaaacaaaaatggaggggggtatagccctgtgtatgttgcacagaaaaagtatctgaatgataaaggcctaagtgataactctggacaagggatttggattttgggagtagtgcagaggtagaggcatttttgtgatttattgttctattttttcttctagaaaaatgtaagtagtcatatataattttaaaatataaaggagaagaggcaaaatgttgaatggcacctgaggatcctatattcatattggatcagtattaacatccaggttttgattgttgtactatggttacctggtagattccctttgtatataggaaatagacactggaatagtaaggagtagtgggtcaagatgtctgcaacttattgttcagaatcactcacaaatgggaaatctgatataaggacaaaatgggagcactgtggcctatttttacaacttttgtgtacatctgcaattgtttcaaaataaaatgtttaaaagggtgaaaaaaaaa

SEQ ID NO: 62803 - DNA, 3303 bp, Homo sapiens
ggcgaagtgggcctcgctctcccgggttcgcagccgtagccagatccgttgaaaggagtgcagagaggtctcattgcgctcccgaacagacctgacgtagatccgaagtggcccgcgccatctcaactatgaggggacacccgtaggcggcgggagagggacgccgcgaggagccaataaagctccgcaaccggaagtgtcttctgggaggggtcgtacccggaagtgtggcacctcccgggccgcacccggaagtgtgatgccaccgccgctacggggaagtaatggtatccggccaattgagattcggagttaaaacagggatgtgcagatggaggtcggaggagacactgctgccccggcccccgggggcgcggaggacttggaggacacgcagttccccagtgaggaagctagagaaggtggaggggttcacgcggtcccgccggatcccgaagacgagggcctggaggaaacaggatccaaggacaaggaccagccacccagcccatcaccaccgccccagtcagaggccctgtcaagcacctctcggctctggagtcctgcagcccctgagaatagtcccacatgtagccctgagagtagctctggaggccagggcggggaccccagtgatgaggagtggcgcagccagcggaagcatgtgtttgtgctgagtgaggctggcaagcccatctactcgcggtatggtagtgtggaggcgctgtcggctaccatgggtgtaatgaccgccctggtgtcctttgtgcagagtgcgggagatgccatccgtgccatctacgctgaggaccacaagctggtgttcctacaacagggcccactgttgctcgtggccatgtcacggacttctcagtcagcagcccagctgcggggggagctgctagctgtgcacgcacagatcgtgagcacacttacacgtgcaagtgtcgcccgcatcttcgcacacaagcagaactatgacctccgccgcctgctggctggttcagagcgcacactggaccgacttctggacagtatggagcaggacccaggagccctgctcctgggtgccgtgcgctgtgtgccccttgcccgcccgctgcgagacgcactaggtgcgctcctccgacgttgcacagcgcctggcctggcgctgtcagtgctggcagtaggcggtcgacttataacagcagcccaggagcggaatgtgctggccgagtgccggctggacccagctgacctgcagttgctgctcgactgggtgggtgcaccagcctttgcggcgggtgaggcttgggcacctgtgtgcctgccccgcttcaaccctgatggttttttctacgcctacgtggcccgcctggatgctatgcctgtctgcctgctgctgcttggcacccaacgtgaagccttccatgccatggccgcctgccggcgcctggtcgaagatgggatgcatgcccttggtgccatgcgtgcccttggggaggctgccagcttctctaatgcctcatcagccagtgctcctgcctacagcgtgcaggctgtcggggcgccgggcctccggcacttcctgtataagccgctggacatccctgaccaccaccgccaactgccccagtttaccagccctgagctagaggccccctacagcagagaggaggagcggcagcggctgtcggacctgtaccaccgcctgcatgctcgtctccacagcacctcccgacccctgcgcctcatttaccacgtggctgagaaggagacactactggcctgggtgacctccaaattcgagctctatacctgcctcagccctctggtgaccaaggcaggtgcaatcttggtagtgaccaaactcctgcgctgggtgaagaaagaggaggaccggctcttcattcgttacccacccaagtactccacaccaccagccacctctacggaccaagctgcccataatggcttgttcactggactctgatagttggagctcccagaccaggcagtgctgggagcaaccacctttgttttttaccttctgtctaccctggaaatgtgtgtgggggtgtgtctgtggccagtcattgtctccctaagcaatggggcaaggtctgagggcccaccgatgagagagatggtggcagccgccaggcgagcaggctgctttccctgcccagtcatgcacctccccctctggggaaatccttaggcctccctctcccttccctctgtctcatctcctccacttggatgatgctctagcctctgtcagggactgtcccctccaaacttgcttccgtggtctgcctcctagttgaatctcagccctgagtgtccagatctggccaaggtgtctagggtggcccacgggggtgctggaattggcacttcagggccaggctatgcttgggactggcctgagggtattttaaagaaaaaaactacataaaaggcctaaaagtaagacccacaaggatattcctttgcccttcttgtacttttttcatctttaccctgccagaaatgacccgccctcaatgctggctgctgctaacattaatgagaaggtggccttcagtgtccacctgtggaacccaggacacagcacctgactgcacacagtggctgaaatccagcatttttacataggagatgcacttagcctctaagcctcgttttactcatctgtgaaacagagataagtaaccctctctcatgaactctttgatgaggatttgtaaacgaaaacagactcgaactattgtgtaccaccacatagcacatgcacgtctgtcccagactttgacaacctgcacaagacaagcagcctaaagcaggagagacctccctagggttttgtgtgtgtgcacactaccctcactccccaactggccattaccctagttctgcccttgtttgtggagttacagcctcaaggttgtagcatgtgtgctggcaatcagggccgcagtgtgttctgcgcctgcccagagctgactcctgatttaaccgctggcgtaaccgcgggttgcacgcatgcgtgctgaaaagcctttcaccctcacgtggtttcttttttaaccagtcatcaagcgaggctcgcgcgcaggccccgcgttggaaaatggcggggaagctgaaacctctgaatgtggaggcgccagaagctgctgaggaggctgaaggtagtgagggcaagtgggctgcactcctttctctccaaccagggcagaaaggagggaggattcgtcccattacaataatgaaataatgatattctaatttttttaaataaaatgttaagccttt

SEQ ID NO: 62804 - DNA, 4680 bp, Homo sapiens
ggcgaagtgggcctcgctctcccgggttcgcagccgtagccagatccgttgaaaggagtgcagagaggtctcattgcgctcccgaacagacctgacgtagatccgaagtggcccgcgccatctcaactatgaggggacacccgtaggcggcgggagagggacgccgcgaggagccaataaagctccgcaaccggaagtgtcttctgggaggggtcgtacccggaagtgtggcacctcccgggccgcacccggaagtgtgatgccaccgccgctacggggaagtaatggtatccggccaattgagattcggagttaaaacagggatgtgcagatggaggtcggaggagacactgctgccccggcccccgggggcgcggaggacttggaggacacgcagttccccagtgaggaagctagagaaggtggaggggttcacgcggtcccgccggatcccgaagacgagggcctggaggaaacaggatccaaggacaaggaccagccacccagcccatcaccaccgccccagtcagaggccctgtcaagcacctctcggctctggagtcctgcagcccctgagaatagtcccacatgtagccctgagagtagctctggaggccagggcggggaccccagtgatgaggagtggcgcagccagcggaagcatgtgtttgtgctgagtgaggctggcaagcccatctactcgcggtatggtagtgtggaggcgctgtcggctaccatgggtgtaatgaccgccctggtgtcctttgtgcagagtgcgggagatgccatccgtgccatctacgctgaggaccacaagctggtgttcctacaacagggcccactgttgctcgtggccatgtcacggacttctcagtcagcagcccagctgcggggggagctgctagctgtgcacgcacagatcgtgagcacacttacacgtgcaagtgtcgcccgcatcttcgcacacaagcagaactatgacctccgccgcctgctggctggttcagagcgcacactggaccgacttctggacagtatggagcaggacccaggagccctgctcctgggtgccgtgcgctgtgtgccccttgcccgcccgctgcgagacgcactaggtgcgctcctccgacgttgcacagcgcctggcctggcgctgtcagtgctggcagtaggcggtcgacttataacagcagcccaggagcggaatgtgctggccgagtgccggctggacccagctgacctgcagttgctgctcgactgggtgggtgcaccagcctttgcggcgggtgaggcttgggcacctgtgtgcctgccccgcttcaaccctgatggttttttctacgcctacgtggcccgcctggatgctatgcctgtctgcctgctgctgcttggcacccaacgtgaagccttccatgccatggccgcctgccggcgcctggtcgaagatgggatgcatgcccttggtgccatgcgtgcccttggggaggctgccagcttctctaatgcctcatcagccagtgctcctgcctacagcgtgcaggctgtcggggcgccgggcctccggcacttcctgtataagccgctggacatccctgaccaccaccgccaactgccccagtttaccagccctgagctagaggccccctacagcagagaggaggagcggcagcggctgtcggacctgtaccaccgcctgcatgctcgtctccacagcacctcccgacccctgcgcctcatttaccacgtggctgagaaggagacactactggcctgggtgacctccaaattcgagctctatacctgcctcagccctctggtgaccaaggcaggtgcaatcttggtagtgaccaaactcctgcgctgggtgaagaaagaggaggaccggctcttcattcgttacccacccaagtactccacaccaccagccacctctacggaccaagctgcccataatggcttgttcactggactctgatagttggagctcccagaccaggcagtgctgggagcaaccacctttgttttttaccttctgtctaccctggaaatgtgtgtgggggtgtgtctgtggccagtcattgtctccctaagcaatggggcaaggtctgagggcccaccgatgagagagatggtggcagccgccaggcgagcaggctgctttccctgcccagtcatgcacctccccctctggggaaatccttaggcctccctctcccttccctctgtctcattcctttctctccaaccagggcagaaaggagggaggattcgtcccattacaataatgaaataatgatattctaatttttttaaataaaatgttaagccttttgttattgaagaaaaacaattttttaaccgttcagcacagtggagataaattaacaggcatattcttatcaccgagattaacttttgtcaactgtagtgtatacgttgttgaaagtaaacaacatgtagttcagtacgaaagtcttcaaacaaaagtggggcggtggggatgttctcataacaatcaccgtgctgcagccaccccttattaacagtaattcccagtgtcgccatttcacacctaacacatatgacactttgatggactcttaaacctcctaatcgaacatggcctcccccacagcctcttttctccagggtattgacttgaatgacaggcaaaggagggtggaggggtgtcggcctagacactattggaaattgtattccatccaaaagaaaaaaaaatctcaggccgggcacggaggctcacgcctgtaatcccagcactttgggaggccgaggcgggcagatcacgaggttaggagttcgaggccagcctgaccaacatggtgaaacaccatctctataaaaatacaaaaattgtccgggtgtggtggcgggcgcctgtagtcccagctactggggaggctgaggcaggggaattgcttgaacccgggaggcagaggttatcgtgagctgacattgcgccactgcactccagcgcggaagacagagtgagccaaaaaaaaaaaaaaaaaagaaaaagaaaacaaaaagaaaaaaatctcccaaggcagtcatgcatttgtatgccactagcatttttttgttatagaaatattcaaagtgtaccaacgtagagaaaatagctttaaacaaagcccatgtgtacctatcagtatgctttaactgttgtcacctttctgccccacttttatctatctcgaacacccctttctgcacactctttaaaccactgtattaacaaacacattagactgcatcctgccagacctacccatacagacatcaaagtaatgattattgcttattgcctgacctaggatgtgagctccatgagaacagagactgtttacctctcgctcccctgcacctaaaacaatgcctgcttggtgtaaagtaagtgctcagtaattttttaatgtgtgaccaatgaaataacttcaagagcagagagctcttttagattagaggcacatactaagtgccagcattcaacaaaagacagacggaaataagacagatgcaaatagatctcatttattaactgtgtaatgcagctgccactgcaattaaaaaaaaaattttagtatcaacctttcaaattcctcaaaattaaagttatgactaacttcaccagcaaaggaaaaattgaaggatgtatcaagttgccatttctagcccatcaaatcggctttataaagggaagcatagtatctggtattgacgaccttgtagagaaacaggccttttcctgcctcagggaagagagctgactcaaagtaaaggctttgctagaggcagtcggcagagtatttttagcatctaaaatgctcttccacttcggcagtgaccatgcgatgtaatcaaaggagaatacgtaagtgtatggaccaggaatggtcactggagtgttgatgtaggcacaacacaagaagtagtcacagaaattgctaagtctaggtttatgtgtgcatgctgtggagtgtctctgtggtggatttctttttaagaggcagaaaaaaattctaatttaaatgtattaaattataagttctaatttaaatgtattaaaattaaattataagttgataggattattattgacacacaaggagctccaaaagagatcgtatttttattagagacaagccagttgggattgaaacaaaaatggaggggggtatagccctgtgtatgttgcacagaaaaagtatctgaatgataaaggcctaagtgataactctggacaagggatttggattttgggagtagtgcagaggtagaggcatttttgtgatttattgttctattttttcttctagaaaaatgtaagtagtcatatataattttaaaatataaaggagaagaggcaaaatgttgaatggcacctgaggatcctatattcatattggatcagtattaacatccaggttttgattgttgtactatggttacctggtagattccctttgtatataggaaatagacactggaatagtaaggagtagtgggtcaagatgtctgcaacttattgttcagaatcactcacaaatgggaaatctgatataaggacaaaatgggagcactgtggcctatttttacaacttttgtgtacatctgcaattgtttcaaaataaaatgtttaaaagggtgaaaaaaaaa

SEQ ID NO: 62805 - DNA, 414 bp, Homo sapiens
tctaatttttttagttttattttctaggaagttttaggctgaaagccacatataattagttatgtgataactatgagttgccatggctactgaattggacatgggacccttagactgctacccagcaccttgttaagtacttagcaagagttagatactactgttgtaatattactaggatgccatccagaaaatgtaaggaatgtcttttgacctgataaactccttagaactccttcatcttttataaagaggagtatccctctcctagatatagctgcttctgaccccaaaggcagatgtgttggttttcaactagaaagctaaatggtacctataaattttttttttcttaaactgttttaaactcttaatcttcaaaatatatacttctttgattctggtcaaaccatt

SEQ ID NO: 62806 - DNA, 452 bp, Homo sapiens
gcacaacaaaaaataaaataaaatccttctgagaaagaaaagaaactactatctcagaaatgcaagcctcctgtaaatgatcaggtccagagaagcatggggatgagacagcagtcatatcccacctcctgcctgccttgagctaaacaaccacctcttgaagctgctggccatgtgcactgaagactgcttgccaccacaggtagctatacatcaacttaacaatgctgcacgctggaccctctaactcatttcatatagttcaacaatgtagccaatcactaatcaatgttatttctgtaaaccaatgagaattcctggcaaacaactttctgtcagcccactctttgtcctgtgttttgcctttaaaaaccagcttgtaacacaggccaaatggagctcatacccaaggttacctaggtctgagtcttcagggcagatgtcctcatctg

SEQ ID NO: 62807 - DNA, 663 bp, Homo sapiens
catagccaagctttgactgttggtcacctgacttcaagtttagagctctgttaccccctgtccattgcctgctctagtgcaaggttctctacagggggtgattttgcctcccaggtgacatttgacaaaggctggagacagttgtgattgtcacaacttggggttgcagggcgaagtgctactggcaacacgtgaccagggatgtgctaaacattctacaatgcacaggatgactccctaccctgccccaacaaataatgatttagctccaaatgtcaatagtgcagtggttggtgatgaataaatgtcctgcacagaactgagtcttccccttctcagcccatggcagacattactaatcaatcacagtacttttctcccctgatcacagtctgaatcctcaacacagtgctccattcaggagctactagttgataaaatacctatcgatcatcctttggctggatagcatagagacagtacgttctgaagtcattctgcttgggtttgagttctggctttgttaccacctattagctgtatgatctggggtcctaattcacttctctgtgcctcatttttcccatctgtgaaatggggatcacaaatggggataaaccgagggtgatttgggggattaaacaattgtatgcattttttaaa

SEQ ID NO: 62808 - DNA, 285 bp, Homo sapiens
cttgatatatcccaccattgaaacttggttcgcaaaaagtcctctttaaatgtgccttccagaactgaatatggcacattagatctgacactcctgaagcagatggtaaagtggagttactgccattcttgataagatgccaacactggactgcaactccactttgggctcacagtcaagcagaactcaagtccaaccaatgaaccagtgcctactagcactcaccaaggctccacagcatacattcacaaatcctcccccaccatcaaatttggtaccaggccg

SEQ ID NO: 62809 - DNA, 216 bp, Homo sapiens
tcgcccttagggcgtggtgcggagggcggtacaaaggatattctgtttctatctgcaatgcatttgataatcatttctatgaaatgtattttatttaatcagataagctaataagcgaattggttacatcgtttgtatctgttggcctagtggacagctgtgcctggtgcacctctggcttttaataaatactcattggttgaaacaccctgctaa

SEQ ID NO: 62810 - DNA, 1857 bp, Homo sapiens
  misc_feature (182)..(182): n is a, c, g, or t
agcggggatttccatgcgacagaatcccaaacagttctgaatgtctccaagggagaagcaaagccaactcgggcagatgcccatgtgaacagagtacctgaaggaaaagccaagagtctccctgtacagggtctgtcagaaactgttggaatcttacataaagtcaagtctcagaaatgtcngatgcttcaccatattcttatattctatgcaattgttgtctgtgcactaatcatctcgaccttctacatgagatacagaattaatactctggaggagcagctggggttactaacctccattgtggacacccataatactgaacaggcagcaccatctggcctgaggtcacaagtacaattcaatgtggaggttctctgtcaagagcttacagctaacatagtgaaattagaaaagatacaaaataacttacagaagttgcttgagaatggtgactgatcgaccagattgcttgggccatcggaatacctcatgtttccctttgaagaaggtgcttcctgaggcgttttgtttgagtgcaccctgctggtcagaggtgcaagcagatgagaatccagacattgcatgtggaggtctccagctcaggaaagtggggagggaaataattttggttcttgtgcaataaaagttgaccttgactctctgaggaagattttgctgcttttgcctgaagaaaacagacccatctctggaggtctcaggaagggcccagcgaacacactctcttggataattaccacgatggcgtcagcaaacactccaccctgtgcctttttagtccttcccgccctcctgcctctcccttacacccctcttaacgactttcaaactaaaggatacatcatatactgacaaactcaatgtggtcctttcaagaattagccatgagtctcaaaaaggcaataaatggctctaagtggacaggtttgcttcaaacaagtaacatctacattttgtcttttttttttcagttctcctgttatgttctggttgaaatcacctgtgtgtcttaatttctcaattcctttttggcaagaatatcaagcaaggtgaatttaacattatgtttatgttttgttttgttgctgtaactaatagttaattggactgattcttacccagccctggtcaagaatctgtgaggcatgtgactgaagtactaaattaaacttattttgaaaccaaacctaatttttaagccaaaaggtgtaatagtgatttaatacaggatgaaaaacactgaatttttaagactgtaggtggactatgttagtagttttcaagcaggatgtctgtattcagcattcaataatgctaaaatccctttcagcatgaaatttgtatgtttttatcctttgctgactaaaataaaataactggtggtttgctaactatttaccatatgggttggctggtttttattaataattgtttagggtatcataagatctgtaagtacaaaggatattctgtttctatctgcaatgcatttgataatcatttctatgaaatgtattttatttaatcagataagctaataagcgaattggttacatcgtttgtatctgttggcctagtggacagctgtgcctggtgcacctctggcttttaataaatactcattggttgaaacaccctgctaacactgtgttttgtcagttcgtaaattcctttaaccaagacttaactatgctttttaactctttttccacctgccatctactactaccaactcacttatacttccttcctcccaagtaatcatttcaaaactaaaaaaggatttaagttcttgggttacaacggtttaaaggaaagaaaatgaactttgaagtc

SEQ ID NO: 62811 - DNA, 1697 bp, Homo sapiens
  misc_feature (182)..(182): n is a, c, g, or t
agcggggatttccatgcgacagaatcccaaacagttctgaatgtctccaagggagaagcaaagccaactcgggcagatgcccatgtgaacagagtacctgaaggaaaagccaagagtctccctgtacagggtctgtcagaaactgttggaatcttacataaagtcaagtctcagaaatgtcngatgcttcaccatattcttatattctatgcaattgttgtctgtgcactaatcatctcgaccttctacatgagatacagaattaatactctggaggagcagctggggttactaacctccattgtggacacccataatactgaacaggcagcaccatctggcctgaggtcacaagtacaattcaatgtggaggttctctgtcaagagcttacagctaacatagtgaaattagaaaagatacaaaataacttacagaagttgcttgagaatggtgactgatcgaccagattgcttgggccatcggaatacctcatgtttccctttgaagaaggtgcttcctgaggcgttttgtttgagtgcaccctgctggtcagaggtgcaagcagatgagaatccagacattgcatgtggaggtctccagctcaggaaagtggggagggaaataattttggttcttgtgcaataaaagttgaccttgactctctgaggaagattttgctgcttttgcctgaagaaaacagacccatctctggaggtctcaggaagggcccagcgaacacactctcttggataattaccacgatggcgtcagcaaacactccaccctgtgcctttttagtccttcccgccctcctgcctctcccttacacccctcttaacgactttcaaactaaaggatacatcatatactgacaaactcaatgtggtcctttcaagaattagccatgagtctcaaaaaggcaataaatggctctaagtggacaggtttgcttcaaacaagtaacatctacattttgtcttttttttttcagttctcctgttatgttctggttgaaatcacctgtgtgtcttaatttctcaattcctttttggcaagaatatcaagcaaggtgaatttaacattatgtttatgttttgttttgttgctgtaactaatagttaattggactgattcttacccagccctggtcaagaatctgtgaggcatgtgactgaagtactaaattaaacttattttgaaaccaaacctaatttttaagccaaaaggtgtaatagtgatttaatacaggatgaaaaacactgaatttttaagactgtaggtggactatgttagtagttttcaagcaggatgtctgtattcagcattcaataatgctaaaatccctttcagcatgaaatttgtatgtttttatcctttgctgactaaaataaaataactggtggtttgctaactatttaccatatgggttggctggtttttattaataattgtttagggtatcataagatctgtaagtacaaaggatattctgtttctatctgcaatgcatttgataatcatttctatgaaatgtattttatttaatcagataagctaataagcgaattggttacatcgtttgtatctgttggcctagtggacagctgtgcctggtgcacctctggcttttaataaatactcattggttgaaacaccctgctaaaaaacaaaaaaaacagaagacgataaaaaatcg

SEQ ID NO: 62812 - DNA, 1296 bp, Homo sapiens
aatcagctcggacctgaaacgctcagccaacatagtgaaattagaaaagatacaaaataacttacagaagttgcttgagaatggtgactgatcgaccagattgcttgggccatcggaatacctcatgtttccctttgaagaaggtgcttcctgaggcgttttgtttgagtgcaccctgctggtcagaggtgcaagcagatgagaatccagacattgcatgtggaggtctccagctcaggaaagtggggagggaaataattttggttcttgtgcaataaaagttgaccttgactctctgaggaagattttgctgcttttgcctgaagaaaacagacccatctctggaggtctcaggaagggcccagcgaacacactctcttggataattaccacgatggcgtcagcaaacactccaccctgtgcctttttagtccttcccgccctcctgcctctcccttacacccctcttaacgactttcaaactaaaggatacatcatatactgacaaactcaatgtggtcctttcaagaattagccatgagtctcaaaaaggcaataaatggctctaagtggacaggtttgcttcaaacaagtaacatctacattttgtcttttttttttcagttctcctgttatgttctggttgaaatcacctgtgtgtcttaatttctcaattcctttttggcaagaatatcaagcaaggtgaatttaacattatgtttatgttttgttttgttgctgtaactaatagttaattggactgattcttacccagccctggtcaagaatctgtgaggcatgtgactgaagtactaaattaaacttattttgaaaccaaacctaatttttaagccaaaaggtgtaatagtgatttaatacaggatgaaaaacactgaatttttaagactgtaggtggactatgttagtagttttcaagcaggatgtctgtattcagcattcaataatgctaaaatccctttcagcatgaaatttgtatgtttttatcctttgctgactaaaataaaataactggtggtttgctaactatttaccatatgggttggctggtttttattaataattgtttagggtatcataagatctgtaagtacaaaggatattctgtttctatctgcaatgcatttgataatcatttctatgaaatgtattttatttaatcagataagctaataagcgaattggttacatcgtttgtatctgttggcctagtggacagctgtgcctggtgcacctctggcttttaataaatactcattggttgaaacaccctgctaa

SEQ ID NO: 62813 - DNA, 1610 bp, Homo sapiens
  misc_feature (182)..(182): n is a, c, g, or t
agcggggatttccatgcgacagaatcccaaacagttctgaatgtctccaagggagaagcaaagccaactcgggcagatgcccatgtgaacagagtacctgaaggaaaagccaagagtctccctgtacagggtctgtcagaaactgttggaatcttacataaagtcaagtctcagaaatgtcngatgcttcaccatattcttatattctatgcaattgttgtctgtgcactaatcatctcgaccttctacatgagatacagaattaatactctggaggagcagctggggttactaacctccattgtggacacccataatactgaacaggcagcaccatctggcctgaggtcacaagtacaattcaatgtggaggttctctgtcaagagcttacagctaacatagtgaaattagaaaagatacaaaataacttacagaagttgcttgagaatggtgactgatcgaccagattgcttgggccatcggaatacctcatgtttccctttgaagaaggtgcttcctgaggcgttttgtttgagtgcaccctgctggtcagaggtgcaagcagatgagaatccagacattgcatgtggaggtctccagctcaggaaagtggggagggaaataattttggttcttgtgcaataaaagttgaccttgactctctgaggaagattttgctgcttttgcctgaagaaaacagacccatctctggaggtctcaggaagggcccagcgaacacactctcttggataattaccacgatggcgtcagcaaacactccaccctgtgcctttttagtccttcccgccctcctgcctctcccttacacccctcttaacgactttcaaactaaaggatacatcatatactgacaaactcaatgtggtcctttcaagaattagccatgagtatctacattttgtcttttttttttcagttctcctgttatgttctggttgaaatcacctgtgtgtcttaatttctcaattcctttttggcaagaatatcaagcaaggtgaatttaacattatgtttatgttttgttttgttgctgtaactaatagttaattggactgattcttacccagccctggtcaagaatctgtgaggcatgtgactgaagtactaaattaaacttattttgaaaccaaacctaatttttaagccaaaaggtgtaatagtgatttaatacaggatgaaaaacactgaatttttaagactgtaggtggactatgttagtagttttcaagcaggatgtctgtattcagcattcaataatgctaaaatccctttcagcatgaaatttgtatgtttttatcctttgctgactaaaataaaataactggtggtttgctaactatttaccatatgggttggctggtttttattaataattgtttagggtatcataagatctgtaagtacaaaggatattctgtttctatctgcaatgcatttgataatcatttctatgaaatgtattttatttaatcagataagctaataagcgaattggttacatcgtttgtatctgttggcctagtggacagctgtgcctggtgcacctctggcttttaataaatactcattggttgaaacaccctgctaa

SEQ ID NO: 62814 - DNA, 1341 bp, Homo sapiens
  misc_feature (182)..(182): n is a, c, g, or t
agcggggatttccatgcgacagaatcccaaacagttctgaatgtctccaagggagaagcaaagccaactcgggcagatgcccatgtgaacagagtacctgaaggaaaagccaagagtctccctgtacagggtctgtcagaaactgttggaatcttacataaagtcaagtctcagaaatgtcngatgcttcaccatattcttatattctatgcaattgttgtctgtgcactaatcatctcgaccttctacatgagatacagaattaatactctggaggagcagctggggttactaacctccattgtggacacccataatactgaacaggcagcaccatctggcctgaggtcacaagtacaattcaatgtggaggttctctgtcaagagcttacagctaacatagtgaaattagaaaagatacaaaataacttacagaagttgcttgagaatggtgactgatcgaccagattgcttgggccatcggaatacctcatgtttccctttgaagaaggtgcttcctgaggcgttttgtttgagtgcaccctgctggtcagaggtgcaagcagatgagaatccagacattgcatgtggaggtctccagctcaggaaagtggggagggaaataattttggttcttgtgcaataaaagttgaccttgactctctgaggaagattttgctgcttttgcctgaagaaaacagacccatctctggaggtctcaggaagggcccagcgaacacactctcttggataattaccacgatggcgtcagcaaacactccaccctgtgcctttttagtccttcccgccctcctgcctctcccttacacccctcttaacgactttcaaactaaaggatacatcatatactgacaaactcaatgtggtcctttcaagaattagccatgagtctcaaaaaggcaataaatggctctaagtggacaggtttgcttcaaacaagtaacatctacattttgtcttttttttttcagttctcctgttatgttctggttgaaatcacctgtgtgtcttaatttctcaattcctttttggcaagaatatcaagcaaggtgaatttaacattatgtttatgttttgttttgttgctgtaactaatagttaattggactgattcttacccagccctggtcaagaatcagtccaattaactattagttacagcaacaaaacaaaacataaacataaagcagccttcttcccccaggcaactaaacagaaagaggtttggttttgtttactgcgatatatacaggaaatcgagtatacagtccatgcagtagcacagccatttggagagacatcctgttgctgggaaacgta

SEQ ID NO: 62815 - DNA, 1062 bp, Homo sapiens
  misc_feature (182)..(182): n is a, c, g, or t
agcggggatttccatgcgacagaatcccaaacagttctgaatgtctccaagggagaagcaaagccaactcgggcagatgcccatgtgaacagagtacctgaaggaaaagccaagagtctccctgtacagggtctgtcagaaactgttggaatcttacataaagtcaagtctcagaaatgtcngatgcttcaccatattcttatattctatgcaattgttgtctgtgcactaatcatctcgaccttctacatgagatacagaattaatactctggaggagcagctggggttactaacctccattgtggacacccataatactgaacaggcagcaccatctggcctgaggtcacaagtacaattcaatgtggaggttctctgtcaagagcttacagctaacatagtgaaattagaaaagatacaaaataacttacagaagttgcttgagaatggtgactgatcgaccagattgcttgggccatcggaatacctcatgtttccctttgaagaaggtgcttcctgaggcgttttgtttgagtgcaccctgctggtcagaggtgcaagcagatgagaatccagacattgcatgtggaggtctccagctcaggaaagtggggagggaaataattttggttcttgtgcaataaaagttgaccttgactctctgaggaagattttgctgcttttgcctgaagaaaacagacccatctctggaggtctcaggaagggcccagcgaacacactctcttggataattaccacgatggcgtcagcaaacactccaccctgtgcctttttagtccttcccgccctcctgcctctcccttacacccctcttaacgactttcaaactaaaggatacatcatatactgacaaactcaatgtggtcctttcaagaattagccatgagtctcaaaaaggcaataaatggctctaagtggacaggtttgcttcaaacaagtaacatctacattttgtcttttttttttcagttctcctgttatgttctggttgaaatcacctgtgtgtcttaatttctctcggaccaatggtaccgagctt

SEQ ID NO: 62816 - DNA, 568 bp, Homo sapiens
ggtacccggtgtttatcgatgccacacttggactgattcttacccagccctggtcaagaatctgtgaggcatgtgactgaagtactaaattaaacttattttgaaaccaaacctaatttttaagccaaaaggtgtaatagtgatttaatacaggatgaaaaacactgaatttttaagactgtaggtggactatgttagtagttttcaagcaggatgtctgtattcagcattcaataatgctaaaatccctttcagcatgaaatttgtatgtttttatcctttgctgactaaaataaaataactggtggtttgctaactatttaccatatgggttggctggtttttattaataattgtttagggtatcataagatctgtaagtacaaaggatattctgtttctatctgcaatgcatttgataatcatttctatgaaatgtattttatttaatcagataagctaataagcgaattggttacatcgtttgtatctgttggcctagtggacagctgtgcctggtgcacctctggcttttaataaatactcattggttgaaacaccctgctaa

SEQ ID NO: 62817 - DNA, 462 bp, Homo sapiens
ccacgcgtccggtattaaatcactattacacctttgatttaatacaggatgaaaaacactgaatttttaagactgtaggtggactatgttagtagttttcaagcaggatgtctgtattcagcattcaataatgctaaaatccctttcagcatgaaatttgtatgtttttatcctttgctgactaaaataaaataactggtggtttgctaactatttaccatatgggttggctggtttttattaataattgtttagggtatcataagatctgtaagtacaaaggatattctgtttctatctgcaatgcatttgataatcatttctatgaaatgtattttatttaatcagataagctaataagcgaattggttacatcgtttgtatctgttggcctagtggacagctgtgcctggtgcacctctggcttttaataaatactcattggttgaaacaccctgctaa

SEQ ID NO: 62818 - DNA, 1664 bp, Homo sapiens
  misc_feature (182)..(182): n is a, c, g, or t
agcggggatttccatgcgacagaatcccaaacagttctgaatgtctccaagggagaagcaaagccaactcgggcagatgcccatgtgaacagagtacctgaaggaaaagccaagagtctccctgtacagggtctgtcagaaactgttggaatcttacataaagtcaagtctcagaaatgtcngatgcttcaccatattcttatattctatgcaattgttgtctgtgcactaatcatctcgaccttctacatgagatacagaattaatactctggaggagcagctggggttactaacctccattgtggacacccataatactgaacaggcagcaccatctggcctgaggtcacaagtacaattcaatgtggaggttctctgtcaagagcttacagctaacatagtgaaattagaaaagatacaaaataacttacagaagttgcttgagaatggtgactgatcgaccagattgcttgggccatcggaatacctcatgtttccctttgaagaaggtgcttcctgaggcgttttgtttgagtgcaccctgctggtcagaggtgcaagcagatgagaatccagacattgcatgtggaggtctccagctcaggaaagtggggagggaaataattttggttcttgtgcaataaaagttgaccttgactctctgaggaagattttgctgcttttgcctgaagaaaacagacccatctctggaggtctcaggaagggcccagcgaacacactctcttggataattaccacgatggcgtcagcaaacactccaccctgtgcctttttagtccttcccgccctcctgcctctcccttacacccctcttaacgactttcaaactaaaggatacatcatatactgacaaactcaatgtggtcctttcaagaattagccatgagtctcaaaaaggcaataaatggctctaagtggacaggtttgcttcaaacaagtaacatctacattttgtcttttttttttcagttctcctgttatgttctggttgaaatcacctgtgtgtcttaatttctcaattcctttttggcaagaatatcaagcaaggtgaatttaacattatgtttatgttttgttttgttgctgtaactaatagttaattggactgattcttacccagccctggtcaagaatctgtgaggcatgtgactgaagtactaaattaaacttattttgaaaccaaacctaatttttaagccaaaaggtgtaatagtgatttaatacaggatgaaaaacactgaatttttaagactgtaggtggactatgttagtagttttcaagcaggatgtctgtattcagcattcaataatgctaaaatccctttcagcatgaaatttgtatgtttttatcctttgctgactaaaataaaataactggtggtttgctaactatttaccatatgggttggctggtttttattaataattgtttagggtatcataagatctgtaagtacaaaggatattctgtttctatctgcaatgcatttgataatcatttctatgaaatgtattttatttaatcagataagctaataagcgaattggttacatcgtttgtatctgttggcctagtggacagctgtgcctggtgcacctctggcttttaataaatactcattggttgaaacaccctgctaa

SEQ ID NO: 62819 - DNA, 2308 bp, Homo sapiens
  misc_feature (182)..(182): n is a, c, g, or t
agcggggatttccatgcgacagaatcccaaacagttctgaatgtctccaagggagaagcaaagccaactcgggcagatgcccatgtgaacagagtacctgaaggaaaagccaagagtctccctgtacagggtctgtcagaaactgttggaatcttacataaagtcaagtctcagaaatgtcngatgcttcaccatattcttatattctatgcaattgttgtctgtgcactaatcatctcgaccttctacatgagatacagaattaatactctggaggagcagctggggttactaacctccattgtggacacccataatactgaacaggcagcaccatctggcctgaggtcacaagtacaattcaatgtggaggttctctgtcaagagcttacagctaacatagtgaaattagaaaagatacaaaataacttacagaagttgcttgagaatggtgactgatcgaccagattgcttgggccatcggaatacctcatgtttccctttgaagaaggtgcttcctgaggcgttttgtttgagtgcaccctgctggtcagaggtgcaagcagatgagaatccagacattgcatgtggaggtctccagctcaggaaagtggggagggaaataattttggttcttgtgcaataaaagttgaccttgactctctgaggaagattttgctgcttttgcctgaagaaaacagacccatctctggaggtctcaggaagggcccagcgaacacactctcttggataattaccacgatggcgtcagcaaacactccaccctgtgcctttttagtccttcccgccctcctgcctctcccttacacccctcttaacgactttcaaactaaaggatacatcatatactgacaaactcaatgtggtcctttcaagaattagccatgagtctcaaaaaggcaataaatggctctaagtggacaggtttgcttcaaacaagtaacatctacattttgtcttttttttttcagttctcctgttatgttctggttgaaatcacctgtgtgtcttaatttctcaattcctttttggcaagaatatcaagcaaggtgaatttaacattatgtttatgttttgttttgttgctgtaactaatagttaattggactgattcttacccagccctggtcaagaatctgtgaggcatgtgactgaagtactaaattaaacttattttgaaaccaaacctaatttttaagccaaaaggtgtaatagtgatttaatacaggatgaaaaacactgaatttttaagactgtaggtggactatgttagtagttttcaagcaggatgtctgtattcagcattcaataatgctaaaatccctttcagcatgaaatttgtatgtttttatcctttgctgactaaaataaaataactggtggtttgctaactatttaccatatgggttggctggtttttattaataattgtttagggtatcataagatctgtaagtacaaaggatattctgtttctatctgcaatgcatttgataatcatttctatgaaatgtattttatttaatcagataagctaataagcgaattggttacatcgtttgtatctgttggcctagtggacagctgtgcctggtgcacctctggcttttaataaatactcattggttgaaacaccctgctaacactgtgttttgtcagttcgtaaattcctttaaccaagacttaactatgctttttaactctttttccacctgccatctactactaccaactcacttatacttccttcctcccaagtaatcatttcaaaactaaaaaaggatttaagttcttgggttacaacggtttaaaggaaagaaaatgaactttgaagtcaaaaaaaaaagaaaaaaaaaaaagacaatgcttcattcctcagtccacatttatgagttatgtgacctttagcaaaatatttggccatatccccccattttattgatgaggttgaaagtaccagtaaaaagtatcagtgtgaggattaaatgtgataatgtcagccaggtgcagtggctcatgcctataatcccagcattctcggaggccaaggcaggaggactgcttgagctcaggaggttgtgatcagcctggacaacgcagcaagatcccatttctactaaaaataaaaataaattagccaggtgtggtgatgcatgcctatagtcccagctactcaggagaattgctgaagtctgggagactgaggctgcagtgagccacgatcacaccattgcaccctagcctgagtgacaaagcaagaccttgtctcagtcaatcaatcagtcaa

SEQ ID NO: 62820 - DNA, 2254 bp, Homo sapiens
  misc_feature (182)..(182): n is a, c, g, or t
agcggggatttccatgcgacagaatcccaaacagttctgaatgtctccaagggagaagcaaagccaactcgggcagatgcccatgtgaacagagtacctgaaggaaaagccaagagtctccctgtacagggtctgtcagaaactgttggaatcttacataaagtcaagtctcagaaatgtcngatgcttcaccatattcttatattctatgcaattgttgtctgtgcactaatcatctcgaccttctacatgagatacagaattaatactctggaggagcagctggggttactaacctccattgtggacacccataatactgaacaggcagcaccatctggcctgaggtcacaagtacaattcaatgtggaggttctctgtcaagagcttacagctaacatagtgaaattagaaaagatacaaaataacttacagaagttgcttgagaatggtgactgatcgaccagattgcttgggccatcggaatacctcatgtttccctttgaagaaggtgcttcctgaggcgttttgtttgagtgcaccctgctggtcagaggtgcaagcagatgagaatccagacattgcatgtggaggtctccagctcaggaaagtggggagggaaataattttggttcttgtgcaataaaagttgaccttgactctctgaggaagattttgctgcttttgcctgaagaaaacagacccatctctggaggtctcaggaagggcccagcgaacacactctcttggataattaccacgatggcgtcagcaaacactccaccctgtgcctttttagtccttcccgccctcctgcctctcccttacacccctcttaacgactttcaaactaaaggatacatcatatactgacaaactcaatgtggtcctttcaagaattagccatgagtctcaaaaaggcaataaatggctctaagtggacaggtttgcttcaaacaagtaacatctacattttgtcttttttttttcagttctcctgttatgttctggttgaaatcacctgtgtgtcttaatttctcaattcctttttggcaagaatatcaagcaaggtgaatttaacattatgtttatgttttgttttgttgctgtaactaatagttaattggactgattcttacccagccctggtcaagaatctgtgaggcatgtgactgaagtactaaattaaacttattttgaaaccaaacctaatttttaagccaaaaggtgtaatagtgatttaatacaggatgaaaaacactgaatttttaagactgtaggtggactatgttagtagttttcaagcaggatgtctgtattcagcattcaataatgctaaaatccctttcagcatgaaatttgtatgtttttatcctttgctgactaaaataataattgtttagggtatcataagatctgtaagtacaaaggatattctgtttctatctgcaatgcatttgataatcatttctatgaaatgtattttatttaatcagataagctaataagcgaattggttacatcgtttgtatctgttggcctagtggacagctgtgcctggtgcacctctggcttttaataaatactcattggttgaaacaccctgctaacactgtgttttgtcagttcgtaaattcctttaaccaagacttaactatgctttttaactctttttccacctgccatctactactaccaactcacttatacttccttcctcccaagtaatcatttcaaaactaaaaaaggatttaagttcttgggttacaacggtttaaaggaaagaaaatgaactttgaagtcaaaaaaaaaagaaaaaaaaaaaagacaatgcttcattcctcagtccacatttatgagttatgtgacctttagcaaaatatttggccatatccccccattttattgatgaggttgaaagtaccagtaaaaagtatcagtgtgaggattaaatgtgataatgtcagccaggtgcagtggctcatgcctataatcccagcattctcggaggccaaggcaggaggactgcttgagctcaggaggttgtgatcagcctggacaacgcagcaagatcccatttctactaaaaataaaaataaattagccaggtgtggtgatgcatgcctatagtcccagctactcaggagaattgctgaagtctgggagactgaggctgcagtgagccacgatcacaccattgcaccctagcctgagtgacaaagcaagaccttgtctcagtcaatcaatcagtcaa

SEQ ID NO: 62821 - DNA, 1149 bp, Homo sapiens
  misc_feature (182)..(182): n is a, c, g, or t
agcggggatttccatgcgacagaatcccaaacagttctgaatgtctccaagggagaagcaaagccaactcgggcagatgcccatgtgaacagagtacctgaaggaaaagccaagagtctccctgtacagggtctgtcagaaactgttggaatcttacataaagtcaagtctcagaaatgtcngatgcttcaccatattcttatattctatgcaattgttgtctgtgcactaatcatctcgaccttctacatgagatacagaattaatactctggaggagcagctggggttactaacctccattgtggacacccataatactgaacaggcagcaccatctggcctgaggtcacaagtacaattcaatgtggaggttctctgtcaagagcttacagctaacatagtgaaattagaaaagatacaaaataacttacagaagttgcttgagaatggtgactgatcgaccagattgcttgggccatcggaatacctcatgtttccctttgaagaaggtgcttcctgaggcgttttgtttgagtgcaccctgctggtcagaggtgcaagcagatgagaatccagacattgcatgtggaggtctccagctcaggaaagtggggagggaaataattttggttcttgtgcaataaaagttgaccttgactctctgaggaagattttgctgcttttgcctgaagaaaacagacccatctctggaggtctcaggaagggcccagcgaacacactctcttggataattaccacgatggcgtcagcaaacactccaccctgtgcctttttagtccttcccgccctcctgcctctcccttacacccctcttaacgactttcaaactaaaggatacatcatatactgacaaactcaatgtggtcctttcaagaattagccatgagtctcaaaaaggcaataaatggctctaagtggacaggtttgcttcaaacaagtaacatctacattttgtcttttttttttcagttctcctgttatgttctggttgaaatcacctgtgtgtcttaatttctcaattcctttttggcaagaatatcaagcaaggtgaatttaacattatgtttatgttttgttttgttgctgtaactaatagttaatctctcggaccaatggtacgagctca

SEQ ID NO: 62822 - DNA, 815 bp, Homo sapiens
  misc_feature (182)..(182): n is a, c, g, or t
agcggggatttccatgcgacagaatcccaaacagttctgaatgtctccaagggagaagcaaagccaactcgggcagatgcccatgtgaacagagtacctgaaggaaaagccaagagtctccctgtacagggtctgtcagaaactgttggaatcttacataaagtcaagtctcagaaatgtcngatgcttcaccatattcttatattctatgcaattgttgtctgtgcactaatcatctcgaccttctacatgagatacagaattaatactctggaggagcagctggggttactaacctccattgtggacacccataatactgaacaggcagcaccatctggcctgaggtcacaagtacaattcaatgtggaggttctctgtcaagagcttacagctaacatagtgaaattagaaaagatacaaaataacttacagaagttgcttgagaatggtgactgatcgaccagattgcttgggccatcggaatacctcatgtttccctttgaagaagttctcctgttatgttctggttgaaatcacctgtgtgtcttaatttctcaattcctttttggcaagaatatcaagcaagatagggtctcactctatcatcgcccaggctggagtacagtggcgcaatctcggctcactggaacctctacctcccaacctatcctctcgcctcagcctcccaagtagctgggactacaggtgcacaccaccacacccagctaattttttgtatttttagtagagacaggtttttccatgttgcccaggctggtgttgaactcctgggctcaaacaatccacctaca

SEQ ID NO: 62823 - DNA, 371 bp, Homo sapiens
ctctaatatttgatgtcctcttccttcagatgccaaagaataaaattttaaatctaaaacttcaaagggtggtgaaggtttttaaattctgaatagaaagtacatattactttttaagcacaagaaaatggaacatgatgagccctctgtttaaaaattatggtattcactgggtgtttttcaaagctgtgtgtgtggtctggtgttgacaggagagaacatacaatttcaaattagctagtgcttgtcagctgttgctgatagctgttggaaggttttgggaaagacaggggcacggtgatattttggcaagcttgcctattaaggacatttgctggaaatgacttcatgattcctatccctttcttctt

SEQ ID NO: 62824 - DNA, 677 bp, Homo sapiens
ataccattacacatccactataataaaaaaaaaatggacaatcacaagtgttgaagatgatgtggagaaattggaacactcatatgttgctgatgggaatgtaaaatagtgcagtcactctggaagacagtttggcagttcctcaaaaagagttaccatattacccagcaataccaatcctaaatatatgctcaagaaaaatgaaaatatatccacacaaaaatttgtacacaaatgatcttagcaacattattcacaataacaccaaagtggaagcaacctaaatatccatcattgatgaatgaataaacaaaatgtatatccatgtaatggaatgttatttgggagcaaaaagatttgaatgaagtattatactactgatgccacagcatgtatgaaccttgaaaacaggaagaaagcaaaaaaaaaaaaaatcacatattgtatgactccatttacatgaatggcccagaattgacaaatctgtagagatagaaaactagactggtagttgttagggattggcggcggaaaggttggggtgggaaatggggtggggaatagaaggaaaggcgaggtgaagactaaaagggagggggtttccttttgaggagaaaaaatgttctaaaattgattgtgatggtggcacaactctgaatataacaactaaaaaacaa

SEQ ID NO: 62825 - DNA, 387 bp, Homo sapiens
agacaagcccgccatgttagccaggctggtctcaaactcctggcctcaagtgatccgtgtgaggcaggtgtgaggcaccgtgcccggccgtgaggaggagttctaatttgcacaaatacatcctatgggctagtttgaactcatgctgttctctaccagctacagactcttcagcccttaaacccagtgctcctgccccttagagcaccccaccctgacttgatccccaccccactgcagggagggagcagagcagctcatctggggaccccagtgggacagtgaggggcagcaaaggaaagagcctgctgggggtcagtgaggcaggcagggttcacatcctggcctgtgactgagcctttctaggggagcctcagtgctttcctc

SEQ ID NO: 62826 - DNA, 295 bp, Homo sapiens
ccccttcaagcagaaaaatctatctgctgaacaataaagaccacataagagaaaatggagtgtgggccctccctactggtttatgcctcagatagaggtccctggtggtaggggcctagatagagagacagtgtaatagaattgcattaacacagtgtccaagagtgcagaatccacaaatggttgatgggcaggcctctcctggtctttgtctccaccctgtctggctcacaactctacatttctatggttgcttcgctccaattaaacttcaagctcagcttccatcctatgc

SEQ ID NO: 62827 - DNA, 630 bp, Homo sapiens
aggctggtctcgaactcctgaccgcaagtgatctgcccgcctcagcctcccaaagtgctgggattccaggcgtgagccatcgcgcctgacaaaattttttaagttattctggatgccagtttgagcctgatgcttaacaggatggaatatttggaggtcttgagaagagggtgattgtatattccatgtaagaggaatgtaaatagtttgtgtctagaaggaagattgtaacagattaagatgtacgaattccttctcacctattgagagaaacggggtctatttcttttccttttgaatctatatgggttttgtgatttcaccaatgaatagaatacctctgccagtttttgggcctaggacttaagaaactggcagcttctacttcctgttttttaacgcatccactcttggaacccaaatgacaatctgcgaagaagactaaggggccccacggagaggcccacatggagaaaactcaatcccccctcacccgctatcccaggctgtcagccagcaccaccttgtcttgccagccatgtgagtgagccatgttggaagtgaatcctccaggcccggtgagccatttaaactgactgaagacagcagctctgtccatgtgcacagaga

SEQ ID NO: 62828 - DNA, 2083 bp, Homo sapiens
gcgccgtcccgcgccagggctcgctccgagagccgcttccttctcgccgcggccggcgcgggccccccggccatgcgcccccgagccccagcctgcgccgccgcggcgctcgggctctgcagccttctgctgctgctcgcgcccgggcacgcgtgccccgcgggctgcgcctgcaccgacccgcacaccgtggactgccgcgaccgcgggctgcccagcgtgccagaccctttccccctggacgtgcgcaagctgctggtggccggcaaccgcatccagcggatccccgaggacttcttcatcttctacggcgacctggtctacctggacttcaggaacaactcgctgcgctcgctggaggagggcacgttcagcggctcggccaagctcgtgttcctcgacctcagctacaacaacttgacccagctgggcgccggcgccttccgctcggccgggaggctggtgaagcttagcctggctaacaacaacctggtgggcgtgcacgaggacgccttcgagaccctggagtcgctgcaggtgctggagctcaacgacaacaacctgcgcagcctcagcgtggccgccctggccgcgctgcccgcgctgcgctccctgcgtctggacgggaacccctggctgtgcgactgtgacttcgcccacctcttctcctggatccaggagaacgcatccaaactgcccaaaggccttgatgaaatccagtgctccctgcccatggagagcaggaggatatccctgcgtgagctgtcggaggccagcttcagcgagtgtaggttcagcctgtcactcacagacctctgcatcatcattttctccggtgtggccgtgtccattgcggccatcatctccagcttcttcctggccactgtggtgcagtgcctccagaggtgcgcacccaacaaagatgcggaggatgaagacgaggacaaggatgactgagccacctcctccctcctgcctcttactctccagcaccgaaccagaagctctctccaagacgagagggaaatgctgaaaatggaaaagcactggccaccatctgtgaactgaacagagcctgttccgtgtcttggcccctgggtacacctgctgggaccactgatctcagagtttagaatcagcagagcacagaagcccaggaaggatggagggaattattcctggagcataacctgcctctcagatcgaggtgtgtgttgggggagaagatgaccgagtcaggcttcatagctgatgactaaaagcctcccccaggaaatgtgaagactggcagctttcaatggcaaagatgattttacgccattctttttctgacctgtactgggagatcatgaaacatctgccttcctcccaagaaacagcagctcaaacagtggagattcaaattcggatcattcaccacaagaacgagaactttgatccttatataataggcctcagcaaccttgggatgttatactgggaactaataaactcgtgtgcaatagactcaatgtttatgttcccccagattttatatgttgaaacctaatccccaatgtgatggtatttggaggtggggcttttgggaggtgattaggtttagatcatatcatgaggatggggcccaaatgatgggattagtgccctcatgaaaggtggccccagagagctccttcaccccttcaatgcttgaggatgcagcaagaaatcagctgcccatgaaccgagaagcaggccctcaccagaacccagccatgctggcacccagatctcagacttccagcctccagaactgggagaaataaataaatgtctgttgtttgtaagccactcaatctctggtattctgttatagtggtcgaaatggacccatgaagaagctaacaactggtcagagggtgtctgttgttaattttggtaagctggttgggaaaactttgacttgacataactcaaaccctgatctttatcctaagcggtagcgacttgtagaggaaggattagttgctttgtacagttgtgatggtctctctgctcagcatcatttttccttctgaaggacagacaggttgttcccctccat

SEQ ID NO: 62829 - DNA, 563 bp, Homo sapiens
ttgtgttgggcttatttcatgtagcatataatgctttcagtttcaccaatattgtggcaaatgtcagaactctttcccgtctcattgttgaataatattccatcctatgtgatgccacatcttctttatccattcatttgcttgtggacacttgggtggtttccatcttttagctattgtaagtaatgctgcaatgaacattggcatgtaagtatctgctttagtacctgctttcagttcatcgtatatatacctagaagtggagttgctgataattctatattataatatcatagaataattctatgtttgatagctatgacaagtctatgtttaactttttaaggaaacaccaaactgttttccacaatggctgtctcattttagtgtctccagcagcaatgcccaacggttctaatttctccacatcctcattgacacttgccattttctgtttttttcatagtagtcatcctaatggttgtgaagtgctatctcattgtgggtttgaattgcattttcctaagtatggaggatgttgagtacctttgcatgtgctcatt

SEQ ID NO: 62830 - DNA, 1205 bp, Homo sapiens
gagaccatatggactgcaaagcctaaaatgtgtatctggacccttacagtaaaacaatgaccctgggttttcatggcaccccaatgcctttttggtgacttgcaggaatacagattcctatattccagtttgtttttttttttttctccttagcttaaggttcgtattcccatttgcttctgagaaagttaggaaaattttgttttatgttgcagatgctctcacaacaataattgtgctggagatagatacaacttagtgaaattttcctacagaactaaaaacgcaaaattgcatcactcctgaagaaaagaaatttagagtatgaattgagttggttgagagtagaattaaaaagatttctagcactttgagcatgttttagaaatttgatccttacatttaaaattatgtaaatgacatctttcactggcatttgctcacatttaagtcaatctacagctgttacttactaagctaagaaataagaagatccctatggttctgaatctctcataatattctgaagtaatttatatcaattgaattttcattaatcattttaggaaatattatgttttattttgtggcattatatgacaatgactttctcaacaatagctcagggaatacgcaaacagccagctcttttatgtaagaaagccattttctaatccccacgctttcctgagtgttacgtattttatttctttgaaaagagagggccttgagtaaatgctttcgtttgctttccttacatatttagaaatccaagaagggcccttgtcttagtctatttctgtcacagagaaattgttcattccaaaatatccaccttaagggaagctagtgaccgagatatggagaaaaacataggcattcatgacctttgtgtttccgtttgactttcaacatctgtaaccaaaaggtcacaaatgaaatatttagtagaaagtgcaatatcaatttattaggagtacctaaaattataactctaaataatatacagcaatattattgctctattattacagcaatcaataatataatatagccactaggatacactcgctgtagaactcagaacaaaagatatcaatcttctgccagtccgcatcattatgtgtagcagagactttactggaatgagtgaggggaaagataacaaaatgtagattaggattccacattctcccctgcccatc

SEQ ID NO: 62831 - DNA, 135 bp, Homo sapiens
gtgccatcagcaagaggatctgttctctcagcccagcaagatcgtaaaagcccaggccaagagaccccgggaccccggaacaccagtgcccggcacagtaaggactcagccttcatggtaacgctgcagtctcag

SEQ ID NO: 62832 - DNA, 410 bp, Homo sapiens
tggcctgctcagagaacagagatgacttacaggggattcaattgtgtaatttcaaatacaagcttagtagaaccccattcctgatacagatgaaaaatgactcttctccaccacagcgtagggatattttcatccgccgtggtaatggcttacctcggcaggtcctacctcttcaggtcctttcagtgtcctcaggcctccctgagtggttgagagctgaatggggctgagagcttcaagttttcatagactgattcctctgctcaccttcacccgctgcatctcccaccagcaggttgctgttcagcctatatgtgtttccttgatgattagagggttagggtctcctccactgtagagaaaatgcaaatggtttctactaggtgtcttagaactgactgctgaagaaa

SEQ ID NO: 62833 - DNA, 243 bp, Homo sapiens
aagccaactctccccgctgcacagagggtcccctcaccctcgccaccctgacagggtgagccactgcacctggtcaaatgtatttgtttctataaagacctacagtcaacataaatcttatgactgagtgctatttctcccacaatgcctgacacatgacagggacgctggcgacagactcaaaaggccacatcctgtatgatgcatttatcttttttaaaacattaaactttttttaaactt

SEQ ID NO: 62834 - DNA, 418 bp, Homo sapiens
tctctacgcatgccggtggcaccctccctccccgacccaagtagcgacaatcataaccatccccaaacattgccaaatgtcccttgggggcaaaatctccttgggctgagaaccactgcacatggggctgacagatgaatggcatcttagcattgatttgtttttgcaaaccacctgtgtgatctcaggcaactcatgtaacctgaagtaagaacccacagaacctggatctcagtttctgcaccttcctaatgcacacggtgtgctctgcaaattaaattaagtgaattaaatgggaaggcattcaaaaaatgtaaattcctctctcatactgggagctgtagttctgtaggaggagcatagaaggtttaaaacatgctaaaccttgtccacgttccccttcctcagtctctgtgga

SEQ ID NO: 62835 - DNA, 394 bp, Homo sapiens
ttttttaagcactcttgtgtggactggtcaaagatgttcctaaaacaacattgctgtcaccaagcctcccatgaattaggctggctcctcccatgtggatatctgcttctgcatagttggtgaagaggaagcatcctcagtcaaagctaccagctgaggaacccttaggaaaccccgctggtacctggcctgtcttttgtaagtatacatcaggccagggggctgcttgccaagcaacatcattgactgcatactgtttagtgcatgcattaccaggcctcaaacatccaagtgatgctacctgaataagtcgagaatttttgataataaacataagccaaatcaaaaaaatgttctggatttttcatcatttccactcattagtccaagaaaa

SEQ ID NO: 62836 - DNA, 284 bp, Homo sapiens
agaactgaaaagtgcagtagccgaaataaaaaccactggctaggctcaacagcagaatggaggtaataaagtcaataaacttgaagatagttcaaaagaaattagctaatatgaatagcagcgaaaaaaagatggaaaatcaaaaagaacatagcctctgggaatgtagaacaagaaaagatttaacatttgtgtcatcagggtttcagaaggagaagagatagtataggactcaaaaaagatttgaagaaataatggctgaaaacttacaaattttgtgaaag

SEQ ID NO: 62837 - DNA, 545 bp, Homo sapiens
gacatgaaactgtggaaataagtgaactcctaaaactttcaccacgggatgctctgagaagacattttcccatctctatattcccaaatgttaccctgacccactccaatttaacgagaagtctctccatttcataaagacccatcctctcccttcttttctgtcacttcctttaacatcctcttccctcatggatgctgggaactctcttatttgaccatgtcccatttctttcttccataatcagctcctgatcccccacttccgctacaccatggcgatcaacacgctggcccagagtagtcttgtctccgaatggggaatttttgacctggtatggaaatggatgggtgaaggggaggatggttcaatattggaagaatcctaggggttgtttccctttcccattcctcccccaagctctccttcctccatggaaggcctctcccaaacctgcctcatgcctgaagagcttcctgcttaaaagggctagagtaggatcataggcctggagtttcctgatactcatctccctccctctgcaa

SEQ ID NO: 62838 - DNA, 1394 bp, Homo sapiens
gacatgaaactgtggaaataagtgaactcctaaaactttcaccacgggatgctctgagaagacattttcccatctctatattcccaaatgttaccctgacccactccaatttaacgagaagtctctccatttcataaagacccatcctctcccttcttttctgtcacttcctttaacatcctcttccctcatggatgctgggaactctcttatttgaccatgtcccatttctttcttccataatcagctcctgatcccccacttccgctacaccatggcgatcaacacgctggcccagagtagtcttgtctccgaatggggaatttttgacctggtggtgagcactggtagtggaagccacgtggacattcttcagagagccatggcttgtttgacctatcattccctctgtcctcctgatgacctggctgaccgtgggctcctggatgtgaaatcttctttttatggctaagatgccatcaggctgtggggaatcatcagccgggaataggtacgtggaggggatggttgggcttttctacaatagtgaccaagccatgaaggatgatctagagctgcaggcctggtgcagagagatgactgagactggactgcagagggcccaagaccaggggttcctcatctccttagagtcccgggctcagctctgccactttgtcaccatgtgcatcttcacatgcacaggtcagcatgcttctaaccacctgggccagctggactggtactcctggatccctaatggcccatgcaccatgcagaagcccccgcccatctctaaggatgtgacagagaaggatatagtggacttactgcccaatctccaccaggcacgtatgcaaaagaccttcacaaagttccttggcagacgccagcctgtcatgcatgaggagaaatatttctctggtcctgagccccaagctgtgctgagacaattccaggaggaactggcttccatggacaaggagattgaggtccggaatgcagtcctggacctgccctgtgagtacctttgacccagcatggtagagaacagcgtgaccatctgagaggccttgcccgcctcagctccaaagctccaccatccctgagtgcctttgagtattccgtcctcctcacatcctctggtgaacaaattgtccccaaagctttgtggtcagggtatccagagctgctcaccacacaactatggggaatacacagtgatggtccccattgcatttggaagtggcatcccccaaagctgccctaccttaaatgtccatccagtcctgcacttcctcaccccgatccctgcacacctcctcattgccaaaggacctggcttagatacaagtaaaaatatatgattaaataacaaaacggaaaatatgtgt

SEQ ID NO: 62839 - DNA, 1340 bp, Homo sapiens
gacatgaaactgtggaaataagtgaactcctaaaactttcaccacgggatgctctgagaagacattttcccatctctatattcccaaatgttaccctgacccactccaatttaacgagaagtctctccatttcataaagacccatcctctcccttcttttctgtcacttcctttaacatcctcttccctcatggatgctgggaactctcttatttgaccatgtcccatttctttcttccataatcagctcctgatcccccacttccgctacaccatggcgatcaacacgctggcccagagtagtcttgtctccgaatggggaatttttgacctggtggtgagcactggtagtggaagccacgtggacattcttcagagagccatggcttgtttgacctatcattccctctgtcctcctgatgacctggctgaccgtgggctcctggatgtgaaatcttctttttatggctaagatgccatcaggctgtggggaatcatcagccgggaataggtacgtggaggggatggttgggcttttctacaatagtgaccaagccatgaaggatgatctagagctgcaggcctggtgcagagagatgactgagactggactgcagagggcccaagaccaggggttcctcatctccttagagtcccgggctcagctctgccactttgtcaccatgtgcatcttcacatgcacaggtcagcatgcttctaaccacctgggccagctggactggtactcctggatccctaatggcccatgcaccatgcagaagcccccgcccatctctaaggatgtgacagagaaggatatagtggacttactgcccaatctccaccagcatgaggagaaatatttctctggtcctgagccccaagctgtgctgagacaattccaggaggaactggcttccatggacaaggagattgaggtccggaatgcagtcctggacctgccctgtgagtacctttgacccagcatggtagagaacagcgtgaccatctgagaggccttgcccgcctcagctccaaagctccaccatccctgagtgcctttgagtattccgtcctcctcacatcctctggtgaacaaattgtccccaaagctttgtggtcagggtatccagagctgctcaccacacaactatggggaatacacagtgatggtccccattgcatttggaagtggcatcccccaaagctgccctaccttaaatgtccatccagtcctgcacttcctcaccccgatccctgcacacctcctcattgccaaaggacctggcttagatacaagtaaaaatatatgattaaataacaaaacggaaaatatgtgt

SEQ ID NO: 62840 - DNA, 1339 bp, Homo sapiens
  misc_feature (272)..(272): n is a, c, g, or t
  misc_feature (822)..(822): n is a, c, g, or t
atgggcaagtacacggtccgcgtagccaccggggatttgctcctggcgggctctcccaacctggtgcagctatggctggtgggcgagcacggggaggcagacctagggaagcagctgccaccggtgtggggaaaggaggcagagtttgagatcgacgtccccctgcacctggggcgcctcctgatggtgaagctgcgcaaacacaacgtgctgttgagtctcgactggttctgcaagtggatctcagtgcagggcccggggacccaaggcgnggcctttttcccctgctaccgctgggtgcagggccacggaattatctgcctgcctgagggtactggtggggctcctggaaagatgggttaatcctgcctatagcagggaataggcaaccggaccttcctagggacgagcgattcctcgaggataaggatttagactttaatgtctccctagcaaaagggttgaaggacttggccattaaggggacactggatttcataaattgtgtgaaaaggctggaagatttcaaaaaaatattcccacatggaaagactgtcctggctgagcgggtttatgattcttggaagaatgatgccttctttgggtaccagtttctcaatggtgcaaaccccatgctcctgaggtgttcttcaaggctcccagcctgcctggtgctgcctccagggatggaagacttgaagacccagctggagaaagaactccaggctggatctctgtttgaagtggatttctccttgctggatggagtcaagcctaatgtcatcatttttaagcagcaatgcgtggcagcccctttggtcntgctgaagcttcagcctgatggaggactcttacccatggtcatccagctccagccaccttgacacggatgtcccccacctctgctctttctgccctcgcatccccccatggcctggctcctggccaagacctgggtccggagctctgatttccagctgcagcagttacagtcacatctgctgaggggacacttgattgctgaggttattgctgtggctacaatgagaagcttgcctagcctccatcctatctacaagactgagagaagggagcagagtgagaaaagaaacaagagaaggaacctcattgaggtaggaggaaaatcaaaaagtgcaatccatggcagccaggaaaagaaagcgtttcaagagggacgcgtgattatctgtctcaagtgctgctgagagatcaagaaagttacagagaagtgacatttggatttctcaatatggaagtcattggttaataaatggacatgcgccatctcagggaagtggaggaagcctgattcatgggg

SEQ ID NO: 62841 - DNA, 424 bp, Homo sapiens
ttccctttcccattcctcccccaagctctccttcctccatggaaggcctctcccaaacctgcctcatgcctgaagagcttcctgcttaaaagggctagagtaggatcataggcctggagtttcctgatactcatctccctccctctgcaacttggcatggctgtgggttatcctcaggtggtgagcactggtagtggaagccacgtggacattcttcagagagccatggcttgtttgacctatcattccctctgtcctcctgatgacctggctgaccgtgggctcctggatgtgaaatcttctttttatggctaagatgccatcaggctgtggggaatcatcagccggtaggtgaaggtggcacagagaggcaatgaacggaggggcgggggactgtaggtccagaaggtcctgcattggcccc

SEQ ID NO: 62842 - DNA, 431 bp, Homo sapiens
ctggatgtgaaatcttctttttatggctaagatgccatcaggctgtggggaatcatcagccggtaggtgaaggtggcacagagaggcaatgaacggaggggcgggggactgtaggtccagaaggtcctgcattggcccctgagactgagtgtcttcttcccagggaataggtacgtggaggggatggttgggcttttctacaatagtgaccaagccatgaaggatgatctagagctgcaggcctggtgcagagagatgactgagactggactgcagagggcccaagaccaggggtgagacatggatccttccccactgaaccctgtcaacacccactcctctgcaaacaatctgcttcttctcacatcatcatgagacaccccacctgcccaaggaagctgagaattctccagagtgtgtccagaaatgct

SEQ ID NO: 62843 - DNA, 401 bp, Homo sapiens
ggagattgaggtccggaatgcagtcctggacctgccctgtgagtacctttgacccagcatggtagagaacagcgtgaccatctgagaggccttgcccgcctcagctccaaagctccaccatccctgagtgcctttgagtattccgtcctcctcacatcctctggtgaacaaattgtccccaaagctttgtggtcagggtatccagagctgctcaccacacaactatggggaatacacagtgatggtccccattgcatttggaagtggcatcccccaaagctgccctaccttaaatgtccatccagtcctgcacttcctcaccccgatccctgcacacctcctcattgccaaaggacctggcttagatacaagtaaaaatatatgattaaataacaaaacgg

SEQ ID NO: 62844 - DNA, 2226 bp, Homo sapiens
  misc_feature (272)..(272): n is a, c, g, or t
  misc_feature (822)..(822): n is a, c, g, or t
atgggcaagtacacggtccgcgtagccaccggggatttgctcctggcgggctctcccaacctggtgcagctatggctggtgggcgagcacggggaggcagacctagggaagcagctgccaccggtgtggggaaaggaggcagagtttgagatcgacgtccccctgcacctggggcgcctcctgatggtgaagctgcgcaaacacaacgtgctgttgagtctcgactggttctgcaagtggatctcagtgcagggcccggggacccaaggcgnggcctttttcccctgctaccgctgggtgcagggccacggaattatctgcctgcctgagggtactggtggggctcctggaaagatgggttaatcctgcctatagcagggaataggcaaccggaccttcctagggacgagcgattcctcgaggataaggatttagactttaatgtctccctagcaaaagggttgaaggacttggccattaaggggacactggatttcataaattgtgtgaaaaggctggaagatttcaaaaaaatattcccacatggaaagactgtcctggctgagcgggtttatgattcttggaagaatgatgccttctttgggtaccagtttctcaatggtgcaaaccccatgctcctgaggtgttcttcaaggctcccagcctgcctggtgctgcctccagggatggaagacttgaagacccagctggagaaagaactccaggctggatctctgtttgaagtggatttctccttgctggatggagtcaagcctaatgtcatcatttttaagcagcaatgcgtggcagcccctttggtcntgctgaagcttcagcctgatggaggactcttacccatggtcatccagctccagccaccttgacacggatgtcccccacctctgctctttctgccctcgcatccccccatggcctggctcctggccaagacctgggtccggagctctgatttccagctgcagcagttacagtcacatctgctgaggggacacttgattgctgaggttattgctgtggctacaatgagaagcttgcctagcctccatcctatctacaagctcctgatcccccacttccgctacaccatggcgatcaacacgctggcccagagtagtcttgtctccgaatggggaatttttgacctggtggtgagcactggtagtggaagccacgtggacattcttcagagagccatggcttgtttgacctatcattccctctgtcctcctgatgacctggctgaccgtgggctcctggatgtgaaatcttctttttatggctaagatgccatcaggctgtggggaatcatcagccgggaataggtacgtggaggggatggttgggcttttctacaatagtgaccaagccatgaaggatgatctagagctgcaggcctggtgcagagagatgactgagactggactgcagagggcccaagaccaggggttcctcatctccttagagtcccgggctcagctctgccactttgtcaccatgtgcatcttcacatgcacaggtcagcatgcttctaaccacctgggccagctggactggtactcctggatccctaatggcccatgcaccatgcagaagcccccgcccatctctaaggatgtgacagagaaggatatagtggacttactgcccaatctccaccaggcacgtatgcaaaagaccttcacaaagttccttggcagacgccagcctgtcatgcatgaggagaaatatttctctggtcctgagccccaagctgtgctgagacaattccaggaggaactggcttccatggacaaggagattgaggtccggaatgcagtcctggacctgccctgtgagtacctttgacccagcatggtagagaacagcgtgaccatctgagaggccttgcccgcctcagctccaaagctccaccatccctgagtgcctttgagtattccgtcctcctcacatcctctggtgaacaaattgtccccaaagctttgtggtcagggtatccagagctgctcaccacacaactatggggaatacacagtgatggtccccattgcatttggaagtggcatcccccaaagctgccctaccttaaatgtccatccagtcctgcacttcctcaccccgatccctgcacacctcctcattgccaaaggacctggcttagatacaagtaaaaatatatgattaaataacaaaacggaaaatatgtgt

SEQ ID NO: 62845 - DNA, 1485 bp, Homo sapiens
gacatgaaactgtggaaataagtgaactcctaaaactttcaccacgggatgctctgagaagacattttcccatctctatattcccaaatgttaccctgacccactccaatttaacgagaagtctctccatttcataaagacccatcctctcccttcttttctgtcacttcctttaacatcctcttccctcatggatgctgggaactctcttatttgaccatgtcccatttctttcttccataatcagctcctgatcccccacttccgctacaccatggcgatcaacacgctggcccagagtagtcttgtctccgaatggggaatttttgacctggtggtgagcactggtagtggaagccacgtggacattcttcagagagccatggcttgtttgacctatcattccctctgtcctcctgatgacctggctgaccgtgggctcctggatgtgaaatcttctttttatggctaagatgccatcaggctgtggggaatcatcagccgggaataggtacgtggaggggatggttgggcttttctacaatagtgaccaagccatgaaggatgatctagagctgcaggcctggtgcagagagatgactgagactggactgcagagggcccaagaccaggggttcctcatctccttagagtcccgggctcagctctgccactttgtcaccatgtgcatcttcacatgcacaggtcagcatgcttctaaccacctgggccagctggactggtactcctggatccctaatggcccatgcaccatgcagaagcccccgcccatctctaaggatgtgacagagaaggatatagtggacttactgcccaatctccaccaggcacgtatgcaaaagaccttcacaaagttccttggcagacgccagcctgtcatgcatgaggagaaatatttctctggtcctgagccccaagctgtgctgagacaattccaggaggaactggcttccatggacaaggagattgaggtccggaatgcagtcctggacctgccctttttccaccaatatatacatccctaaacaacatgacttagttttgaaacactgagcagcaagcaccaatctagaagaataaggaaagggtgatgttaccactgtttgaggaaggctcaggaggagaagataaactgaacagcctctcggtcattgtctggcttcagcttccctaagcatttataagagctttttatgggaaaatcattgagtaagatgatgagtaacactgggaatcactgggctcagcacaggtgagacatacggtaacgctggagaatgggccgagttttagatgtttggccaggatatagtcagaaggagatggctgttgtgtatattctgctcatcacgacttctcctccacttcccagaagaggtcaaggcagaacatttctggatgacacccacagtagatcaagcatcagagcactcgaggaatgagcaggaactttatcagcatgtg

SEQ ID NO: 62846 - DNA, 1442 bp, Homo sapiens
tcgggtcggacccacgcgcagcggccggagatgcagcggggcgccgcgctgtgcctgcgactgtggctctgcctgggactcctggacggcctggtgagtggctactccatgacccccccgaccttgaacatcacggaggagtcacacgtcatcgacaccggtgacagcctgtccatctcctgcaggggacagcaccccctcgagtgggcttggccaggagctcaggaggcgccagccaccggagacaaggacagcgaggacacgggggtggtgcgagactgcgagggcacagacgccaggccctactgcaaggtgttgctgctgcacgaggtacatgccaacgacacaggcagctacgtctgctactacaagtacatcaaggcacgcatcgagggcaccacggccgccagctcctacgtgttcgtgagagactttgagcagccattcatcaacaagcctgacacgctcttggtcaacaggaaggacgccatgtgggtgccctgtctggtgtccatccccggcctcaatgtcacgctgcgctcgcaaagctcggtgctgtggccagacgggcaggaggtggtgtgggatgaccggcggggcatgctcgtgtccacgccactgctgcacgatgccctgtacctgcagtgcgagaccacctggggagaccaggacttcctttccaaccccttcctggtgcacatcacaggcaacgagctctatgacatccagctgttgcccaggaagtcgctggagctgctggtaggggagaagctggtcctgaactgcaccgtgtgggctgagtttaactcaggtgtcacctttgactgggactacccagggaagcaggcagagcggggtaagtgggtgcccgagcgacgctcccagcagacccacacagaactctccagcatcctgaccatccacaacgtcagccagcacgacctgggctcgtatgtgtgcaaggccaacaacggcatccagcgatttcgggagagcaccgaggtcattgtgcatgaaaatcccttcatcagcgtcgagtggctcaaaggacccatcctggaggccacggcaggagacgagctggtgaagctgcccgtgaagctggcagcgtaccccccgcccgagttccagtggtacaaggatggaaaggcactgtccgggcgccacagtccacatgccctggtgctcaaggaggtgacagaggccagcacaggcacctacaccctcgccctgtggaactccgctgctggcctgaggcgcaacatcagcctggagctggtggtgaatgtgcccccccagatacatgagaaggaggcctcctcccccagcatctactcgcgtcacagccgccaggccctcacctgcacggcctacggggtgcccccatgtgatttagtattttcaactccacagaaccctccaaccatttaacacccacccct

SEQ ID NO: 62847 - DNA, 4459 bp, Homo sapiens
tcgggtcggacccacgcgcagcggccggagatgcagcggggcgccgcgctgtgcctgcgactgtggctctgcctgggactcctggacggcctggtgagtggctactccatgacccccccgaccttgaacatcacggaggagtcacacgtcatcgacaccggtgacagcctgtccatctcctgcaggggacagcaccccctcgagtgggcttggccaggagctcaggaggcgccagccaccggagacaaggacagcgaggacacgggggtggtgcgagactgcgagggcacagacgccaggccctactgcaaggtgttgctgctgcacgaggtacatgccaacgacacaggcagctacgtctgctactacaagtacatcaaggcacgcatcgagggcaccacggccgccagctcctacgtgttcgtgagagactttgagcagccattcatcaacaagcctgacacgctcttggtcaacaggaaggacgccatgtgggtgccctgtctggtgtccatccccggcctcaatgtcacgctgcgctcgcaaagctcggtgctgtggccagacgggcaggaggtggtgtgggatgaccggcggggcatgctcgtgtccacgccactgctgcacgatgccctgtacctgcagtgcgagaccacctggggagaccaggacttcctttccaaccccttcctggtgcacatcacaggcaacgagctctatgacatccagctgttgcccaggaagtcgctggagctgctggtaggggagaagctggtcctgaactgcaccgtgtgggctgagtttaactcaggtgtcacctttgactgggactacccagggaagcaggcagagcggggtaagtgggtgcccgagcgacgctcccagcagacccacacagaactctccagcatcctgaccatccacaacgtcagccagcacgacctgggctcgtatgtgtgcaaggccaacaacggcatccagcgatttcgggagagcaccgaggtcattgtgcatgaaaatcccttcatcagcgtcgagtggctcaaaggacccatcctggaggccacggcaggagacgagctggtgaagctgcccgtgaagctggcagcgtaccccccgcccgagttccagtggtacaaggatggaaaggcactgtccgggcgccacagtccacatgccctggtgctcaaggaggtgacagaggccagcacaggcacctacaccctcgccctgtggaactccgctgctggcctgaggcgcaacatcagcctggagctggtggtgaatgtgcccccccagatacatgagaaggaggcctcctcccccagcatctactcgcgtcacagccgccaggccctcacctgcacggcctacggggtgcccctgcctctcagcatccagtggcactggcggccctggacaccctgcaagatgtttgcccagcgtagtctccggcggcggcagcagcaagacctcatgccacagtgccgtgactggagggcggtgaccacgcaggatgccgtgaaccccatcgagagcctggacacctggaccgagtttgtggagggaaagaataagactgtgagcaagctggtgatccagaatgccaacgtgtctgccatgtacaagtgtgtggtctccaacaaggtgggccaggatgagcggctcatctacttctatgtgaccaccatccccgacggcttcaccatcgaatccaagccatccgaggagctactagagggccagccggtgctcctgagctgccaagccgacagctacaagtacgagcatctgcgctggtaccgcctcaacctgtccacgctgcacgatgcgcacgggaacccgcttctgctcgactgcaagaacgtgcatctgttcgccacccctctggccgccagcctggaggaggtggcacctggggcgcgccacgccacgctcagcctgagtatcccccgcgtcgcgcccgagcacgagggccactatgtgtgcgaagtgcaagaccggcgcagccatgacaagcactgccacaagaagtacctgtcggtgcaggccctggaagcccctcggctcacgcagaacttgaccgacctcctggtgaacgtgagcgactcgctggagatgcagtgcttggtggccggagcgcacgcgcccagcatcgtgtggtacaaagacgagaggctgctggaggaaaagtctggagtcgacttggcggactccaaccagaagctgagcatccagcgcgtgcgcgaggaggatgcgggacgctatctgtgcagcgtgtgcaacgccaagggctgcgtcaactcctccgccagcgtggccgtggaaggctccgaggataagggcagcatggagatcgtgatccttgtcggtaccggcgtcatcgctgtcttcttctgggtcctcctcctcctcatcttctgtaacatgaggaggccggcccacgcagacatcaagacgggctacctgtccatcatcatggaccccggggaggtgcctctggaggagcaatgcgaatacctgtcctacgatgccagccagtgggaattcccccgagagcggctgcacctggggagagtgctcggctacggcgccttcgggaaggtggtggaagcctccgctttcggcatccacaagggcagcagctgtgacaccgtggccgtgaaaatgctgaaagagggcgccacggccagcgagcagcgcgcgctgatgtcggagctcaagatcctcattcacatcggcaaccacctcaacgtggtcaacctcctcggggcgtgcaccaagccgcagggccccctcatggtgatcgtggagttctgcaagtacggcaacctctccaacttcctgcgcgccaagcgggacgccttcagcccctgcgcggagaagtctcccgagcagcgcggacgcttccgcgccatggtggagctcgccaggctggatcggaggcggccggggagcagcgacagggtcctcttcgcgcggttctcgaagaccgagggcggagcgaggcgggcttctccagaccaagaagctgaggacctgtggctgagcccgctgaccatggaagatcttgtctgctacagcttccaggtggccagagggatggagttcctggcttcccgaaagtgcatccacagagacctggctgctcggaacattctgctgtcggaaagcgacgtggtgaagatctgtgactttggccttgcccgggacatctacaaagaccccgactacgtccgcaagggcagtgcccggctgcccctgaagtggatggcccctgaaagcatcttcgacaaggtgtacaccacgcagagtgacgtgtggtcctttggggtgcttctctgggagatcttctctctgggggcctccccgtaccctggggtgcagatcaatgaggagttctgccagcggctgagagacggcacaaggatgagggccccggagctggccactcccgccatacgccgcatcatgctgaactgctggtccggagaccccaaggcgagacctgcattctcggagctggtggagatcctgggggacctgctccagggcaggggcctgcaagaggaagaggaggtctgcatggccccgcgcagctctcagagctcagaagagggcagcttctcgcaggtgtccaccatggccctacacatcgcccaggctgacgctgaggacagcccgccaagcctgcagcgccacagcctggccgccaggtattacaactgggtgtcctttcccgggtgcctggccagaggggctgagacccgtggttcctccaggatgaagacatttgaggaattccccatgaccccaacgacctacaaaggctctgtggacaaccagacagacagtgggatggtgctggcctcggaggagtttgagcagatagagagcaggcatagacaagaaagcggcttcaggtagctgaagcagagagagagaaggcagcatacgtcagcattttcttctctgcacttataagaaagatcaaagactttaagactttcgctatttcttctactgctatctactacaaacttcaaagaggaaccaggaggacaagaggagcatgaaagtggacaaggagtgtgaccactgaagcaccacagggaggggttaggcctccggatgactgcgggcaggcctggataatatccagcctcccacaagaagctggtggagcagagtgttccctgactcctccaaggaaagggagacgccctttcatggtctgctgagtaacaggtgccttcccagacactggcgttactgcttgaccaaagagccctcaagcggcccttatgccagcgtgacagagggctcacctcttgccttctaggtcacttctcacaatgtcccttcagcacctgaccctgtgcccgccagttattccttggtaatatgagtaatacatcaaagagtagtattaaaagctaattaatcatgtttataaaaa

SEQ ID NO: 62848 - DNA, 4301 bp, Homo sapiens
tcgggtcggacccacgcgcagcggccggagatgcagcggggcgccgcgctgtgcctgcgactgtggctctgcctgggactcctggacggcctggtgagtggctactccatgacccccccgaccttgaacatcacggaggagtcacacgtcatcgacaccggtgacagcctgtccatctcctgcaggggacagcaccccctcgagtgggcttggccaggagctcaggaggcgccagccaccggagacaaggacagcgaggacacgggggtggtgcgagactgcgagggcacagacgccaggccctactgcaaggtgttgctgctgcacgaggtacatgccaacgacacaggcagctacgtctgctactacaagtacatcaaggcacgcatcgagggcaccacggccgccagctcctacgtgttcgtgagagactttgagcagccattcatcaacaagcctgacacgctcttggtcaacaggaaggacgccatgtgggtgccctgtctggtgtccatccccggcctcaatgtcacgctgcgctcgcaaagctcggtgctgtggccagacgggcaggaggtggtgtgggatgaccggcggggcatgctcgtgtccacgccactgctgcacgatgccctgtacctgcagtgcgagaccacctggggagaccaggacttcctttccaaccccttcctggtgcacatcacaggcaacgagctctatgacatccagctgttgcccaggaagtcgctggagctgctggtaggggagaagctggtcctgaactgcaccgtgtgggctgagtttaactcaggtgtcacctttgactgggactacccagggaagcaggcagagcggggtaagtgggtgcccgagcgacgctcccagcagacccacacagaactctccagcatcctgaccatccacaacgtcagccagcacgacctgggctcgtatgtgtgcaaggccaacaacggcatccagcgatttcgggagagcaccgaggtcattgtgcatgaaaatcccttcatcagcgtcgagtggctcaaaggacccatcctggaggccacggcaggagacgagctggtgaagctgcccgtgaagctggcagcgtaccccccgcccgagttccagtggtacaaggatggaaaggcactgtccgggcgccacagtccacatgccctggtgctcaaggaggtgacagaggccagcacaggcacctacaccctcgccctgtggaactccgctgctggcctgaggcgcaacatcagcctggagctggtggtgaatgtgcccccccagatacatgagaaggaggcctcctcccccagcatctactcgcgtcacagccgccaggccctcacctgcacggcctacggggtgcccctgcctctcagcatccagtggcactggcggccctggacaccctgcaagatgtttgcccagcgtagtctccggcggcggcagcagcaagacctcatgccacagtgccgtgactggagggcggtgaccacgcaggatgccgtgaaccccatcgagagcctggacacctggaccgagtttgtggagggaaagaataagactgtgagcaagctggtgatccagaatgccaacgtgtctgccatgtacaagtgtgtggtctccaacaaggtgggccaggatgagcggctcatctacttctatgtgaccaccatccccgacggcttcaccatcgaatccaagccatccgaggagctactagagggccagccggtgctcctgagctgccaagccgacagctacaagtacgagcatctgcgctggtaccgcctcaacctgtccacgctgcacgatgcgcacgggaacccgcttctgctcgactgcaagaacgtgcatctgttcgccacccctctggccgccagcctggaggaggtggcacctggggcgcgccacgccacgctcagcctgagtatcccccgcgtcgcgcccgagcacgagggccactatgtgtgcgaagtgcaagaccggcgcagccatgacaagcactgccacaagaagtacctgtcggtgcaggccctggaagcccctcggctcacgcagaacttgaccgacctcctggtgaacgtgagcgactcgctggagatgcagtgcttggtggccggagcgcacgcgcccagcatcgtgtggtacaaagacgagaggctgctggaggaaaagtctggagtcgacttggcggactccaaccagaagctgagcatccagcgcgtgcgcgaggaggatgcgggacgctatctgtgcagcgtgtgcaacgccaagggctgcgtcaactcctccgccagcgtggccgtggaaggctccgaggataagggcagcatggagatcgtgatccttgtcggtaccggcgtcatcgctgtcttcttctgggtcctcctcctcctcatcttctgtaacatgaggaggccggcccacgcagacatcaagacgggctacctgtccatcatcatggaccccggggaggtgcctctggaggagcaatgcgaatacctgtcctacgatgccagccagtgggaattcccccgagagcggctgcacctggggagagtgctcggctacggcgccttcgggaaggtggtggaagcctccgctttcggcatccacaagggcagcagctgtgacaccgtggccgtgaaaatgctgaaagagggcgccacggccagcgagcagcgcgcgctgatgtcggagctcaagatcctcattcacatcggcaaccacctcaacgtggtcaacctcctcggggcgtgcaccaagccgcagggccccctcatggtgatcgtggagttctgcaagtacggcaacctctccaacttcctgcgcgccaagcgggacgccttcagcccctgcgcggagaagtctcccgagcagcgcggacgcttccgcgccatggtggagctcgccaggctggatcggaggcggccggggagcagcgacagggtcctcttcgcgcggttctcgaagaccgagggcggagcgaggcgggcttctccagaccaagaagctgaggacctgtggctgagcccgctgaccatggaagatcttgtctgctacagcttccaggtggccagagggatggagttcctggcttcccgaaagtgcatccacagagacctggctgctcggaacattctgctgtcggaaagcgacgtggtgaagatctgtgactttggccttgcccgggacatctacaaagaccccgactacgtccgcaagggcagtgcccggctgcccctgaagtggatggcccctgaaagcatcttcgacaaggtgtacaccacgcagagtgacgtgtggtcctttggggtgcttctctgggagatcttctctctgggggcctccccgtaccctggggtgcagatcaatgaggagttctgccagcggctgagagacggcacaaggatgagggccccggagctggccactcccgccatacgccgcatcatgctgaactgctggtccggagaccccaaggcgagacctgcattctcggagctggtggagatcctgggggacctgctccagggcaggggcctgcaagaggaagaggaggtctgcatggccccgcgcagctctcagagctcagaagagggcagcttctcgcaggtgtccaccatggccctacacatcgcccaggctgacgctgaggacagcccgccaagcctgcagcgccacagcctggccgccaggtattacaactgggtgtcctttcccgggtgcctggccagaggggctgagacccgtggttcctccaggatgaagacatttgaggaattccccatgaccccaacgacctacaaaggctctgtggtacttcacatgaagggtgggggctgcgctctcggctcagggctggggccgcctcaggggaggcagcgtcaggaattcgtaaggcaaatggcagaacccaacgactgtcctttgaaagtgcaagtccagggtgagccttgggcacatttgggccctcctgcgatgccacgactcacagctgctttctgtcctatgccctcgtcacccccacacgaggcctcccctcctcagcagcgcagaaaccccagtggaaggacggctcctcctcggtggcaggttcgggggtcccgggcctggtcagtgagcgctgggcagaggggccccatgggagcccttggccagaccacagggacctgggttcctgcctccagggccacttggagatgttgggggactctgaaaagatcgcagtttccctcccgtgtaattcaaaataaaaaccacaccaagccacagtcgaagga

SEQ ID NO: 62849 - DNA, 1383 bp, Homo sapiens
ggtgggaggggacatggggccacgggcctctgttcttcaaggctctgttcttcaagggacctttaagaggtgattagaccctctggatctgtcggttctggcacttgctctgtaattcaaccacctctccagcatccttcaaatacgcctctttccatgggagcagattttgttggcttttggccactggcccttaagtcctgattagtatctaccccttgagtcctcagggtgctcaggacagaggaagtcaccagaacaggcaataagaaagagtggagaggatctctgttaccttaagaccccagtgagcctcctccctgcttcccagtcacagactctggacagaaaccctgccccccgcccctggcaagatgccagctcccttcctggtcctgatgtcacaggtccctggacatgacctccccaccagggcaggaccccagctcccttcctggttgtgatgtcacaggtcctgacattccacagtgtcctggagaccaaggatgggaaactgtcaaccttcagaacatccttctccctcagctggagggagcatggcagtgagccaaggagacgggaccctctgctttgtcctcctgctgtgctgttggcaagaaactgagctccggccgagaaccgtgattccaggtctcgaggttcccaaagttcctggatctgccagcaaatgaccttcttcactcacctgtgggatggggacccggtgagccaggtagcaggttcacctactgaaataccattcagttcaaaacaggaggatatgtctgaattattagatgaaattctggtccaggagattttggatctgaataaaacaacaccgagcgaaatgccaagtacagcatcaacattatcaacaccgttacatgctggtattgatgagaattatcaagctggtggttctgagaattaccatgaattattagagaatttacaattctctcctggcattgaggacaaaatttccaatgatgaagccaatgctaatgcaaatctccatggcgatccttctgagaattatcgtgggccacaggtgtctcctggcagtgagaagagtgtttccagtaaagaaaagaattcaaagaacactcagtatgaaaatctatccattctggaccaaatccttcaaaatattggaagatcttcaggaaacattttccataaagagcagcagaggaccagcgcacagaggaggagccaaggcagtcagtgaggccgcagccccagaccccctgcgcaggagaggagcctgctagaacccccacccaccagcctccggaacagggcacttgtgtgcacacgcccacgttctctgaaccattccacataaaggaaaatcgtttattcacacgatcccaattg

SEQ ID NO: 62850 - DNA, 1613 bp, Homo sapiens
ggtgggaggggacatggggccacgggcctctgttcttcaaggctctgttcttcaagggacctttaagaggtgattagaccctctggatctgtcggttctggcacttgctctgtaattcaaccacctctccagcatccttcaaatacgcctctttccatgggagcagattttgttggcttttggccactggcccttaagtcctgattagtatctaccccttgagtcctcagggtgctcaggacagaggaagtcaccagaacaggcaataagaaagagtggagaggatctctgttaccttaagaccccagtgagcctcctccctgcttcccagtcacagactctggacagaaaccctgccccccgcccctggcaagatgccagctcccttcctggtcctgatgtcacaggtccctggacatgacctccccaccagggcaggaccccagctcccttcctggttgtgatgtcacaggtcctgacattccacagtgtcctggagaccaaggatgggaaactgtcaaccttcagaacatccttctccctcagctggagggagcatggcagtgagccaaggagacgggaccctctgctttgtcctcctgctgtgctgttggcaagaaactgagctccggccgagaaccgtgattccaggtctcgaggttcccaaagttcctggatctgccagcaaatgaccttcttcactcacctgtgggatggggacccggtgagccaggtagcagagtctcactctgttgccagactggagtgcagaggcgcctctcgatttcttgacctcatggtccgcccgcctcagcctcccaaagtgctgggactacaggcatgagccaccgtgcctggccaataacaccttaatcttcaggtgcaggctgtgaagatgggaaaaggctgtcaatgctctggcttcttcccactgacaggggacgtagtgggaatgggaatgaaccccaaggttcacctactgaaataccattcagttcaaaacaggaggatatgtctgaattattagatgaaattctggtccaggagattttggatctgaataaaacaacaccgagcgaaatgccaagtacagcatcaacattatcaacaccgttacatgctggtattgatgagaattatcaagctggtggttctgagaattaccatgaattattagagaatttacaattctctcctggcattgaggacaaaatttccaatgatgaagccaatgctaatgcaaatctccatggcgatccttctgagaattatcgtgggccacaggtgtctcctggcagtgagaagagtgtttccagtaaagaaaagaattcaaagaacactcagtatgaaaatctatccattctggaccaaatccttcaaaatattggaagatcttcaggaaacattttccataaagagcagcagaggaccagcgcacagaggaggagccaaggcagtcagtgaggccgcagccccagaccccctgcgcaggagaggagcctgctagaacccccacccaccagcctccggaacagggcacttgtgtgcacacgcccacgttctctgaaccattccacataaaggaaaatcgtttattcacacgatcccaattg

SEQ ID NO: 62851 - DNA, 1294 bp, Homo sapiens
ggtgggaggggacatggggccacgggcctctgttcttcaaggctctgttcttcaagggacctttaagaggtgattagaccctctggatctgtcggttctggcacttgctctgtaattcaaccacctctccagcatccttcaaatacgcctctttccatgggagcagattttgttggcttttggccactggcccttaagtcctgattagtatctaccccttgagtcctcagggtgctcaggacagaggaagtcaccagaacaggcaataagaaagagtggagaggatctctgttaccttaagaccccagtgagcctcctccctgcttcccagtcacagactctggacagaaaccctgccccccgcccctggcaagatgccagctcccttcctggtcctgatgtcacaggtccctggacatgacctccccaccagggcaggaccccagctcccttcctggttgtgatgtcacaggtcctgacattccacagtgtcctggagaccaaggatgggaaactgtcaaccttcagaacatccttctccctcagctggagggagcatggcagtgagccaaggagacgggaccctctgctttgtcctcctgctgtgctgttggcaagaaactgagctccggccgagaaccgtgattccaggttcacctactgaaataccattcagttcaaaacaggaggatatgtctgaattattagatgaaattctggtccaggagattttggatctgaataaaacaacaccgagcgaaatgccaagtacagcatcaacattatcaacaccgttacatgctggtattgatgagaattatcaagctggtggttctgagaattaccatgaattattagagaatttacaattctctcctggcattgaggacaaaatttccaatgatgaagccaatgctaatgcaaatctccatggcgatccttctgagaattatcgtgggccacaggtgtctcctggcagtgagaagagtgtttccagtaaagaaaagaattcaaagaacactcagtatgaaaatctatccattctggaccaaatccttcaaaatattggaagatcttcaggaaacattttccataaagagcagcagaggaccagcgcacagaggaggagccaaggcagtcagtgaggccgcagccccagaccccctgcgcaggagaggagcctgctagaacccccacccaccagcctccggaacagggcacttgtgtgcacacgcccacgttctctgaaccattccacataaaggaaaatcgtttattcacacgatcccaattg

SEQ ID NO: 62852 - DNA, 1556 bp, Homo sapiens
ggtgggaggggacatggggccacgggcctctgttcttcaaggctctgttcttcaagggacctttaagaggtgattagaccctctggatctgtcggttctggcacttgctctgtaattcaaccacctctccagcatccttcaaatacgcctctttccatgggagcagattttgttggcttttggccactggcccttaagtcctgattagtatctaccccttgagtcctcagggtgctcaggacagaggaagtcaccagaacaggcaataagaaagagtggagaggatctctgttaccttaagaccccagtgagcctcctccctgcttcccagtcacagactctggacagaaaccctgccccccgcccctggcaagatgccagctcccttcctggtcctgatgtcacaggtccctggacatgacctccccaccagggcaggaccccagctcccttcctggttgtgatgtcacaggtcctgacattccacagtgtcctggagaccaaggatgggaaactgtcaaccttcagaacatccttctccctcagctggagggagcatggcagtgagccaaggagacgggaccctctgctttgtcctcctgctgtgctgttggcaagaaactgagctccggccgagaaccgtgattccaggtctcgaggttcccaaagttcctggatctgccagcaaatgaccttcttcactcacctgtgggatggggacccggtgagccaggtagcagagtctcactctgttgccagactggagtgcagaggcgcctctcgatttcttgacctcatggtccgcccgcctcagcctcccaaagtgctgggactacaggcatgagccaccgtgcctggccaataacaccttaatcttcaggtgcaggctgtgaagatgggaaaaggctgtcaatgctctggcttcttcccactgacaggggacgtagtgggaatgggaatgaaccccaagatgaaattctggtccaggagattttggatctgaataaaacaacaccgagcgaaatgccaagtacagcatcaacattatcaacaccgttacatgctggtattgatgagaattatcaagctggtggttctgagaattaccatgaattattagagaatttacaattctctcctggcattgaggacaaaatttccaatgatgaagccaatgctaatgcaaatctccatggcgatccttctgagaattatcgtgggccacaggtgtctcctggcagtgagaagagtgtttccagtaaagaaaagaattcaaagaacactcagtatgaaaatctatccattctggaccaaatccttcaaaatattggaagatcttcaggaaacattttccataaagagcagcagaggaccagcgcacagaggaggagccaaggcagtcagtgaggccgcagccccagaccccctgcgcaggagaggagcctgctagaacccccacccaccagcctccggaacagggcacttgtgtgcacacgcccacgttctctgaaccattccacataaaggaaaatcgtttattcacacgatcccaattg

SEQ ID NO: 62853 - DNA, 454 bp, Homo sapiens
atttgttgctggatttcatgtgggttgggagataaaggagtcaaggatcaccctaagatttttggcctgagcaaactggaaggatggagttactaggtactgagataaaggtgactgtttctgctgtgggtgggcaaacaccttttgaaggaaagtcagcaattcattcttgaacatgctatgattgagaacactcctagacgtctaaatggagatgtcaagtaggtataattagatttgggacatttgagttctggggagagattacatgtctgaatttactaggtgacagagtattggtttgctatttaaagccatatgatcagatgaaatcagtgtaagggacactagtatagtatagctgaagaagggaagtcctcttggttgaaatactgaggctaggggaactctggatttttagaatcagggagatgagaagaaacctgtagaaggt

SEQ ID NO: 62854 - DNA, 906 bp, Homo sapiens
tctactgaaccactttcttccatgtgcacacgctgatttctcaacctggaatcatttccctacacctttcctcaaaggactgttaatgagttttcagagcaggtacttcactgaaatgtaactaccacaatgcatcctttccatgtgactaacttcgctcatggaccagaatcactgtggctctgccctggagtggtgcaaagagctcgcattctgtttggaaagcaaattatttaaatccagtagaggactctcaaatgtggttggaaaatctaagaagacttcccagaggcagcagcactagtgttagggaaagagctcacaaattccattgctgtagaacccatgtgttgaagaccgctacactggaatctagttttctatcctaaaatctacctcctgagtttgagtaagacttgaactagtttgcaaatatctgtgatcttcaccttgcctgcctgcaaagcccataagcaagttcagaagagacttctacttgtccaaagcaacatggagtaaagtgggtcaactagaattaaaatatgctccagccaaaggtgaccatggaaacctattgataaggctctggggtcagattcatctctgttcagacaactctagcggtgtgactctgagcaagtgttttttaacctaagttcctgcttcctcaactgcaaatgtaggaatggtaacatcttcctcaaagttgtatgctggggataacacatgaaggagatgcctgggccatataattatttaagaaatgttcatttctttcttgaactaccttctaccaactatttggtctgagtttatgaaactgtaaattttgtctaacatttgcctaacaaagcattattaccttgcttaaagaaacacacaatacattctaaaccaaaaataaaa

SEQ ID NO: 62855 - DNA, 81 bp, Homo sapiens
ttccttggtacaatttgcccccagccccatcctcctgcaatgtacaagtccagcttggttgttttttgtttgttttttaag

SEQ ID NO: 62856 - DNA, 440 bp, Homo sapiens
aaagccaagaagaaactctcaaatgagccaaaaaggaaaaaaaaaattctctgaaaagaattttagggggaaaagttgtgctattttaaaaagctttgagggctgtaaagtgccacgtttttcacaccttctccatacttttttttcagatttttttagtatgtttaacatttgtgagatgacatcctttttgtatctcaaactggatgcttcaggatttgtaggggaggggttggtggtattcacgttctcttgtgagagaaagtttgtgcctaaaggcctccttcctggggaactgtttaaaccctcgcaggcagacctgtcaggttttactgtgttatttgccaccattttcaacatgcaaaagtaacatgcagttaatggtattggaatgagaccacagcaagagcagaaacctctcgtgacaacttttcagcgac

SEQ ID NO: 62857 - DNA, 303 bp, Homo sapiens
tgagactgctggcctgggcagcactgtactttttgcttttcctggaaggggaagaagagaacaatccactttctgtatggtcctgtccttcattcgagtttataacgttctccccagctgaagtctacacaatctttacccagacatcagaaacagctgtctcaggcagaaggcgcttgactccaggtgggcgctcagcagcaagggcaggtgaagggcatggacatcagattgttctcccctcagtcttcagtttttcagctaagttctgacatgacgacacagactgaacaccctcagaca

SEQ ID NO: 62858 - DNA, 3653 bp, Homo sapiens
agttattaatgaccgctgagcaggcagcaccatgtcagtgtgacaactgatcgggtgaacgatgcaccactaaccaccatggaaacaaggaaaaataaagccagctcacaggatctctcttcactggattgagagcctcagcctgccgactgagaaaaagagttccaggaaaaagaaggaatcccggctgcagcctcctgccttcctttatattttaaaatagagagataagattgcgtgcatgtgtgcatatctatagtatatattttgtacactttgttacacagacacacaaatgcacctatttataccgggcaagaacacaaccatgtgattatctcaaccaaggaactgaggaatccagcacgcaaggacatcggaggtgggctagcactgaaactgcttttcaaggaggtgaagcattccacagataatcagctactctattcagggaaggagtgtaaacatcaccactttttgcatgtttgcataaaaaaggcccactgaatcagttaaagacgaggaagaggaggagaaagagaaagaagaggaagatgttgggcaacatttatttaacatgctccacagcccggaccctggcatcatgctgctattcctgcaaatactgaagaagcatgggatttaaatattttacttctaaataaatgaattactcaatctcctatgaccatctatacatactccaccttcaaaaagtacatcaatattatatcattaaggaaatagtaaccttctcttctccaatatgcatgacatttttggacaatgcaattgtggcactggcacttatttcagtgaagaaaaactttgtggttctatggcattcatcatttgacaaatgcaagcatcttccttatcaatcagctcctattgaacttactagcactgactgtggaatccttaagggcccattacatttctgaagaagaaagctaagatgaaggacatgccactccgaattcatgtgctacttggcctagctatcactacactagtacaagctgtagataaaaaagtggattgtccacggttatgtacgtgtgaaatcaggccttggtttacacccagatccatttatatggaagcatctacagtggattgtaatgatttaggtcttttaactttcccagccagattgccagctaacacacagattcttctcctacagactaacaatattgcaaaaattgaatactccacagactttccagtaaaccttactggcctggatttatctcaaaacaatttatcttcagtcaccaatattaatgtaaaaaagatgcctcagctcctttctgtgtacctagaggaaaacaaacttactgaactgcctgaaaaatgtctgtccgaactgagcaacttacaagaactctatattaatcacaacttgctttctacaatttcacctggagcctttattggcctacataatcttcttcgacttcatctcaattcaaatagattgcagatgatcaacagtaagtggtttgatgctcttccaaatctagagattctgatgattggggaaaatccaattatcagaatcaaagacatgaactttaagcctcttatcaatcttcgcagcctggttatagctggtataaacctcacagaaataccagataacgccttggttggactggaaaacttagaaagcatctctttttacgataacaggcttattaaagtaccccatgttgctcttcaaaaagttgtaaatctcaaatttttggatctaaataaaaatcctattaatagaatacgaaggggtgattttagcaatatgctacacttaaaagagttggggataaataatatgcctgagctgatttccatcgatagtcttgctgtggataacctgccagatttaagaaaaatagaagctactaacaaccctagattgtcttacattcaccccaatgcatttttcagactccccaagctggaatcactcatgctgaacagcaatgctctcagtgccctgtaccatggtaccattgagtctctgccaaacctcaaggaaatcagcatacacagtaaccccatcaggtgtgactgtgtcatccgttggatgaacatgaacaaaaccaacattcgattcatggagccagattcactgttttgcgtggacccacctgaattccaaggtcagaatgttcggcaagtgcatttcagggacatgatggaaatttgtctccctcttatagctcctgagagctttccttctaatctaaatgtagaagctgggagctatgtttcctttcactgtagagctactgcagaaccacagcctgaaatctactggataacaccttctggtcaaaaactcttgcctaataccctgacagacaagttctatgtccattctgagggaacactagatataaatggcgtaactcccaaagaagggggtttatatacttgtatagcaactaacctagttggcgctgacttgaagtctgttatgatcaaagtggatggatcttttccacaagataacaatggctctttgaatattaaaataagagatattcaggccaattcagttttggtgtcctggaaagcaagttctaaaattctcaaatctagtgttaaatggacagcctttgtcaagactgaaaattctcatgctgcgcaaagtgctcgaataccatctgatgtcaaggtatataatcttactcatctgaatccatcaactgagtataaaatttgtattgatattcccaccatctatcagaaaaacagaaaaaaatgtgtaaatgtcaccaccaaaggtttgcaccctgatcaaaaagagtatgaaaagaataataccacaacacttatggcctgtcttggaggccttctggggattattggtgtgatatgtcttatcagctgcctctctccagaaatgaactgtgatggtggacacagctatgtgaggaattacttacagaaaccaacctttgcattaggtgagctttatcctcctctgataaatctctgggaagcaggaaaagaaaaaagtacatcactgaaagtaaaagcaactgttataggtttaccaacaaatatgtcctaaaaaccaccaaggaaacctactccaaaaatgaacaaaaaaaaaaaaaagcgaaagactgcagttgtgctaaaaacaaaacaaaacaaacaaacaaacaaaaaagtaaaaaaagattactttcgagagagaagtttaagcttcaccaatgctgctcctgaccaatggaaatatgtacaacttcagcattttaagtaactggcttcaaggggtactgtggcaaccaaataaaataactccattttctaaaactttcatgtaacttttatgtctggactacagttcaagtggacaaaaacatttctgtattttttttaagtaaataagagtagttgaactgagcaatacctcctcctgtgttgtattacacatattagccacgagtttttgcagtgaccagataaacttgaattgacacgtggtgtaataaaatggacaaattctgtagagtagacacagtgagtatgtggacctcttttataaggaaaaatacattttggattaaaatcaattgcttctgtcttgttttgtttctaaataaagaataatttctgggaaaaaaaaaactgat

SEQ ID NO: 62859 - DNA, 3464 bp, Homo sapiens
agttattaatgaccgctgagcaggcagcaccatgtcagtgtgacaactgatcgggtgaacgatgcaccactaaccaccatggaaacaaggaaaaataaagccagctcacaggatctctcttcactggattgagagcctcagcctgccgactgagaaaaagagttccaggaaaaagaaggaatcccggctgcagcctcctgccttcctttatattttaaaatagagagataagattgcgtgcatgtgtgcatatctatagtatatattttgtacactttgttacacagacacacaaatgcacctatttataccgggcaagaacacaaccatgtgattatctcaaccaaggaactgaggaatccagcacgcaaggacatcggaggtgggctagcactgaaactgcttttcaagcatcatgctgctattcctgcaaatactgaagaagcatgggatttaaatattttacttctaaataaatgaattactcaatctcctatgaccatctatacatactccaccttcaaaaagtacatcaatattatatcattaaggaaatagtaaccttctcttctccaatatgcatgacatttttggacaatgcaattgtggcactggcacttatttcagtgaagaaaaactttgtggttctatggcattcatcatttgacaaatgcaagcatcttccttatcaatcagctcctattgaacttactagcactgactgtggaatccttaagggcccattacatttctgaagaagaaagctaagatgaaggacatgccactccgaattcatgtgctacttggcctagctatcactacactagtacaagctgtagataaaaaagtggattgtccacggttatgtacgtgtgaaatcaggccttggtttacacccagatccatttatatggaagcatctacagtggattgtaatgatttaggtcttttaactttcccagccagattgccagctaacacacagattcttctcctacagactaacaatattgcaaaaattgaatactccacagactttccagtaaaccttactggcctggatttatctcaaaacaatttatcttcagtcaccaatattaatgtaaaaaagatgcctcagctcctttctgtgtacctagaggaaaacaaacttactgaactgcctgaaaaatgtctgtccgaactgagcaacttacaagaactctatattaatcacaacttgctttctacaatttcacctggagcctttattggcctacataatcttcttcgacttcatctcaattcaaatagattgcagatgatcaacagtaagtggtttgatgctcttccaaatctagagattctgatgattggggaaaatccaattatcagaatcaaagacatgaactttaagcctcttatcaatcttcgcagcctggttatagctggtataaacctcacagaaataccagataacgccttggttggactggaaaacttagaaagcatctctttttacgataacaggcttattaaagtaccccatgttgctcttcaaaaagttgtaaatctcaaatttttggatctaaataaaaatcctattaatagaatacgaaggggtgattttagcaatatgctacacttaaaagagttggggataaataatatgcctgagctgatttccatcgatagtcttgctgtggataacctgccagatttaagaaaaatagaagctactaacaaccctagattgtcttacattcaccccaatgcatttttcagactccccaagctggaatcactcatgctgaacagcaatgctctcagtgccctgtaccatggtaccattgagtctctgccaaacctcaaggaaatcagcatacacagtaaccccatcaggtgtgactgtgtcatccgttggatgaacatgaacaaaaccaacattcgattcatggagccagattcactgttttgcgtggacccacctgaattccaaggtcagaatgttcggcaagtgcatttcagggacatgatggaaatttgtctccctcttatagctcctgagagctttccttctaatctaaatgtagaagctgggagctatgtttcctttcactgtagagctactgcagaaccacagcctgaaatctactggataacaccttctggtcaaaaactcttgcctaataccctgacagacaagttctatgtccattctgagggaacactagatataaatggcgtaactcccaaagaagggggtttatatacttgtatagcaactaacctagttggcgctgacttgaagtctgttatgatcaaagtggatggatcttttccacaagataacaatggctctttgaatattaaaataagagatattcaggccaattcagttttggtgtcctggaaagcaagttctaaaattctcaaatctagtgttaaatggacagcctttgtcaagactgaaaattctcatgctgcgcaaagtgctcgaataccatctgatgtcaaggtatataatcttactcatctgaatccatcaactgagtataaaatttgtattgatattcccaccatctatcagaaaaacagaaaaaaatgtgtaaatgtcaccaccaaaggtttgcaccctgatcaaaaagagtatgaaaagaataataccacaacacttatggcctgtcttggaggccttctggggattattggtgtgatatgtcttatcagctgcctctctccagaaatgaactgtgatggtggacacagctatgtgaggaattacttacagaaaccaacctttgcattaggtgagctttatcctcctctgataaatctctgggaagcaggaaaagaaaaaagtacatcactgaaagtaaaagcaactgttataggtttaccaacaaatatgtcctaaaaaccaccaaggaaacctactccaaaaatgaacaaaaaaaaaaaaaagcgaaagactgcagttgtgctaaaaacaaaacaaaacaaacaaacaaacaaaaaagtaaaaaaagattactttcgagagagaagtttaagcttcaccaatgctgctcctgaccaatggaaatatgtacaacttcagcattttaagtaactggcttcaaggggtactgtggcaaccaaataaaataactccattttctaaaactttcatgtaacttttatgtctggactacagttcaagtggacaaaaacatttctgtattttttttaagtaaataagagtagttgaactgagcaatacctcctcctgtgttgtattacacatattagccacgagtttttgcagtgaccagataaacttgaattgacacgtggtgtaataaaatggacaaattctgtagagtagacacagtgagtatgtggacctcttttataaggaaaaatacattttggattaaaatcaattgcttctgtcttgttttgtttctaaataaagaataatttctgggaaaaaaaaaactgat

SEQ ID NO: 62860 - DNA, 2806 bp, Homo sapiens
agttattaatgaccgctgagcaggcagcaccatgtcagtgtgacaactgatcgggtgaacgatgcaccactaaccaccatggaaacaaggaaaaataaagccagctcacaggatctctcttcactggattgagagcctcagcctgccgactgagaaaaagagttccaggaaaaagaaggaatcccggctgcagcctcctgccttcctttatattttaaaatagagagataagattgcgtgcatgtgtgcatatctatagtatatattttgtacactttgttacacagacacacaaatgcacctatttataccgggcaagaacacaaccatgtgattatctcaaccaaggaactgaggaatccagcacgcaaggacatcggaggtgggctagcactgaaactgcttttcaaggaggtgaagcattccacagataatcagctactctattcagggaaggagtgtaaacatcaccactttttgcatgtttgcataaaaaaggcccactgaatcagttaaagacgaggaagaggaggagaaagagaaagaagaggaagatgttgggcaacatttatttaacatgctccacagcccggaccctggcatcatgctgctattcctgcaaatactgaagaagcatgggatttaaatattttacttctaaataaatgaattactcaatctcctatgaccatctatacatactccaccttcaaaaagtacatcaatattatatcattaaggaaatagtaaccttctcttctccaatatgcatgacatttttggacaatgcaattgtggcactggcacttatttcagtgaagaaaaactttgtggttctatggcattcatcatttgacaaatgcaagcatcttccttatcaatcagctcctattgaacttactagcactgactgtggaatccttaagggcccattacatttctgaagaagaaagctaagatgaaggacatgccactccgaattcatgtgctacttggcctagctatcactacactagtacaagctgtagataaaaaagtggattgtccacggttatgtacgtgtgaaatcaggccttggtttacacccagatccatttatatggaagcatctacagtggattgtaatgatttaggtcttttaactttcccagccagattgccagctaacacacagattcttctcctacagactaacaatattgcaaaaattgaatactccacagactttccagtaaaccttactggcctggatttatctcaaaacaatttatcttcagtcaccaatattaatgtaaaaaagatgcctcagctcctttctgtgtacctagaggaaaacaaacttactgaactgcctgaaaaatgtctgtccgaactgagcaacttacaagaactctatattaatcacaacttgctttctacaatttcacctggagcctttattggcctacataatcttcttcgacttcatctcaattcaaatagattgcagatgatcaacagtaagtggtttgatgctcttccaaatctagagattctgatgattggggaaaatccaattatcagaatcaaagacatgaactttaagcctcttatcaatcttcgcagcctggttatagctggtataaacctcacagaaataccagataacgccttggttggactggaaaacttagaaagcatctctttttacgataacaggcttattaaagtaccccatgttgctcttcaaaaagttgtaaatctcaaatttttggatctaaataaaaatcctattaatagaatacgaaggggtgattttagcaatatgctacacttaaaagagttggggataaataatatgcctgagctgatttccatcgatagtcttgctgtggataacctgccagatttaagaaaaatagaagctactaacaaccctagattgtcttacattcaccccaatgcatttttcagactccccaagctggaatcactcatgctgaacagcaatgctctcagtgccctgtaccatggtaccattgagtctctgccaaacctcaaggaaatcagcatacacagtaaccccatcaggtgtgactgtgtcatccgttggatgaacatgaacaaaaccaacattcgattcatggagccagattcactgttttgcgtggacccacctgaattccaaggtcagaatgttcggcaagtgcatttcagggacatgatggaaatttgtctccctcttatagctcctgagagctttccttctaatctaaatgtagaagctgggagctatgtttcctttcactgtagagctactgcagaaccacagcctgaaatctactggataacaccttctggtcaaaaactcttgcctaataccctgacagacaagttctatgtccattctgagggaacactagatataaatggcgtaactcccaaagaagggggtttatatacttgtatagcaactaacctagttggcgctgacttgaagtctgttatgatcaaagtggatggatcttttccacaagataacaatggctctttgaatattaaaataagagatattcaggccaattcagttttggtgtcctggaaagcaagttctaaaattctcaaatctagtgttaaatggacagcctttgtcaagactgaaaattctcatgctgcgcaaagtgctcgaataccatctgatgtcaaggtatataatcttactcatctgaaaccccacaccgggtaaaaaaaatgggtatggaatatcccccctctattcaaaaaacacaaaaaaagggggaaaaggccccccccaagggtttggccc

SEQ ID NO: 62861 - DNA, 3546 bp, Homo sapiens
agttattaatgaccgctgagcaggcagcaccatgtcagtgtgacaactgatcgggtgaacgatgcaccactaaccaccatggaaacaaggaaaaataaagccagctcacaggatctctcttcactggattgagagcctcagcctgccgactgagaaaaagagttccaggaaaaagaaggaatcccggctgcagcctcctgccttcctttatattttaaaatagagagataagattgcgtgcatgtgtgcatatctatagtatatattttgtacactttgttacacagacacacaaatgcacctatttataccgggcaagaacacaaccatgtgattatctcaaccaaggaactgaggaatccagcacgcaaggacatcggaggtgggctagcactgaaactgcttttcaagacgaggaagaggaggagaaagagaaagaagaggaagatgttgggcaacatttatttaacatgctccacagcccggaccctggcatcatgctgctattcctgcaaatactgaagaagcatgggatttaaatattttacttctaaataaatgaattactcaatctcctatgaccatctatacatactccaccttcaaaaagtacatcaatattatatcattaaggaaatagtaaccttctcttctccaatatgcatgacatttttggacaatgcaattgtggcactggcacttatttcagtgaagaaaaactttgtggttctatggcattcatcatttgacaaatgcaagcatcttccttatcaatcagctcctattgaacttactagcactgactgtggaatccttaagggcccattacatttctgaagaagaaagctaagatgaaggacatgccactccgaattcatgtgctacttggcctagctatcactacactagtacaagctgtagataaaaaagtggattgtccacggttatgtacgtgtgaaatcaggccttggtttacacccagatccatttatatggaagcatctacagtggattgtaatgatttaggtcttttaactttcccagccagattgccagctaacacacagattcttctcctacagactaacaatattgcaaaaattgaatactccacagactttccagtaaaccttactggcctggatttatctcaaaacaatttatcttcagtcaccaatattaatgtaaaaaagatgcctcagctcctttctgtgtacctagaggaaaacaaacttactgaactgcctgaaaaatgtctgtccgaactgagcaacttacaagaactctatattaatcacaacttgctttctacaatttcacctggagcctttattggcctacataatcttcttcgacttcatctcaattcaaatagattgcagatgatcaacagtaagtggtttgatgctcttccaaatctagagattctgatgattggggaaaatccaattatcagaatcaaagacatgaactttaagcctcttatcaatcttcgcagcctggttatagctggtataaacctcacagaaataccagataacgccttggttggactggaaaacttagaaagcatctctttttacgataacaggcttattaaagtaccccatgttgctcttcaaaaagttgtaaatctcaaatttttggatctaaataaaaatcctattaatagaatacgaaggggtgattttagcaatatgctacacttaaaagagttggggataaataatatgcctgagctgatttccatcgatagtcttgctgtggataacctgccagatttaagaaaaatagaagctactaacaaccctagattgtcttacattcaccccaatgcatttttcagactccccaagctggaatcactcatgctgaacagcaatgctctcagtgccctgtaccatggtaccattgagtctctgccaaacctcaaggaaatcagcatacacagtaaccccatcaggtgtgactgtgtcatccgttggatgaacatgaacaaaaccaacattcgattcatggagccagattcactgttttgcgtggacccacctgaattccaaggtcagaatgttcggcaagtgcatttcagggacatgatggaaatttgtctccctcttatagctcctgagagctttccttctaatctaaatgtagaagctgggagctatgtttcctttcactgtagagctactgcagaaccacagcctgaaatctactggataacaccttctggtcaaaaactcttgcctaataccctgacagacaagttctatgtccattctgagggaacactagatataaatggcgtaactcccaaagaagggggtttatatacttgtatagcaactaacctagttggcgctgacttgaagtctgttatgatcaaagtggatggatcttttccacaagataacaatggctctttgaatattaaaataagagatattcaggccaattcagttttggtgtcctggaaagcaagttctaaaattctcaaatctagtgttaaatggacagcctttgtcaagactgaaaattctcatgctgcgcaaagtgctcgaataccatctgatgtcaaggtatataatcttactcatctgaatccatcaactgagtataaaatttgtattgatattcccaccatctatcagaaaaacagaaaaaaatgtgtaaatgtcaccaccaaaggtttgcaccctgatcaaaaagagtatgaaaagaataataccacaacacttatggcctgtcttggaggccttctggggattattggtgtgatatgtcttatcagctgcctctctccagaaatgaactgtgatggtggacacagctatgtgaggaattacttacagaaaccaacctttgcattaggtgagctttatcctcctctgataaatctctgggaagcaggaaaagaaaaaagtacatcactgaaagtaaaagcaactgttataggtttaccaacaaatatgtcctaaaaaccaccaaggaaacctactccaaaaatgaacaaaaaaaaaaaaaagcgaaagactgcagttgtgctaaaaacaaaacaaaacaaacaaacaaacaaaaaagtaaaaaaagattactttcgagagagaagtttaagcttcaccaatgctgctcctgaccaatggaaatatgtacaacttcagcattttaagtaactggcttcaaggggtactgtggcaaccaaataaaataactccattttctaaaactttcatgtaacttttatgtctggactacagttcaagtggacaaaaacatttctgtattttttttaagtaaataagagtagttgaactgagcaatacctcctcctgtgttgtattacacatattagccacgagtttttgcagtgaccagataaacttgaattgacacgtggtgtaataaaatggacaaattctgtagagtagacacagtgagtatgtggacctcttttataaggaaaaatacattttggattaaaatcaattgcttctgtcttgttttgtttctaaataaagaataatttctgggaaaaaaaaaactgat

SEQ ID NO: 62862 - DNA, 453 bp, Homo sapiens
atcccctgttaaatgcagggctgcattacagctgctataagtttgtgtttcacgggtgggagaaagggataatttctgttacctgatcattaatatactctaaagagttctggaagaaagcaacaaacatgaaccccatgttcaacgaacataatatgggcccttcccgtgggcaaagtcctgtcctggagaatttgaggggtaacatttgatgaaggcatggtccctcactgttaataaatgcacagtctagtggaagtggcagtgtgattaccaaatactgagagttcgatgtagaatgcaatgaatgagatcacagaggtataaggcaagtgttatgggagcacaggaagggggagaaatgagttccatctgaaagggctgaggagggaggctcggaggaggagatgatgactagattgagtctggaaagagtgcagggtttagacaggc

SEQ ID NO: 62863 - DNA, 216 bp, Homo sapiens
agaggccaggtggaaagggagggaggcctctgggaatcaggacagcaggtggtgctggtagtgaaaagtccctgtggtttgagagactgtaagccacagaagagactgtccccgctgagagacaaggactgctgcagaaacagaaagcctggaggctggccagtgctcaagcctggaataggaacttctctgcaactaaataaaagaaaattagct

SEQ ID NO: 62864 - DNA, 301 bp, Homo sapiens
gggagggacaaatatcaaaccatgtgaagacaccaacagccttctcactgctcttcagtcttctatgtgttacttggtcccaaacatgtagcaattggctttaggttttcattccagtagtatttcatgttctggtgccaatttttattccagtcccctattgctgtgtaatgtcaatctgaaagaaagaactaagggccaggcacggtggctcacacctgtaatcccagcacattgggaggccgaggtaggaggatcacttgatccccagagtttgagaccagcctgagcaacataatga

SEQ ID NO: 62865 - DNA, 294 bp, Homo sapiens
atttatctaaagcttataaaacataccacctgatcaaatccttcagggtaacctctaactttacggcactgtaacactattggcccttttatcagttgtgggttgttagtcaaatatactttgtaaacaaagttacaatgcacactagaatcagaaagaatgaaccagaactacatggtttgactccacctctgggctagagagtctcctttcagtattaactttggaagttttccaagtttacctttgaaagggagccaatattcttttataccacaattgctagaattgtac

SEQ ID NO: 62866 - DNA, 2376 bp, Homo sapiens
tctctccctagttctgaaagagacttgctgtgtgatagagaacaggccatttgtgcctgaaatgttctaacctgcaaattgggtttaatggtaattatcctgcctttctgtctgggaggaaacagagatgctacatagatgaaagctctgattatcatttaaaacaaataaatgtactaaatgccatggtataatatagggaagaatggatgacttcaaagagaccatggttccgttggaggcataaaattgcctgcaaagaggcaaatataatttccagaccaattaatgacttgctgccctcgtaaatggatttaggacatctttgttccttgcttcttttgttaaaactcattcttagtttcattatcagctcactaataataccagtgttgttaagatgctcaaactagagaattgtatgctggatgtgacgctaggacctcagatcctttgatagtgcagttatgaccaggatctctttattctgtgcttcacgtcaacatcattaacccgatgaagcgaagcacaagtcataaaggcacatcagagaagccaagaaagcggggccgtacagagagcatcaaaatcaggtcagaaaaatgctgctttcctcttccaccaaaccttctccctgttgtttttacatgccccgtccctccagattcagcctccgttttgttctctctccttttccttttcctcctctcttccttactttcccctgtgagatgcttttctgtccttttactgcacctcttccagacctatggcatttggggacgggtcacccttcctagagtgatcctgaatccagctgcctcttctttttttgtttttgtttttgtttttgagacagagtctctttctgtcgtccaggctggagtgcagtagcgcaatcttggctcactgcaacctctgcctcctgggttcaagcgattcttgtgcctcaacctcacgaggagctgggattgcaggcgcccgccaccacacccggctaatttttgtatttttagtagagacggagtttcaccatgttggccacgctggtcttgaagcccagacctcaagtgatccgcccgccttggcctcccaaagtgctgggattacaggcatgagccaccgcgcctggcctagttccctcttcttagatggagatttctgcacatgagctgtgagatccacagacatgtcactgagctcccccactctgtcagtggaagatgaatggaataaagcctgcttgcattgtggagtgcagctgtggggacagttgtcatttttgtgttttcagcttaactgtccagcatctcccctcccttcctacagcagggacatcatgccttagatataaacttagtggtgtgcagtacccaccgtggaagctgaagaagggaagtatttcctgtctctcaggcacaccccgcttccagccccataccagtcgggaagtggtcattgacctggggtggactacctggacccttgcttggggctatgagcctggagaatgtgacacaaatgaagggatgctgagactcatttcaaggaagccaccgtggtccggggttggtagtcatacagcaaggcaggtgggtagggctggcaggctgcagggatggtgtgtccactggtagcaatgtccagggatggcagcgtcctgggaatgtcatttctgctccactccttggactcgctgagctgtctccgcctccacctatcttcctacagacctcccttctagttttctgtcaattctttgagccagcaaactccatccagtacattctttcttctttcatgaaagagcttgagttggatgtaaatatatatgacctaacaattccacccctaggtgtataccctacagaaatgtgtacatgtgttcatccagagacatgctctaaatcttcacaaaaacactctccataataaccctgaacaggaaagcaccccaatgcccatgttggctggataagcacattagggtatattcacacgatggaatcccagactgcaatgggaatgagctgcaactccacccccaacttggagtgtattcaccaaccctagtgttgaacgagataaggcaaaaatgcaccataggattccatttatataaagtttaaaacccagcaaaattcatccatgcggttgcaagtagagatcagtcctaagaagacagtaaccagaagggggcatgaggtggtgcttctggggtgttctgtttcttgatctggttgccggttacctgggtgctttccgtttgtgaacattcttggagctgtacacttttgatctgggcacttttctgtgtgtatgttatacttcaataaaaagttgggctttgtgactagcaatcaagaatcctacttt

SEQ ID NO: 62867 - DNA, 906 bp, Homo sapiens
gacatgtaccaagaaatatcttcaggtgtggagataagggacggtttatctattccctcttttcctttcattctttggaatggaatgactcttctaaagaacacgctgtaggaagtctgaatatatccaacctcttgcctcaaccagaaacgaaacttacaatgtgaaagacgatgaccaccctttataaaacatcctcagcccttgtccagccttgcgtggcatgagattggagaagaccttcaagcagtgtcactccttcgaacaaagagtgggggtcccacttatctgacagcagcatcctaccaaaatcccagtgacaaaagaatgacacaggcgtgaaaagcagcttcctgtcctggaaaaaccaagtaattttgtacctgatcaggtcaacatgagtaaactcgtcaagataattagaaggcccttaaagctcgatagtaatcaagccctcttcctagtggtgagcagagacagcttggtgagtatttccatgctgatttatgaagtgtatgaaagtgagaaggatgaagacgaattcctgtatgtgatagtatatacctctagggagacatttggagtgaagctgtcattataagactagaaacacacacacacaaaatgcatctattccagaatgtttaaatcattcccagagtcggggggagggggggaaggataacaaggggatgttaccaattgagattgatcagttcatctaatcacagatcatcaaaacagcagtgttcccacctaggagtttagaaagttgcatttgcatttaaagcagaaaaactgagctctgaatgagcaaattcaattttagaaaactatattatttatcctaggctatcttgttttcaaattttagaagttcaaaaataaaatactttgcatttgatg

SEQ ID NO: 62868 - DNA, 665 bp, Homo sapiens
gacatgtaccaagaaatatcttcaggtgtggagataagggacggtttatctattccctcttttcctttcattctttggaatggaatgactcttctaaagaacacgctgtaggaagtctgaatatatccaacctcttgcctcaaccagaaacgaaacttacaatgtgaaagacgatgaccaccctttataaaacatcctcagcccttgtccagccttgcgtggcatgagattggagaagaccttcaagcagtgtcactccttcgaacaaagagtgggggtcccacttatctgacagcagcatcctaccaaaatcccagtgacaaaagaatgacacaggcgtgaaaagcagcttcctgtcctggaaaaaccaagtaattttgtacctgatcaggtcaacatgagtaaactcgtcaagataattagaaggcccttaaagctcgatagtaatcaagccctcttcctagtggtgagcagagacagcttgcactacttcctgaagagtccaactgaattatattgggtaactttcattcaccaggtatccagttttgaatgcgatcacaacaaaagatctctttctgaattgtatagattgtgctatatgttaccacacttttgtttatacatttaatttagtgattacattaaaaactcagcttagtata

SEQ ID NO: 62869 - DNA, 609 bp, Homo sapiens
gacatgtaccaagaaatatcttcaggtgtggagataagggacggtttatctattccctcttttcctttcattctttggaatggaatgactcttctaaagaacacgctgtaggaagtctgaatatatccaacctcttgcctcaaccagaaacgaaacttacaatgtgaaagacgatgaccaccctttataaaacatcctcagcccttgtccagccttgcgtggcatgagattggagaagaccttcaagcagtgtcactccttcgaacaaagagtgggggtcccacttatctgacagcagcatcctaccaaaatcccagtgacaaaagaatgacacaggcgtgaaaagcagcttcctgtcctggaaaaaccaagtaattttgtacctgatcaggtcaacatgagtaaactcgtcaagataattagaaggcccttaaagctcgatagtaatcaagccctcttcctagtggtgagcagagacagcttgggaaaagcaacataactgtacatgaaccctcaactgatcattaaagggattcccatcacctactctcctcgctgcaggtgtctgtccacatgtctcacttttgaaatggactatacttttacatt

SEQ ID NO: 62870 - DNA, 558 bp, Homo sapiens
  misc_feature (517)..(517): n is a, c, g, or t
  misc_feature (541)..(541): n is a, c, g, or t
  misc_feature (552)..(552): n is a, c, g, or t
ggaggctggtactaatcagggagggtctcagacccactggaagaagtgtaggcttttttttcctggaggtagtagaaatccatgaattattctgaggcagaagtgatatgaaatctatattttattatgatggtttttagactcatttagaaattgggcaaatggaaagtgtagtgaccttgacagaacattataacatattaattaaaaatttaaattcataaattcataaatgtaggccaaatcaagataccatattttagattttgatatactatcaacaaacaataacagatttgctcatcgtcacttattcgactaatatttgaatgctttttatgtgcattatattctagatactagggatacaatagtgaaaaaaacaaacagctcctgtccttctggaacaacggaaatacatgaaaaaagactgttttgcatttgttttacttagggaggaccagatcaacaggcttattagaagaatgaactaaggtgtctaccatgattatttttntaagctggttggttaataaacagnacctgctctcnaattga

SEQ ID NO: 62871 - DNA, 401 bp, Homo sapiens
atttataccacaaataagaatagactatactaacatgttcctccttgagaaacaagcatttcctactaaaaataaaaaggcaaccaacactaatatagcagggcagtcttctacctctgaaataagtttgtcatttagaggaatagtctttaattatcagaatatccagaaatagacaatgtgtgaaaatggagaccaaagcaatccttgagtcttaatgaaagcgcagcctctgagggaagccagggcagaattttctcattatcgctccgcttcatctttatcttccacattccaaaccctaagagatattcttattgcgggaaaaacaacaaggctcccttgcccttgctgagttttcatacactgctacaaaagcagaactatttagaaggagttaa

SEQ ID NO: 62872 - DNA, 720 bp, Homo sapiens
tgttaaaccaaggtacctttggccaaggctgtgaaattctgtatgattcattcaagaacacttgaaggccagtgcacaaaaagatgtcttaatctcctgaacatcctagtgtccaggctcaactctggcaccaagaacagagttctacacaactttttcccagcatcaagaaaatccttgttccggctttaccaagtttacgctgggagcagtcagcttctgagtgacagtcaagtggagcatctctgaactcccagttattccgtgtttttagtgtttttgtatagttaaactttgtggctggttcagtcaatgtttttttcttgtgaatcagtataccaaggaagatttttgaatatcatctgcttaaaagtggtagatataaaaataaagaggaaattcagtagtgttagctttctaagtaagtgtgaagttgtcatatatgctatcttttttttataaaaagtaatatgaaacaattttaatatataacaatattatgatagtttgtgtgatgatttgaagtactgagtttaaagtcttcaggacttaatgtttcatgtgctacttgtaattagtgtgtataaaataaaggaacacctgttttcctaatagttttattctagtactctatgttgttggaatttcccccatttttgtatattttgtaaataaatgcatattttttttcttgacagatgcagattttaaaaaactgat

SEQ ID NO: 62873 - DNA, 461 bp, Homo sapiens
tgtagagagagagagattaaggatgtgcatggcagaatccagatctaaatctgggtctcactgattcaaagcacacagccctaaccactataaaatattgccacccacatggagaaatcatagaaataatcctcatctcaaatccagctggatcactggaaatttccccagaaatcctcttcctgatgctctttctccagaggagttagagatgttcttatttattaataacagttttcttgaaagccacacagggtagtatgttattggtcttatttatttgctgaggaactagaaagagaaaaacatagtaaggtcagtgatgaagtctatcaatgaatcactcaaatccccattcactttcctaatttaggtatcttcttactaagaattatttataccacatttaaaatatgtgcatataaaaatatactttaaatttgattttagttctaaattct

SEQ ID NO: 62874 - DNA, 226 bp, Homo sapiens
ttaatacatttacatttaaagtaattattgagaaggaaggacttttgccatttttgctatttgtatagcttttattgtccctcagtccttcatttctgccttcttttgtatgtagttgatttttctaatgtagttaactgatttgattcccttctgctgtcttcctttcctttcctttctgcttcttcctttcccctttcatctttctcctttttcttttcccttt

SEQ ID NO: 62875 - DNA, 372 bp, Homo sapiens
atgacttgtataatatttacaatttagactaaattttgtcttgctttgtatgctgactctcctgaatagaacttatttttttaaatagatataaaccagcaggtcaggcaagtaagaatggttgttttagttggtggggaattacataagggaaatcttgtgactctaggggatagaaattgtggattttttggtcctgatgaatttttacaatggcctaatcacacaggtgttggtcaatcaacacttcttgtaaatgtgatctgtcattttagctatggtttaaaaagcatatggtttaatagttacagtattttagaagcgaaccatgatatcatgataagatgtaaagaattaaaagagatactggcc

SEQ ID NO: 62876 - DNA, 1490 bp, Homo sapiens
ggggaaagtagcttggctattcccgacagatggacagttggtagaacggaccctcccacaggccctcatccccttgtgcagctgctggcctcgtagacaatcggctgtctccccagaagagggaaagaattgtgcagatgagaaagaggctctcagcgggagggaggcaggcgggcttgattgacacaggagagggctggctttttggagggctcttagcaacggccctggttgagccccctcagccatgagaaaatcaaatcaatgtgccattcttccaggcgcgaggcagcagcggctgcagttcaacatgaaaggaggcttcctccctgcctgctaattacctgctcttcccgatctcatcgtttctgcctttgcaaagtgctactgagaagggggaagaaacgtccgccacccatcccccttgctgcctgggggttcagacttgattgttgcccagccatatcccagccccgtctgcagggagccggaggctgctgctgctgctattgtgtggatgccgcgcgtgtcttctcttctttccagagatggctaacaggggcccgagctatggcttaagccgagaggtgcaggagaagatcgagcagaagtatgatgcggacctggagaacaagctggtggactggatcatcctgcagtgcgccgaggacatagagcacccgccccccggcagggcccattttcagaaatggttaatggacgggacggtcctgtgcaagctgataaatagtttatacccaccaggacaagagcccatacccaagatctcagagtcaaagatggcttttaagcagatggagcaaatctcccagttcctaaaagctgcggagacctatggtgtcagaaccaccgacatctttcagacggtggatctatgggaagggaaggacatggcagctgtgcagaggaccctgatggctttaggcagcgttgcagtcaccaaggatgatggctgctatcggggagagccatcctggtttcacaggaaagcccagcagaatcggagaggcttttccgaggagcagcttcgccagggacagaacgtaataggcctgcagatgggcagcaacaagggagcctcccaggcgggcatgacagggtacgggatgcccaggcagatcatgtaggacgcggcatcctgcccctggtagagaggacgaatgttccacaccatggtctctacgaaaaagaaatagttagtcaccttctgaccttctcctctttctcaaagccttctgtccctggtttttgcaagtgctgcatttccgccgagaatccgcgttgcctactgctgccacctcctgttcatttagaactatgcaaagactccgcttccgttttcctgagctcctcgggccccagagtctctgtttgattatttatttatttatttatttatttgccaaaaattctcctcttcaacttatagaatgcacctaataaagtaattagtcttgtgtcaaaaaaaa

SEQ ID NO: 62877 - DNA, 1569 bp, Homo sapiens
ggggaaagtagcttggctattcccgacagatggacagttggtagaacggaccctcccacaggccctcatccccttgtgcagctgctggcctcgtagacaatcggctgtctccccagaagagggaaagaattgtgcagatgagaaagaggctctcagcgggagggaggcaggcgggcttgattgacacaggagagggctggctttttggagggctcttagcaacggccctggttgagccccctcagccatgagaaaatcaaatcaatgtgccattcttccaggcgcgaggcagcagcggctgcagttcaacatgaaaggaggcttcctccctgcctgctaattacctgctcttcccgatctcatcgtttctgcctttgcaaagtgctactgagaagggggaagaaacgtccgccacccatcccccttgctgcctgggggttcagacttgattgtgaaaccccattggcttcattggctccttgatttaaaccacgcccggctttctgccctctttgctgctgctgggccaggttgcccagccatatcccagccccgtctgcagggagccggaggctgctgctgctgctattgtgtggatgccgcgcgtgtcttctcttctttccagagatggctaacaggggcccgagctatggcttaagccgagaggtgcaggagaagatcgagcagaagtatgatgcggacctggagaacaagctggtggactggatcatcctgcagtgcgccgaggacatagagcacccgccccccggcagggcccattttcagaaatggttaatggacgggacggtcctgtgcaagctgataaatagtttatacccaccaggacaagagcccatacccaagatctcagagtcaaagatggcttttaagcagatggagcaaatctcccagttcctaaaagctgcggagacctatggtgtcagaaccaccgacatctttcagacggtggatctatgggaagggaaggacatggcagctgtgcagaggaccctgatggctttaggcagcgttgcagtcaccaaggatgatggctgctatcggggagagccatcctggtttcacaggaaagcccagcagaatcggagaggcttttccgaggagcagcttcgccagggacagaacgtaataggcctgcagatgggcagcaacaagggagcctcccaggcgggcatgacagggtacgggatgcccaggcagatcatgtaggacgcggcatcctgcccctggtagagaggacgaatgttccacaccatggtctctacgaaaaagaaatagttagtcaccttctgaccttctcctctttctcaaagccttctgtccctggtttttgcaagtgctgcatttccgccgagaatccgcgttgcctactgctgccacctcctgttcatttagaactatgcaaagactccgcttccgttttcctgagctcctcgggccccagagtctctgtttgattatttatttatttatttatttatttgccaaaaattctcctcttcaacttatagaatgcacctaataaagtaattagtcttgtgtcaaaaaaaa

SEQ ID NO: 62878 - DNA, 1150 bp, Homo sapiens
gtgagccggggtgaatcggacgaggaggtgaagtgaaaccccattggcttcattggctccttgatttaaaccacgcccggctttctgccctctttgctgctgctgggccaggttgcccagccatatcccagccccgtctgcagggagccggaggctgctgctgctgctattgtgtggatgccgcgcgtgtcttctcttctttccagagatggctaacaggggcccgagctatggcttaagccgagaggtgcaggagaagatcgagcagaagtatgatgcggacctggagaacaagctggtggactggatcatcctgcagtgcgccgaggacatagagcacccgccccccggcagggcccattttcagaaatggttaatggacgggacggtcctgtgcaagctgataaatagtttatacccaccaggacaagagcccatacccaagatctcagagtcaaagatggcttttaagcagatggagcaaatctcccagttcctaaaagctgcggagacctatggtgtcagaaccaccgacatctttcagacggtggatctatgggaagggaaggacatggcagctgtgcagaggaccctgatggctttaggcagcgttgcagtcaccaaggatgatggctgctatcggggagagccatcctggtttcacaggaaagcccagcagaatcggagaggcttttccgaggagcagcttcgccagggacagaacgtaataggcctgcagatgggcagcaacaagggagcctcccaggcgggcatgacagggtacgggatgcccaggcagatcatgtaggacgcggcatcctgcccctggtagagaggacgaatgttccacaccatggtctctacgaaaaagaaatagttagtcaccttctgaccttctcctctttctcaaagccttctgtccctggtttttgcaagtgctgcatttccgccgagaatccgcgttgcctactgctgccacctcctgttcatttagaactatgcaaagactccgcttccgttttcctgagctcctcgggccccagagtctctgtttgattatttatttatttatttatttatttgccaaaaattctcctcttcaacttatagaatgcacctaataaagtaattagtcttgtgtcaaaaaaaa

SEQ ID NO: 62879 - DNA, 1136 bp, Homo sapiens
ggggaaagtagcttggctattcccgacagatggacagttggtagaacggaccctcccacaggccctcatccccttgtgcagctgctggcctcgtagacaatcggctgtctccccagaagagggaaagaattgtgcagatgagaaagaggctctcagcgggagggaggcaggcgggcttgattgacacaggagagggctggctttttggagggctcttagcaacggccctggttgagccccctcagccatgagaaaatcaaatcaatgtgccattcttccaggcgcgaggcagcagcggctgcagttcaacatgaaaggaggcttcctccctgcctgctaattacctgctcttcccgatctcatcgtttctgcctttgcaaagtgctactgagaagggggaagaaacgtccgccacccatcccccttgctgcctgggggttcagacttgattagatggctaacaggggcccgagctatggcttaagccgagaggtgcaggagaagatcgagcagaagtatgatgcggacctggagaacaagctggtggactggatcatcctgcagtgcgccgaggacatagagcacccgccccccggcagggcccattttcagaaatggttaatggacgggacggtcctgtgcaagctgataaatagtttatacccaccaggacaagagcccatacccaagatctcagagtcaaagatggcttttaagcagatggagcaaatctcccagttcctaaaagctgcggagacctatggtgtcagaaccaccgacatctttcagacggtggatctatgggaagggaaggacatggcagctgtgcagaggaccctgatggctttaggcagcgttgcagtcaccaaggatgatggctgctatcggggagagccatcctggtttcacaggtttttgcaagtgctgcatttccgccgagaatccgcgttgcctactgctgccacctcctgttcatttagaactatgcaaagactccgcttccgttttcctgagctcctcgggccccagagtctctgtttgattatttatttatttatttatttatttgccaaaaattctcctcttcaacttatagaatgcacctaataaagtaattagtcttgtgtcaaaaaaaa

SEQ ID NO: 62880 - DNA, 1039 bp, Homo sapiens
ggggaaagtagcttggctattcccgacagatggacagttggtagaacggaccctcccacaggccctcatccccttgtgcagctgctggcctcgtagacaatcggctgtctccccagaagagggaaagaattgtgcagatgagaaagaggctctcagcgggagggaggcaggcgggcttgattgacacaggagagggctggctttttggagggctcttagcaacggccctggttgagccccctcagccatgagaaaatcaaatcaatgtgccattcttccaggcgcgaggcagcagcggctgcagttcaacatgaaaggaggcttcctccctgcctgctaattacctgctcttcccgatctcatcgtttctgcctttgcaaagtgctactgagaagggggaagaaacgtccgccacccatcccccttgctgcctgggggttcagacttgattgtgaaaccccattggcttcattggctccttgatttaaaccacgcccggctttctgccctctttgctgctgctgggccaggttgcccagccatatcccagccccgtctgcagggagccggaggctgctgctgctgctattgtgtggatgccgcgcgtgtcttctcttctttccagagatggctaacaggggcccgagctatggcttaagccgagaggtgcaggagaagatcgagcagaagtatgatgcggacctggagaacaagctggtggactggatcatcctgcagtgcgccgaggacatagagcacccgccccccggcagggcccattttcagaaatggttaatggacgggacggtcctgtgcaagctgataaatagtttatacccaccaggacaagagcccatacccaagatctcagagtcaaagatggcttttaagcagatggagcaaatctcccagttcctaaaagctgcggagacctatggtgtcagaaccaccgacatctttcagacggtggatctatgggaagggaagacatggccagctgtgcatagacctgatgctgtcggctatcgggtaagctcct

SEQ ID NO: 62881 - DNA, 1395 bp, Homo sapiens
ggggaaagtagcttggctattcccgacagatggacagttggtagaacggaccctcccacaggccctcatccccttgtgcagctgctggcctcgtagacaatcggctgtctccccagaagagggaaagaattgtgcagatgagaaagaggctctcagcgggagggaggcaggcgggcttgattgacacaggagagggctggctttttggagggctcttagcaacggccctggttgagccccctcagccatgagaaaatcaaatcaatgtgccattcttccaggcgcgaggcagcagcggctgcagttcaacatgaaaggaggcttcctccctgcctgctaattacctgctcttcccgatctcatcgtttctgcctttgcaaagtgctactgagaagggggaagaaacgtccgccacccatcccccttgctgcctgggggttcagacttgattagatggctaacaggggcccgagctatggcttaagccgagaggtgcaggagaagatcgagcagaagtatgatgcggacctggagaacaagctggtggactggatcatcctgcagtgcgccgaggacatagagcacccgccccccggcagggcccattttcagaaatggttaatggacgggacggtcctgtgcaagctgataaatagtttatacccaccaggacaagagcccatacccaagatctcagagtcaaagatggcttttaagcagatggagcaaatctcccagttcctaaaagctgcggagacctatggtgtcagaaccaccgacatctttcagacggtggatctatgggaagggaaggacatggcagctgtgcagaggaccctgatggctttaggcagcgttgcagtcaccaaggatgatggctgctatcggggagagccatcctggtttcacaggaaagcccagcagaatcggagaggcttttccgaggagcagcttcgccagggacagaacgtaataggcctgcagatgggcagcaacaagggagcctcccaggcgggcatgacagggtacgggatgcccaggcagatcatgtaggacgcggcatcctgcccctggtagagaggacgaatgttccacaccatggtctctacgaaaaagaaatagttagtcaccttctgaccttctcctctttctcaaagccttctgtccctggtttttgcaagtgctgcatttccgccgagaatccgcgttgcctactgctgccacctcctgttcatttagaactatgcaaagactccgcttccgttttcctgagctcctcgggccccagagtctctgtttgattatttatttatttatttatttatttgccaaaaattctcctcttcaacttatagaatgcacctaataaagtaattagtcttgtgtcaaaaaaaa

SEQ ID NO: 62882 - DNA, 865 bp, Homo sapiens
ggggaaagtagcttggctattcccgacagatggacagttggtagaacggaccctcccacaggccctcatccccttgtgcagctgctggcctcgtagacaatcggctgtctccccagaagagggaaagaattgtgcagatgagaaagaggctctcagcgggagggaggcaggcgggcttgattgacacaggagagggctggctttttggagggctcttagcaacggccctggttgagccccctcagccatgagaaaatcaaatcaatgtgccattcttccaggcgcgaggcagcagcggctgcagttcaacatgaaaggaggcttcctccctgcctgctaattacctgctcttcccgatctcatcgtttctgcctttgcaaagtgctactgagaagggggaagaaacgtccgccacccatcccccttgctgcctgggggttcagacttgattagatggctaacaggggcccgagctatggcttaagccgagaggtgcaggagaagatcgagcagaagtatgatgcggacctggagaacaagctggtggactggatcatcctgcagtgcgccgaggacatagagcacccgccccccggcagggcccattttcagaaatggttaatggacgggacggtcctgtgcaagctgataaatagtttatacccaccaggacaagagcccatacccaagatctcagagtcaaagatggcttttaagcagatggagcaaatctcccagttcctaaaagctgcggagacctatggtgtcagaaccaccgacatctttcagacggtggatctatgggaagggaagacatggccagctgtgcatagacctgatgctgtcggctatcgggtaagctcct

SEQ ID NO: 62883 - DNA, 1704 bp, Homo sapiens
ggggaaagtagcttggctattcccgacagatggacagttggtagaacggaccctcccacaggccctcatccccttgtgcagctgctggcctcgtagacaatcggctgtctccccagaagagggaaagaattgtgcagatgagaaagaggctctcagcgggagggaggcaggcgggcttgattgacacaggagagggctggctttttggagggctcttagcaacggccctggttgagccccctcagccatgagaaaatcaaatcaatgtgccattcttccaggcgcgaggcagcagcggctgcagttcaacatgaaaggaggcttcctccctgcctgctaattacctgctcttcccgatctcatcgtttctgcctttgcaaagtgctactgagaagggggaagaaacgtccgccacccatcccccttgctgcctgggggttcagacttgattgtgagtccgtgttatatcatctggtctcattgataggcgggatagggagggggattccagcccccctggaccggccggaggtttattctagagttactggcgggtagctgtgcttttctttcccgtttgtaggtggtgaaaccccattggcttcattggctccttgatttaaaccacgcccggctttctgccctctttgctgctgctgggccaggttgcccagccatatcccagccccgtctgcagggagccggaggctgctgctgctgctattgtgtggatgccgcgcgtgtcttctcttctttccagagatggctaacaggggcccgagctatggcttaagccgagaggtgcaggagaagatcgagcagaagtatgatgcggacctggagaacaagctggtggactggatcatcctgcagtgcgccgaggacatagagcacccgccccccggcagggcccattttcagaaatggttaatggacgggacggtcctgtgcaagctgataaatagtttatacccaccaggacaagagcccatacccaagatctcagagtcaaagatggcttttaagcagatggagcaaatctcccagttcctaaaagctgcggagacctatggtgtcagaaccaccgacatctttcagacggtggatctatgggaagggaaggacatggcagctgtgcagaggaccctgatggctttaggcagcgttgcagtcaccaaggatgatggctgctatcggggagagccatcctggtttcacaggaaagcccagcagaatcggagaggcttttccgaggagcagcttcgccagggacagaacgtaataggcctgcagatgggcagcaacaagggagcctcccaggcgggcatgacagggtacgggatgcccaggcagatcatgtaggacgcggcatcctgcccctggtagagaggacgaatgttccacaccatggtctctacgaaaaagaaatagttagtcaccttctgaccttctcctctttctcaaagccttctgtccctggtttttgcaagtgctgcatttccgccgagaatccgcgttgcctactgctgccacctcctgttcatttagaactatgcaaagactccgcttccgttttcctgagctcctcgggccccagagtctctgtttgattatttatttatttatttatttatttgccaaaaattctcctcttcaacttatagaatgcacctaataaagtaattagtcttgtgtcaaaaaaaa

SEQ ID NO: 62884 - DNA, 1319 bp, Homo sapiens
ggggaaagtagcttggctattcccgacagatggacagttggtagaacggaccctcccacaggccctcatccccttgtgcagctgctggcctcgtagacaatcggctgtctccccagaagagggaaagaattgtgcagatgagaaagaggctctcagcgggagggaggcaggcgggcttgattgacacaggagagggctggctttttggagggctcttagcaacggccctggttgagccccctcagccatgagaaaatcaaatcaatgtgccattcttccaggcgcgaggcagcagcggctgcagttcaacatgaaaggaggcttcctccctgcctgctaattacctgctcttcccgatctcatcgtttctgcctttgcaaagtgctactgagaagggggaagaaacgtccgccacccatcccccttgctgcctgggggttcagacttgattagatggctaacaggggcccgagctatggcttaagcagtgcgccgaggacatagagcacccgccccccggcagggcccattttcagaaatggttaatggacgggacggtcctgtgcaagctgataaatagtttatacccaccaggacaagagcccatacccaagatctcagagtcaaagatggcttttaagcagatggagcaaatctcccagttcctaaaagctgcggagacctatggtgtcagaaccaccgacatctttcagacggtggatctatgggaagggaaggacatggcagctgtgcagaggaccctgatggctttaggcagcgttgcagtcaccaaggatgatggctgctatcggggagagccatcctggtttcacaggaaagcccagcagaatcggagaggcttttccgaggagcagcttcgccagggacagaacgtaataggcctgcagatgggcagcaacaagggagcctcccaggcgggcatgacagggtacgggatgcccaggcagatcatgtaggacgcggcatcctgcccctggtagagaggacgaatgttccacaccatggtctctacgaaaaagaaatagttagtcaccttctgaccttctcctctttctcaaagccttctgtccctggtttttgcaagtgctgcatttccgccgagaatccgcgttgcctactgctgccacctcctgttcatttagaactatgcaaagactccgcttccgttttcctgagctcctcgggccccagagtctctgtttgattatttatttatttatttatttatttgccaaaaattctcctcttcaacttatagaatgcacctaataaagtaattagtcttgtgtcaaaaaaaa

SEQ ID NO: 62885 - DNA, 686 bp, Homo sapiens
acaaggctgagaaaacatcaagaaagaggagaagctggggaaaagccatttcaaaccccttctaggagtgaagctgcatttgaagaggatggtaagacacgtgggtttagatatgattagtcaagccttcagctggggttcttagacagtcatgcttatttctaatcttttatttctaatttaatttgacttataactaaccccagtgtttttgttttatttcagcttcctttttcttcatccaagaaattctttaaaaatgtgaccattagttatcccgcccttttaggccaaattttttcagttcttcttgagagtggattataccatgctttctgtctggaaaatctcctgatagcaaaaacttactataatattcccccttgaaagtattcgggaaatccaggaaagctatgaaagacaagaaactagtcttaaaaaaatggttctgttttttacaaaattcaactgataaataagtatatgtgacctgtttttagataacgcactgtattataaaattgccatttttatgggtccaaatagaatggcagctactttaagtggctcaacctggtaacttatcagacattttggatttatatacactgttcaaataacaacatgtcaaatataactgtaaaataaatttacaatttttaatttcaaccgctgagcagaaaaaa

SEQ ID NO: 62886 - DNA, 5837 bp, Homo sapiens
  misc_feature (1)..(2): n is a, c, g, or t
nncgagtcttccttttcctaagttcactgtcaattcaaatcgcttaaggaagcaatctattaatgagacacctttgggaagtttgtcaaaggatgatggagctagaggggctcatgggaagaaactcaatttctctgaaagccatcttgtgattataaccaaagaggaagagcaaaaggcagaccccaaagaggtctctaattctaaaaccaaaacaatatttcctaaagtattgggtaaaagccaaagtaaacacatttccaggaatagaagtgagatgtcttcctcttcacttgctccacatagagtgccactgtcccaaactaaccatgctttaactggagggctagagccagcaaaaatcaacataactgccaaagccccctctacagaatacaaccagagtcatataaaagcccttttacctgaagacagtggaacgcaccaggtgttaagaattgatgtgacactttctccaagggaccccaaagctccagggcagtttgggcgtcctgtagttgtcccccatggaaaggagaaggaggcagaaagaagatggaaagaaggaaacttcaatgtctaccttagcgatttgatcccagtggatagagccattgaagacaccagacctgctggatgtgcagagcagctagttcacaataacctcccaaccaccagtgtcatcatgtgctttgtggatgaagtgtggtccactctcctgagatctgttcacagtgtcatcaatcgctctcctccacacctcatcaaggagattctgctggtagatgacttcagcaccaaagactatctaaaagataatttggataaatacatgtcccagtttccaaaagttcggattcttcgcctcaaagagagacatggcttaataagggccaggctggcaggagcacagaatgcaacaggtgatgtgttgacatttttagattctcatgtggaatgtaacgttggttggttggaacctcttctggaaagagtttatttaagtagaaagaaagtggcctgtccagtaatcgaagtcatcaatgataaggatatgagttacatgacagtggataactttcaaagaggcatctttgtgtggcccatgaactttggttggagaacaattcctccagatgtcattgcaaaaaacagaattaaagaaactgatacaataaggtgccctgtcatggctggtggattgttttctattgacaaaagttacttttttgaacttggaacatacgaccctggccttgatgtttggggtggggaaaatatggagctctcattcaaggtgtggatgtgtggtggtgaaattgagatcattccctgctcccgagtgggccatatattcagaaatgacaatccatattccttccccaaagaccggatgaagacagtggagcggaacttggtgcgggttgccgaggtctggctggatgagtataaggagctgttctatggccatggagaccacctcatcgaccaagggctagatgttggcaacctcacccagcaaagggagctgcgaaagaaactgaagtgcaaaagtttcaaatggtacttggagaatgtctttcctgacttaagggctcccattgtgagagctagtggtgtgcttattaatgtggctttgggtaaatgcatttccattgaaaacactacagtcattctggaagactgcgatgggagcaaagagcttcaacaatttaattacacctggttaagacttattaaatgtggagaatggtgtatagcccccatccctgataaaggagccgtaaggctgcacccttgtgataacagaaacaaagggctaaaatggctgcataaatcaacatcagtctttcatccagaactggtgaatcacattgtttttgaaaacaatcagcaattattatgcttggaaggaaatttttctcaaaagatcctgaaagtagctgcctgtgacccagtgaagccatatcaaaagtggaaatttgaaaaatattatgaagcctgaagtgtaactgatgtttttatatagtaaacccattaaatactgtgaaaataacactgaacttggaaactatatttctcagcggtagtttaaattttcaattttaataacatttgaatggaagattttttataaatcacaatatttggaataccaaaagatgactcaggaaaacagtccaacattggactgaagtccttcttcggaactgggtggcctttgaattgcctgctttccaccctatgctagacctcatcatgcaaatttccctgtgaaagctaacaggtaactggaaatgaagacagaaggacttgagaaagcatgaggatattcccaatgactatgtttggtaataatcagctcttctggcccacaagtaggaatgatcaatgagaacttaacttagtcctttatttggggattttttcatcaaacaaaaatttcttgagttcttatggctagaagacctcagatgcccacagctgtcacgtttgtgaaatccctccagactacatgcatgcttacctaacagtttgaaatagtattgatctactgctggtaaccctgcttgatggcagcattttgatctaaattacataatggtttttcccaatctgaatcagtggaaaaaaatttaagtgaggaagaagaggccttcaaatgcttatttaattctaggtatgaacactatttcagttcattttgtgcttttaaaactacagttttaaagatttatgataccaataacttcctagattcatgtggattttttttaaggcaatgaaaaaaggctggattataacacactgtagtaatcaaaaatgcatttaagcattgaatgcactctagtgcagggccaagtaagaggagttgaaatgagtaaagcagaaatagagctgctgaaagtttcttttatataaaaataataaaatactactttagatatagtagcattcacagggatgaaatatgcgaaaaatgggttctaaaatatttcaaagggaaaatgaagtgaaggaaacatcatgaaaggggaaaggaatgaggtaaacaagtcttaggaagagagttaagaaaaaattccgctggacttggccaaagaaagaaggggatctagtatctctatgaaggaaaaaagagtaaagccctcagtgtgaacccagtgagaacactgacaaatttgggaaaagttaaatactgatttcatccaaataaagcctctaatcttaagcataccaatactttggcataccagaagacaccttagaaatcaggatagcctttgcattcattttggtaagaaaactgatgctgagaggataaattacctaaaaatcttaaaacccaggcaagttagtcaaagaatcaagattagaattcaggtttccagagacagggctcattctaatgcctcaggtcactggcccgaacaaatctgcttcacagaattccttagaaagagatacacaattctttgctgggattgggtccctggaggacaaccatactatattcttgttaatatgttttttctttttttaaatttaaacttttgttcagttgagatgattgtgaaactaggtatctttcattctgactcctagtttaacatttaattttgactcccaatgagttacgtaaaagcaaaactataactaagaatgggaaaaagaactatttctgcacatttgtaacatatttaagatgttttcttcatataattgaaaactgcagatgagtaagagaatgactaggaaatgagatacagttatatgacacataatgatgttttagtcaacaatgaaccacatatttgacattggtcccaaaagattatattaataatatggtatctttagtgtgcttttctatgtttagacacacaaatactcaccatgatgttacaatagcctacagtgttcaatacagtaacatgcacaagtttgtaacctaggagcaacagggattccatatagcctaggtgtgtagtaggctacctacaccatctaggtttgtgtaagtacactctgatattcacacaatgatgaaattgcctaatgacacatttctcagaatgtatttgtgttattaaatgatgcatgactctaattcttttcaaaacagagccatatggggcaagggggatggggggacgcaagtcagttgtcaaaagactaattgagttactgacaaactgaacatgctaggtgcctcatgtaattcttcatgtaactaaaaaatgttgagaggtttttttcccccgggtatataggctctctttttatccgaaaatagtttccacaaagaagtcaactctgttctgaaaaaaaatgaattgcattttgaatacacttatctttgggtatatcaactaaaggaagttggatttttttccttaacagaaacttctgcagtcctctcagttcacatcctttctgactttaccctgacaaacttattatataaagctatatttaaatctatattgtcaatataacaaaggattgtttttgaacatcacaaatttgttcttggatagaattttatacattgcttttcatcatatatttgctcagttactctaagaagcaaggaactgatcactagttgggaatctatatgggcctaaacttgagtgtattgatttattattacatctactaccaacattttcttaagcatagccttctaaattttttcaggagattagaataaaggtatacatgctactcggtcttctggtaattctagtgataaacctttggatgagacaggtcctaatcagcactgaattcttcaataggaggctgtgttacaggagctacagatttttccctggattagcttaggtcattgcctttactttaaaaaaaaaaaaaaaaagtctatgcatcttgttaccttgaatacaagggtggtcttgataatatttgacagcactaaccaacttaccaagccatctaagtgcttctgagacttttcagtttgcacaatttctttctccttttcaacagttacccagcgcttctgccctactctcttgtaagctgacacagttgttgttggtacaatcttgttctatcaccagcatcaaatttgcttaatactgcttgttgacatcccctcagctgtcattcacagcaaaccaccatgtgccatgatcacaatgtattattagcttcgccacactaatttggaaacattcttttagatattaaaacaccttacttctagtattagtttgggactgcagaggggcaaagataccatttacagtatataggagtccaatattcccaaccaaccttgatttcatgaatggcttgtaattatttctagcaggcactcatgcaatagaataagattgaaacatgccagagagtaccatctttctttgttttaacatctctgattgaattcctatattcagaatacaagaaaaaaaatttaccaaccaggcgcagtggctcacacctgtaatcctagcactttaggaggccaaggtgggtggatcatgaggtcaggagttcaagaccagcctgggcaacatggtgaaaccccgtctctactaaaaatacaaaaattagctgggcatggtggtgggcgcctgtaatcccagctacctgggaggctgaagcaggagaattgcttgtacccgggaggtggaggttgcagtgagctgaaattgcgccactgcactccagcctagacaacagagcaagactctatctcaaaaaataataataataatttttacctcagaagaaagccccaaaatcttggattaaaacaaaaaaatgacattgggtgatgggaaaaaagaaaggaactaatt

SEQ ID NO: 62887 - DNA, 4888 bp, Homo sapiens
ttaagtagatcattattttagatagacaatcgtggaaagttccaagaaaataaactccacaacttctttttgttacttgcttcgtttcccttctttcaacctccactacggaatttagatccagtgaaagttttgtgttttgtaataagaacaaacattttcttatcgaaccaacaatatttgaagctaataatctcaccaataatgtatttttcactggattaaactgctggcaaacagtctatagctccgtttcccttttttcaacctccacaagcagaaatttaaatccagtgaaagttttggttttttgtaataagaagaaatattttcttattgaaacgacaacatttgaagctaatgaaagaatctcaccaataatgtatttttacactggattaaaccgctggcaaatagcctaatgtttaacaattctgtcataaattgtgcggaatgtctacttcctaaattggaaaatgaaataatacaacatggataatttaaaattcatacactgcctattttttttaaagattaaaatggtttacagtaaaaacatggatcaattatttttaaataaaaaggaaaattctgaaaacaactaataatgaaatgaagaataacaattccaaaacacttcagagatgatgtctatatgaagaaaagtattagcttattaatgtggctttgggtaaatgcatttccattgaaaacactacagtcattctggaagactgcgatgggagcaaagagcttcaacaatttaattacacctggttaagacttattaaatgtggagaatggtgtatagcccccatccctgataaaggagccgtaaggctgcacccttgtgataacagaaacaaagggctaaaatggctgcataaatcaacatcagtctttcatccagaactggtgaatcacattgtttttgaaaacaatcagcaattattatgcttggaaggaaatttttctcaaaagatcctgaaagtagctgcctgtgacccagtgaagccatatcaaaagtggaaatttgaaaaatattatgaagcctgaagtgtaactgatgtttttatatagtaaacccattaaatactgtgaaaataacactgaacttggaaactatatttctcagcggtagtttaaattttcaattttaataacatttgaatggaagattttttataaatcacaatatttggaataccaaaagatgactcaggaaaacagtccaacattggactgaagtccttcttcggaactgggtggcctttgaattgcctgctttccaccctatgctagacctcatcatgcaaatttccctgtgaaagctaacaggtaactggaaatgaagacagaaggacttgagaaagcatgaggatattcccaatgactatgtttggtaataatcagctcttctggcccacaagtaggaatgatcaatgagaacttaacttagtcctttatttggggattttttcatcaaacaaaaatttcttgagttcttatggctagaagacctcagatgcccacagctgtcacgtttgtgaaatccctccagactacatgcatgcttacctaacagtttgaaatagtattgatctactgctggtaaccctgcttgatggcagcattttgatctaaattacataatggtttttcccaatctgaatcagtggaaaaaaatttaagtgaggaagaagaggccttcaaatgcttatttaattctaggtatgaacactatttcagttcattttgtgcttttaaaactacagttttaaagatttatgataccaataacttcctagattcatgtggattttttttaaggcaatgaaaaaaggctggattataacacactgtagtaatcaaaaatgcatttaagcattgaatgcactctagtgcagggccaagtaagaggagttgaaatgagtaaagcagaaatagagctgctgaaagtttcttttatataaaaataataaaatactactttagatatagtagcattcacagggatgaaatatgcgaaaaatgggttctaaaatatttcaaagggaaaatgaagtgaaggaaacatcatgaaaggggaaaggaatgaggtaaacaagtcttaggaagagagttaagaaaaaattccgctggacttggccaaagaaagaaggggatctagtatctctatgaaggaaaaaagagtaaagccctcagtgtgaacccagtgagaacactgacaaatttgggaaaagttaaatactgatttcatccaaataaagcctctaatcttaagcataccaatactttggcataccagaagacaccttagaaatcaggatagcctttgcattcattttggtaagaaaactgatgctgagaggataaattacctaaaaatcttaaaacccaggcaagttagtcaaagaatcaagattagaattcaggtttccagagacagggctcattctaatgcctcaggtcactggcccgaacaaatctgcttcacagaattccttagaaagagatacacaattctttgctgggattgggtccctggaggacaaccatactatattcttgttaatatgttttttctttttttaaatttaaacttttgttcagttgagatgattgtgaaactaggtatctttcattctgactcctagtttaacatttaattttgactcccaatgagttacgtaaaagcaaaactataactaagaatgggaaaaagaactatttctgcacatttgtaacatatttaagatgttttcttcatataattgaaaactgcagatgagtaagagaatgactaggaaatgagatacagttatatgacacataatgatgttttagtcaacaatgaaccacatatttgacattggtcccaaaagattatattaataatatggtatctttagtgtgcttttctatgtttagacacacaaatactcaccatgatgttacaatagcctacagtgttcaatacagtaacatgcacaagtttgtaacctaggagcaacagggattccatatagcctaggtgtgtagtaggctacctacaccatctaggtttgtgtaagtacactctgatattcacacaatgatgaaattgcctaatgacacatttctcagaatgtatttgtgttattaaatgatgcatgactctaattcttttcaaaacagagccatatggggcaagggggatggggggacgcaagtcagttgtcaaaagactaattgagttactgacaaactgaacatgctaggtgcctcatgtaattcttcatgtaactaaaaaatgttgagaggtttttttcccccgggtatataggctctctttttatccgaaaatagtttccacaaagaagtcaactctgttctgaaaaaaaatgaattgcattttgaatacacttatctttgggtatatcaactaaaggaagttggatttttttccttaacagaaacttctgcagtcctctcagttcacatcctttctgactttaccctgacaaacttattatataaagctatatttaaatctatattgtcaatataacaaaggattgtttttgaacatcacaaatttgttcttggatagaattttatacattgcttttcatcatatatttgctcagttactctaagaagcaaggaactgatcactagttgggaatctatatgggcctaaacttgagtgtattgatttattattacatctactaccaacattttcttaagcatagccttctaaattttttcaggagattagaataaaggtatacatgctactcggtcttctggtaattctagtgataaacctttggatgagacaggtcctaatcagcactgaattcttcaataggaggctgtgttacaggagctacagatttttccctggattagcttaggtcattgcctttactttaaaaaaaaaaaaaaaaagtctatgcatcttgttaccttgaatacaagggtggtcttgataatatttgacagcactaaccaacttaccaagccatctaagtgcttctgagacttttcagtttgcacaatttctttctccttttcaacagttacccagcgcttctgccctactctcttgtaagctgacacagttgttgttggtacaatcttgttctatcaccagcatcaaatttgcttaatactgcttgttgacatcccctcagctgtcattcacagcaaaccaccatgtgccatgatcacaatgtattattagcttcgccacactaatttggaaacattcttttagatattaaaacaccttacttctagtattagtttgggactgcagaggggcaaagataccatttacagtatataggagtccaatattcccaaccaaccttgatttcatgaatggcttgtaattatttctagcaggcactcatgcaatagaataagattgaaacatgccagagagtaccatctttctttgttttaacatctctgattgaattcctatattcagaatacaagaaaaaaaatttaccaaccaggcgcagtggctcacacctgtaatcctagcactttaggaggccaaggtgggtggatcatgaggtcaggagttcaagaccagcctgggcaacatggtgaaaccccgtctctactaaaaatacaaaaattagctgggcatggtggtgggcgcctgtaatcccagctacctgggaggctgaagcaggagaattgcttgtacccgggaggtggaggttgcagtgagctgaaattgcgccactgcactccagcctagacaacagagcaagactctatctcaaaaaataataataataatttttacctcagaagaaagccccaaaatcttggattaaaacaaaaaaatgacattgggtgatgggaaaaaagaaaggaactaatt

SEQ ID NO: 62888 - DNA, 318 bp, Homo sapiens
tgaacctaatctagctctgccaccatgatccagggatcgcatcacttaagccctatttgtgactccatcccagggcttccctgcatcaggtagctattctgaaaagcctcctacctcccgtacagatgtacagaggaacaactctaaaagtcgagctttcatgagatgcaagtttaaaaaacaaacttttctttttgtaggtgccctgtcatggctggtggattgttttctattgacaaaagttacttttttgaacttggaacatacgaccctggccttgatgtttggggtggggaaaatatggagctctcattcaag

SEQ ID NO: 62889 - DNA, 2050 bp, Homo sapiens
  misc_feature (1)..(2): n is a, c, g, or t
nncgagtcttccttttcctaagttcactgtcaattcaaatcgcttaaggaagcaatctattaatgagacacctttgggaagtttgtcaaaggatgatggagctagaggggctcatgggaagaaactcaatttctctgaaagccatcttgtgattataaccaaagaggaagagcaaaaggcagaccccaaagaggtctctaattctaaaaccaaaacaatatttcctaaagtattgggtaaaagccaaagtaaacacatttccaggaatagaagtgagatgtcttcctcttcacttgctccacatagagtgccactgtcccaaactaaccatgctttaactggagggctagagccagcaaaaatcaacataactgccaaagccccctctacagaatacaaccagagtcatataaaagcccttttacctgaagacagtggaacgcaccaggtgttaagaattgatgtgacactttctccaagggaccccaaagctccagggcagtttgggcgtcctgtagttgtcccccatggaaaggagaaggaggcagaaagaagatggaaagaaggaaacttcaatgtctaccttagcgatttgatcccagtggatagagccattgaagacaccagacctgctggatgtgcagagcagctagttcacaataacctcccaaccaccagtgtcatcatgtgctttgtggatgaagtgtggtccactctcctgagatctgttcacagtgtcatcaatcgctctcctccacacctcatcaaggagattctgctggtagatgacttcagcaccaaagactatctaaaagataatttggataaatacatgtcccagtttccaaaagttcggattcttcgcctcaaagagagacatggcttaataagggccaggctggcaggagcacagaatgcaacaggtgatgtgttgacatttttagattctcatgtggaatgtaacgttggttggttggaacctcttctggaaagagtttatttaagtagaaagaaagtggcctgtccagtaatcgaagtcatcaatgataaggatatgagttacatgacagtggataactttcaaagaggcatctttgtgtggcccatgaactttggttggagaacaattcctccagatgtcattgcaaaaaacagaattaaagaaactgatacaataaggtgccctgtcatggctggtggattgttttctattgacaaaagttacttttttgaacttggaacatacgaccctggccttgatgtttggggtggggaaaatatggagctctcattcaaggtgtggatgtgtggtggtgaaattgagatcattccctgctcccgagtgggccatatattcagaaatgacaatccatattccttccccaaagaccggatgaagacagtggagcggaacttggtgcgggttgccgaggtctggctggatgagtataaggagctgttctatggccatggagaccacctcatcgaccaagggctagatgttggcaacctcacccagcaaagggagctgcgaaagaaactgaagtgcaaaagtttcaaatggtacttggagaatgtctttcctgacttaagggctcccattgtgagagctagtggtgtgcttattaatgtggctttgggtaaatgcatttccattgaaaacactacagtcattctggaagactgcgatgggagcaaagagcttcaacaatttaattacacctggttaagacttattaaatgtggagaatggtgtatagcccccatccctgataaaggagccgtaaggctgcacccttgtgataacagaaacaaagggctaaaatggctgcataaatcaacatcagtctttcatccagaactggtgaatcacattgtttttgaaaacaatcagcaattattatgcttggaaggaaatttttctcaaaagatcctgaaagtagctgcctgtgacccagtgaagccatatcaaaagtggaaatttgaaaaatattatgaagcctgaagtgtaactgatgtttttatatagtaaacccattaaatactgtga

SEQ ID NO: 62890 - DNA, 2082 bp, Homo sapiens
  misc_feature (1)..(2): n is a, c, g, or t
nncgagtcttccttttcctaagttcactgtcaattcaaatcgcttaaggaagcaatctattaatgagacacctttgggaagtttgtcaaaggatgatggagctagaggggctcatgggaagaaactcaatttctctgaaagccatcttgtgattataaccaaagaggaagagcaaaaggcagaccccaaagaggtctctaattctaaaaccaaaacaatatttcctaaagtattgggtaaaagccaaagtaaacacatttccaggaatagaagtgagatgtcttcctcttcacttgctccacatagagtgccactgtcccaaactaaccatgctttaactggagggctagagccagcaaaaatcaacataactgccaaagccccctctacagaatacaaccagagtcatataaaagcccttttacctgaagacagtggaacgcaccaggtgttaagaattgatgtgacactttctccaagggaccccaaagctccagggcagtttgggcgtcctgtagttgtcccccatggaaaggagaaggaggcagaaagaagatggaaagaaggaaacttcaatgtctaccttagcgatttgatcccagtggatagagccattgaagacaccagacctgctggatgtgcagagcagctagttcacaataacctcccaaccaccagtgtcatcatgtgctttgtggatgaagtgtggtccactctcctgagatctgttcacagtgtcatcaatcgctctcctccacacctcatcaaggagattctgctggtagatgacttcagcaccaaagactatctaaaagataatttggataaatacatgtcccagtttccaaaagttcggattcttcgcctcaaagagagacatggcttaataagggccaggctggcaggagcacagaatgcaacaggtgatgtgttgacatttttagattctcatgtggaatgtaacgttggttggttggaacctcttctggaaagagtttatttaagtagaaagaaagtggcctgtccagtaatcgaagtcatcaatgataaggatatgagttacatgacagtggataactttcaaagaggcatctttgtgtggcccatgaactttggttggagaacaattcctccagatgtcattgcaaaaaacagaattaaagaaactgatacaataaggtgccctgtcatggctggtggattgttttctattgacaaaagttacttttttgaacttggaacatacgaccctggccttgatgtttggggtggggaaaatatggagctctcattcaaggtgtggatgtgtggtggtgaaattgagatcattccctgctcccgagtgggccatatattcagaaatgacaatccatattccttccccaaagaccggatgaagacagtggagcggaacttggtgcgggttgccgaggtctggctggatgagtataaggagctgttctatggccatggagaccacctcatcgaccaagggctagatgttggcaacctcacccagcaaagggagctgcgaaagaaactgaagtgcaaaagtttcaaatggtacttggagaatgtctttcctgacttaagggctcccattgtgagagctagtggtgtgcttcctttttcttcatccaagaaattctttaaaaatgtgaccattagttatcccgcccttttaggccaaattttttcagttcttcttgagagtggattataccatgctttctgtctggaaaatctcctgatagcaaaaacttactataatattcccccttgaaagtattcgggaaatccaggaaagctatgaaagacaagaaactagtcttaaaaaaatggttctgttttttacaaaattcaactgataaataagtatatgtgacctgtttttagataacgcactgtattataaaattgccatttttatgggtccaaatagaatggcagctactttaagtggctcaacctggtaacttatcagacattttggatttatatacactgttcaaataacaacatgtcaaatataactgtaaaataaatttacaatttttaatttcaaccgctgagcagaaaaaa

SEQ ID NO: 62891 - DNA, 1811 bp, Homo sapiens
agaaaggaacacagtaaactgaattgatccgtttagaagtttacaatgaagtttcttctaatactgctcctgcaggccactgcttctggagctcttcccctgaacagctctacaagcctggaaaaaaataatgtgctatttggtgagagatacttagaaaaattttatggccttgagataaacaaacttccagtgacaaaaatgaaatatagtggaaacttaatgaaggaaaaaatccaagaaatgcagcacttcttgggtctgaaagtgaccgggcaactggacacatctaccctggagatgatgcacgcacctcgatgtggagtccccgatgtccatcatttcagggaaatgccaggggggcccgtatggaggaaacattatatcacctacagaatcaataattacacacctgacatgaaccgtgaggatgttgactacgcaatccggaaagctttccaagtatggagtaatgttacccccttgaaattcagcaagattaacacaggcatggctgacattttggtggtttttgcccgtggagctcatggagacttccatgcttttgatggcaaaggtggaatcctagcccatgcttttggacctggatctggcattggaggggatgcacatttcgatgaggacgaattctggactacacattcaggaggcacaaacttgttcctcactgctgttcacgagattggccattccttaggtcttggccattctagtgatccaaaggccgtaatgttccccacctacaaatatgttgacatcaacacatttcgcctctctgctgatgacatacgtggcattcagtccctgtatggagacccaaaagagaaccaacgcttgccaaatcctgacaattcagaaccagctctctgtgaccccaatttgagttttgatgctgtcactaccgtgggaaataagatctttttcttcaaagacaggttcttctggctgaaggtttctgagagaccaaagaccagtgttaatttaatttcttccttatggccaaccttgccatctggcattgaagctgcttatgaaattgaagccagaaatcaagtttttctttttaaagatgacaaatactggttaattagcagtttaagaccagagccaaattatcccaagagcatacattcttttggttttcctaactttgtgaaaaaaattgatgcagctgtttttaacccacgtttttataggacctacttctttgtagataaccagtattggaggtatgatgaaaggagacagatgatggaccctggttatcccaaactgattaccaagaacttccaaggaatcgggcctaaaattgatgcagtcttctattctaaaaacaaatactactatttcttccaaggatctaaccaatttgaatatgacttcctactccaacgtatcaccaaaacactgaaaagcaatagctggtttggttgttagaaatggtgtaattaatggtttttgttagttcacttcagcttaataagtatttattgcatatttgctatgtcctcagtgtaccactacttagagatatgtatcataaaaataaaatctgtaaaccataggtaatgattatataaaatacataatatttttcaattttgaaaactctaattgtccattcttgcttgactctactattaagtttgaaaatagttaccttcaaagcaagataattctatttgaagcatgctctgtaagttgcttcctaacatccttggactgagaaattatacttacttctggcataactaaaattaagtatatatattttggctcaaataaaattg

SEQ ID NO: 62892 - DNA, 1757 bp, Homo sapiens
agaaaggaacacagtaaactgaattgatccgtttagaagtttacaatgaagtttcttctaatactgctcctgcaggccactgcttctggagctcttcccctgaacagctctacaagcctggaaaaaaataatgtgctatttggtgagagatacttagaaaaattttatggccttgagataaacaaacttccagtgacaaaaatgaaatatagtggaaacttaatgaaggaaacatctaccctggagatgatgcacgcacctcgatgtggagtccccgatgtccatcatttcagggaaatgccaggggggcccgtatggaggaaacattatatcacctacagaatcaataattacacacctgacatgaaccgtgaggatgttgactacgcaatccggaaagctttccaagtatggagtaatgttacccccttgaaattcagcaagattaacacaggcatggctgacattttggtggtttttgcccgtggagctcatggagacttccatgcttttgatggcaaaggtggaatcctagcccatgcttttggacctggatctggcattggaggggatgcacatttcgatgaggacgaattctggactacacattcaggaggcacaaacttgttcctcactgctgttcacgagattggccattccttaggtcttggccattctagtgatccaaaggccgtaatgttccccacctacaaatatgttgacatcaacacatttcgcctctctgctgatgacatacgtggcattcagtccctgtatggagacccaaaagagaaccaacgcttgccaaatcctgacaattcagaaccagctctctgtgaccccaatttgagttttgatgctgtcactaccgtgggaaataagatctttttcttcaaagacaggttcttctggctgaaggtttctgagagaccaaagaccagtgttaatttaatttcttccttatggccaaccttgccatctggcattgaagctgcttatgaaattgaagccagaaatcaagtttttctttttaaagatgacaaatactggttaattagcagtttaagaccagagccaaattatcccaagagcatacattcttttggttttcctaactttgtgaaaaaaattgatgcagctgtttttaacccacgtttttataggacctacttctttgtagataaccagtattggaggtatgatgaaaggagacagatgatggaccctggttatcccaaactgattaccaagaacttccaaggaatcgggcctaaaattgatgcagtcttctattctaaaaacaaatactactatttcttccaaggatctaaccaatttgaatatgacttcctactccaacgtatcaccaaaacactgaaaagcaatagctggtttggttgttagaaatggtgtaattaatggtttttgttagttcacttcagcttaataagtatttattgcatatttgctatgtcctcagtgtaccactacttagagatatgtatcataaaaataaaatctgtaaaccataggtaatgattatataaaatacataatatttttcaattttgaaaactctaattgtccattcttgcttgactctactattaagtttgaaaatagttaccttcaaagcaagataattctatttgaagcatgctctgtaagttgcttcctaacatccttggactgagaaattatacttacttctggcataactaaaattaagtatatatattttggctcaaataaaattg

SEQ ID NO: 62893 - DNA, 552 bp, Homo sapiens
tggcaactgtaaactgacacagcacactgttgggcgtgccttagcgggaggtgcttctgccacgcacctgttttagctagtccctcaatttggtctggtgtcagagcaccgcctccagagtccagtcccacttcctaccccaggttgaatgatagtcctccaaaagataagtctactgcctaacacttagaacctgtgaatgtgacattttttggaaagcgagtatttgcagatttgattatattaaggatgccaatttgagattatcctggattaagtgggtgggccctaaattcagtaacaagtgtcctgataagcaacacagaggagagacttggagagaagtgagaagaccatgtgaagacagaggcagggatttgaggtatacagccacaagccaaggagtggctggagccacaaggagctggaagagacaaagaaggattcttctccagagcctttggaggaagcatggccctactgacaccttgatttcagacttctggtctccagaactgtgagacaataaatttctgtttttttaagtcacca

SEQ ID NO: 62894 - DNA, 822 bp, Homo sapiens
  misc_feature (690)..(690): n is a, c, g, or t
  misc_feature (757)..(757): n is a, c, g, or t
  misc_feature (767)..(767): n is a, c, g, or t
  misc_feature (805)..(806): n is a, c, g, or t
gacgcccacccacctcccctaaccccacgaatgaatcagctgtgcttcaaatgacatctctgtcccacggaggccggctgggcctctcatgggggtgctcattgtggtttaagtcagctttgattcttgacctccaaggctgcctctgagtagctaactggagaatcgggtggggaggtgaaaaacaccgcagtcaaatgactcaatctttaatcctgtgcttaagacaccactgttgctgttttttatatttgaagcacccaaagactgggcgtccgctcagccttgatgagcgagcagctattttgtcaggccatctatgatgttgggataatggacaaaggcctgattgggccatatatggccttctttagggcctcctggaggtggaggaagttgtgggtaatttctaataaagacgggaaatgacaagccgtgtgtctaggtctggaaaaatggttctcgctgaaaaagcaccaggaatagacagaaaaacatgcacatggggagctgtggtcctgagctttgaggtaatgaattcccactcatgtgatcatttttaccataaccaaagtttctaaccatcaaaatcaagtgacaattaaaacaggcattaatggataaatccgtctttaaatattaatggggttaattttgttaacagctatgtgttggttgcaagtggaatgntctctgttcatttgacttttgaatataactggttccagaatattgtaaaattaagtatgtgaatgtntcttgtattnagattaaacatttggtgttaaaatccaggattagagannactccttgaaattaat

SEQ ID NO: 62895 - DNA, 876 bp, Homo sapiens
  misc_feature (744)..(744): n is a, c, g, or t
  misc_feature (811)..(811): n is a, c, g, or t
  misc_feature (821)..(821): n is a, c, g, or t
  misc_feature (859)..(860): n is a, c, g, or t
gacgcccacccacctcccctaaccccacgaatgaatcagctgtgcttcaaatgacatctctgtcccacggaggccggctgggcctctcatgggggtgctcattgtggtttaagtcagctttgattcttgacctccaaggctgcctctgagtagctaactggagaatcgggtggggaggtgaaaaacaccgcagtcaaatgactcaatctttaatcctgtgcttaagacaccactgttgctgttttttatatttgaagcacccaaagactgggcgtccgctcagccttgatgagcgagcagctattttgtcaggccatctatgatgttgggataatggacaaaggcctgattgggccatatatggccttctttagggcctcctggaggtggaggaagttgtgggtaatttctaataaagacgggaaatgacaagccgtgtgtctaggtctggaaaaatggttctcgctgaaaaagcaccaggaataaaatctcatacaattttaggtgtctattttgttgtctcaccttgaaatactgcagacagaaaaacatgcacatggggagctgtggtcctgagctttgaggtaatgaattcccactcatgtgatcatttttaccataaccaaagtttctaaccatcaaaatcaagtgacaattaaaacaggcattaatggataaatccgtctttaaatattaatggggttaattttgttaacagctatgtgttggttgcaagtggaatgntctctgttcatttgacttttgaatataactggttccagaatattgtaaaattaagtatgtgaatgtntcttgtattnagattaaacatttggtgttaaaatccaggattagagannactccttgaaattaat

SEQ ID NO: 62896 - DNA, 1189 bp, Homo sapiens
  misc_feature (1057)..(1057): n is a, c, g, or t
  misc_feature (1124)..(1124): n is a, c, g, or t
  misc_feature (1134)..(1134): n is a, c, g, or t
  misc_feature (1172)..(1173): n is a, c, g, or t
cacgcgtcgcggacgcggtgggcaggattgggggaacccactgtgggaaatgacagagaagccagtgggggaagacaaagaaagaagaaggtggaggcagaataaaggtgagaagaagggaaggggaggataaaacaagtccagatttagatcttccttcatgcagccatgcatagctgtctgaggccagcagggaaggaggagaaagggaaggtgtggtggaggaggctgtgctcgtgatgtcatgctttcgtgtattcccaggtgcagctgcatatacttggcacagtttcttgggatttctagccagtttcttggcctcatttgtgcattagttaatatgtggctggccctgtactgggatggtgggatagagaagtgaatgtatgaggcctctgcctgagtttataacctagaaagaaataaagacacacacacacaaaggtgttggagtgtgacaagccttaaggtacccgtgtgtccaagtaaagtagaaccagcaagggtggagtgcccaggtcagtctggggactctggaggcttcgcactgcaggcgtcagatactgagtgttagtggcacggagaagagtgtggaaggctcaggatgggggtggacagcctggagttgtcactctcagtagagatgctagaaggggcgggaggtgatcccagcctcccttctttcctcctcctggctgtcacagatgctctgaattgatgaatccttcaggccaaaaacacacaggctccttccctaggtctggaaaaatggttctcgctgaaaaagcaccaggaataaaatctcatacaattttaggtgtctattttgttgtctcaccttgaaatactgcagacagaaaaacatgcacatggggagctgtggtcctgagctttgaggtaatgaattcccactcatgtgatcatttttaccataaccaaagtttctaaccatcaaaatcaagtgacaattaaaacaggcattaatggataaatccgtctttaaatattaatggggttaattttgttaacagctatgtgttggttgcaagtggaatgntctctgttcatttgacttttgaatataactggttccagaatattgtaaaattaagtatgtgaatgtntcttgtattnagattaaacatttggtgttaaaatccaggattagagannactccttgaaattaat

SEQ ID NO: 62897 - DNA, 1434 bp, Homo sapiens
  misc_feature (1302)..(1302): n is a, c, g, or t
  misc_feature (1369)..(1369): n is a, c, g, or t
  misc_feature (1379)..(1379): n is a, c, g, or t
  misc_feature (1417)..(1418): n is a, c, g, or t
atgtgaattgcatatgtatatacatatacgcatatacttacattgattaaaaacggatctgcatctctgtacacacgcagattggctctgtgttgtgcaccttgggactcctccctgggctttggttttacagctaagtaggaagtcaaacaaacgtgaagaatttgggaattggcaggctgtggcatcagccatggaggatggtcctggatgctgtaggatgtgagatccagcacaaagagaacaagaacaggacatgaggaccacagggattgggggaacccactgtgggaaatgacagagaagccagtgggggaagacaaagaaagaagaaggtggaggcagaataaaggtgagaagaagggaaggggaggataaaacaagtccagatttagatcttccttcatgcagccatgcatagctgtctgaggccagcagggaaggaggagaaagggaaggtgtggtggaggaggctgtgctcgtgatgtcatgctttcgtgtattcccaggtgcagctgcatatacttggcacagtttcttgggatttctagccagtttcttggcctcatttgtgcattagttaatatgtggctggccctgtactgggatggtgggatagagaagtgaatgtatgaggcctctgcctgagtttataacctagaaagaaataaagacacacacacacaaaggtgttggagtgtgacaagccttaaggtacccgtgtgtccaagtaaagtagaaccagcaagggtggagtgcccaggtcagtctggggactctggaggcttcgcactgcaggcgtcagatactgagtgttagtggcacggagaagagtgtggaaggctcaggatgggggtggacagcctggagttgtcactctcagtagagatgctagaaggggcgggaggtgatcccagcctcccttctttcctcctcctggctgtcacagatgctctgaattgatgaatccttcaggccaaaaacacacaggctccttccctaggtctggaaaaatggttctcgctgaaaaagcaccaggaataaaatctcatacaattttaggtgtctattttgttgtctcaccttgaaatactgcagacagaaaaacatgcacatggggagctgtggtcctgagctttgaggtaatgaattcccactcatgtgatcatttttaccataaccaaagtttctaaccatcaaaatcaagtgacaattaaaacaggcattaatggataaatccgtctttaaatattaatggggttaattttgttaacagctatgtgttggttgcaagtggaatgntctctgttcatttgacttttgaatataactggttccagaatattgtaaaattaagtatgtgaatgtntcttgtattnagattaaacatttggtgttaaaatccaggattagagannactccttgaaattaat

SEQ ID NO: 62898 - DNA, 3241 bp, Homo sapiens
cctggtacggtcccgaattcctctgtggatcgcctccttctgcgaaccgcaccacccagatcccggggtgcgcggagggcgcgtctctgacggaagccggggcggacggtcggagtccggaagaaaaacagtccgcgacagctaggcgcgtgagaccggccgcccgcaggctgctctggccgggacccgctggccgggagacgcgaacctgccggaccaccgcgcggggacgacggcggccatgagctcgcggaagctgagcgggccgaaaggcaggaggctcagcatacacgtcgtgacttggaacgtggcttcggcagcgccccctctagatctcagtgacctgcttcagctgaacaaccggaacctcaatcttgacatatatgttattggtttgcaggaattgaactctgggatcataagcctcctttccgatgctgcctttaatgactcgtggagcagtttcctcatggatgtgctttcccctctgagcttcatcaaggtctcccatgtccgtatgcaggggatcctcttactggtctttgccaagtatcagcatttgccctatatccagattctgtctactaaatccacccccactggcctgtttgggtactgggggaacaaaggtggagtcaacatctgcctgaagctttatggctactatgtcagcatcatcaactgccacctgcctccccacatttccaacaattaccagcggctggagcactttgaccggatcctggagatgcagaattgtgaggggcgagacatcccaaacatcctggaccacgacctcattatctggtttggagacatgaactttcggatcgaggactttgggttgcactttgttcgggaatccattaaaaatcggtgctacggtggcctgtgggagaaggaccagctcagcattgccaagaaacatgacccgctgctccgggagttccaggagggccgcctactcttcccgcccacctacaagtttgataggaactccaacgactatgacaccagtgagaaaaaacgcaagcctgcatggaccgatcgcatcctgtggaggctgaagcggcagccctgtgctggccccgacactcccataccgccggcgtcacacttctccttgtctctgaggggctacagcagccacatgacgtacggcatcagcgaccacaagcctgtctccggcacgttcgacttggagctgaagccattggtgtctgctccgctgatcgtcctgatgcccgaggacctgtggaccgtggaaaatgacatgatggtcagctactcttcaacctcggacttccccagcagcccgtgggactggattggactgtacaaggtggggctgcgggacgttaatgactacgtgtcctatgcctgggtcggggacagcaaggtctcctgcagcgacaacctgaaccaggtttacatcgacatcagcaatatccctaccactgaagatgagtttctcctctgttactacagcaacagtctgcgttctgtggtggggataagcagacccttccagatcccgcctggctccttgagggaggacccactgggtgaagcacagccacagatctgagccaggatgggagtgaatcccaggcggaggccagagctggcagccagctctgcctttccactgccgggagtgctgggggcccagcctggccccctgaagagacagccaagtgtcgtccacatactcctcccagagtgagctctaaccaggctcatttgctctctccactactcatctctggaattagccgcttaaatacaggtttttgttgctgagatgtgagtgaaaccagctagtgtgtcaacagtgaagacctggggacagttctgcgtctcatttctggattcctaccccctcttctagtcttgcccaagtagtcctgccaggcacatgccccatttggcacaggcctgcattcttgtcgtgccgtcctgggcctcaggctgtctgggaggggagatgctcacatttgtacaggctacatagactggtgcaagcagtgctggattccaggagtcttggcatctcatagcttgtccccgtgaggagtgagcagagggtctgggatttctgctttcagcaaaagcagtctgactcagtgggcagaatggaggggcccctctagccaggctcttacgccatggttatgagcaggttgatgagggtccttcggccagcacaaccttcctccctactcacggcatggagtctgactgcatggaagttccagatcctgacagagagaactgggaaggatccaggttcgcttccgttggtagcttgagtcccatgcctccaccctgccatctgaggaaggggtgacaagtggtcaaggagctgtggccacagacttttccagggtggtccttggcaggtgaggtgcgtctgtgccacccttgtcaggagccattgacgacgggccccccctggaccccccgggacctcagagtgggggcaggcagaagggagaaccagctcaagacattttggaggatctggccctggggttcttcagagaacaccctctaggggctttggggacatggcctgtccccacatccagcacttgcctccgccatggtcactcggcagcccttttcccaggagaagacacctctgggagcctgctcagtgcttgtcctgccatcctgtgtcctgggactgagggttactccagttgctctgtgttgcatactctcccccgcaagcctgtgtatgaagaattgtcccctggcttccagcaggccatggctggctgttttgtgactgttacattgtgcaggggtaattattagcgtggcttttaaaaaaaaaaaaaaaaaaaaaaaaaaaaaaaaaaaaaaacaaaaaaaaaaaaaaaaaaaaaaaaaaaaaaaaaaaaaaaaaaaaaaaagagagggggggcgcgcgcccaaaaacccccgcgggggggcgcccacacatctcacgcgccgacaccgccgactattcttcgtctgcaacaaggggggcccccacaataagatggggagggacgcgcttttattaaagcacgcaccgagagcgcggcgggcgccggcggtggtatacacacacagaccgagtggagacggtgggagaaaaaacacgttgggacgaacggggggcgatcacttgggtgaggagaagagacgacccctctcttaccttgggggggggggggaacaacataccggtgggcaaacacctacccat

SEQ ID NO: 62899 - DNA, 3340 bp, Homo sapiens
cggccgcacacctcgcgtcgtctggggcagtgttgcgcgtgcgctgatgacaggcccgacacgcccctcttacgtccgcgaacccgtcttcgctcagcctctcgcagctttgcgctcgtgggagagtcccgcctccttctgcgaaccgcaccacccagatcccggggtgcgcggagggcgcgtctctgacggaagccggggcggacggtcggagtccggaagaaaaacagtccgcgacagctaggcgcgtgagaccggccgcccgcaggctgctctggccgggacccgctggccgggagacgcgaacctgccggaccaccgcgcggggacgacggcggccatgagctcgcggaagctgagcgggccgaaaggcaggaggctcagcatacacgtcgtgacttggaacgtggcttcggcagcgccccctctagatctcagtgacctgcttcagctgaacaaccggaacctcaatcttgacatatatgttattggtttgcaggaattgaactctgggatcataagcctcctttccgatgctgcctttaatgactcgtggagcagtttcctcatggatgtgctttcccctctgagcttcatcaaggtctcccatgtccgtatgcaggggatcctcttactggtctttgccaagtatcagcatttgccctatatccagattctgtctactaaatccacccccactggcctgtttgggtactgggggaacaaaggtggagtcaacatctgcctgaagctttatggctactatgtcagcatcatcaactgccacctgcctccccacatttccaacaattaccagcggctggagcactttgaccggatcctggagatgcagaattgtgaggggcgagacatcccaaacatcctggaccacgacctcattatctggtttggagacatgaactttcggatcgaggactttgggttgcactttgttcgggaatccattaaaaatcggtgctacggtggcctgtgggagaaggaccagctcagcattgccaagaaacatgacccgctgctccgggagttccaggagggccgcctactcttcccgcccacctacaagtttgataggaactccaacgactatgacaccagtgagaaaaaacgcaagcctgcatggaccgatcgcatcctgtggaggctgaagcggcagccctgtgctggccccgacactcccataccgccggcgtcacacttctccttgtctctgaggggctacagcagccacatgacgtacggcatcagcgaccacaagcctgtctccggcacgttcgacttggagctgaagccattggtgtctgctccgctgatcgtcctgatgcccgaggacctgtggaccgtggaaaatgacatgatggtcagctactcttcaacctcggacttccccagcagcccgtgggactggattggactgtacaaggtggggctgcgggacgttaatgactacgtgtcctatgcctgggtcggggacagcaaggtctcctgcagcgacaacctgaaccaggtttacatcgacatcagcaatatccctaccactgaagatgagtttctcctctgttactacagcaacagtctgcgttctgtggtggggataagcagacccttccagatcccgcctggctccttgagggaggacccactgggtgaagcacagccacagatctgagccaggatgggagtgaatcccaggcggaggccagagctggcagccagctctgcctttccactgccgggagtgctgggggcccagcctggccccctgaagagacagccaagtgtcgtccacatactcctcccagagtgagctctaaccaggctcatttgctctctccactactcatctctggaattagccgcttaaatacaggtttttgttgctgagatgtgagtgaaaccagctagtgtgtcaacagtgaagacctggggacagttctgcgtctcatttctggattcctaccccctcttctagtcttgcccaagtagtcctgccaggcacatgccccatttggcacaggcctgcattcttgtcgtgccgtcctgggcctcaggctgtctgggaggggagatgctcacatttgtacaggctacatagactggtgcaagcagtgctggattccaggagtcttggcatctcatagcttgtccccgtgaggagtgagcagagggtctgggatttctgctttcagcaaaagcagtctgactcagtgggcagaatggaggggcccctctagccaggctcttacgccatggttatgagcaggttgatgagggtccttcggccagcacaaccttcctccctactcacggcatggagtctgactgcatggaagttccagatcctgacagagagaactgggaaggatccaggttcgcttccgttggtagcttgagtcccatgcctccaccctgccatctgaggaaggggtgacaagtggtcaaggagctgtggccacagacttttccagggtggtccttggcaggtgaggtgcgtctgtgccacccttgtcaggagccattgacgacgggccccccctggaccccccgggacctcagagtgggggcaggcagaagggagaaccagctcaagacattttggaggatctggccctggggttcttcagagaacaccctctaggggctttggggacatggcctgtccccacatccagcacttgcctccgccatggtcactcggcagcccttttcccaggagaagacacctctgggagcctgctcagtgcttgtcctgccatcctgtgtcctgggactgagggttactccagttgctctgtgttgcatactctcccccgcaagcctgtgtatgaagaattgtcccctggcttccagcaggccatggctggctgttttgtgactgttacattgtgcaggggtaattattagcgtggcttttaaaaaaaaaaaaaaaaaaaaaaaaaaaaaaaaaaaaaaacaaaaaaaaaaaaaaaaaaaaaaaaaaaaaaaaaaaaaaaaaaaaaaaagagagggggggcgcgcgcccaaaaacccccgcgggggggcgcccacacatctcacgcgccgacaccgccgactattcttcgtctgcaacaaggggggcccccacaataagatggggagggacgcgcttttattaaagcacgcaccgagagcgcggcgggcgccggcggtggtatacacacacagaccgagtggagacggtgggagaaaaaacacgttgggacgaacggggggcgatcacttgggtgaggagaagagacgacccctctcttaccttgggggggggggggaacaacataccggtgggcaaacacctacccat

SEQ ID NO: 62900 - DNA, 3730 bp, Homo sapiens
cggccgcacacctcgcgtcgtctggggcagtgttgcgcgtgcgctgatgacaggcccgacacgcccctcttacgtccgcgaacccgtcttcgctcagcctctcgcagctttgcgctcgtgggagagtcccgcctccttctgcgaaccgcaccacccagatcccggggtgcgcggagggcgcgtctctgacggaagccggggcggacggtcggagtccggaagaaaaacagtccgcgacagctaggcgcgtgagaccggccgcccgcaggctgctctggccgggacccgctggccgggagacgcgaacctgccggaccaccgcgcggggacgacggcggccatgagctcgcggaagctgagcgggccgaaaggcaggaggctcagcacatacatcaggaggtctgcctgatcccatggtgaaccccgggaatccgaaatcagattgagataagatcctttagggaagtgacttagcctggtctcttgcctgctctttcacggggaacaacgctaatcgcccacttagtctaagtcacgatgcttggatttgctgctaatcgtcggatttgagagtgggaacaagaaatccggacttttgctctccatcctcttagaatctccagctgctgcaggtactcctcatcgtgtgcctaggactcatgctaggctgttcctggtctctgcagggtctgtagctcctgcccgctctgtgctccgcacagtctgaggcttcttgaagagctgctgtgactgactgttccactaaagacatctcatacacgtcgtgacttggaacgtggcttcggcagcgccccctctagatctcagtgacctgcttcagctgaacaaccggaacctcaatcttgacatatatgttattggtttgcaggaattgaactctgggatcataagcctcctttccgatgctgcctttaatgactcgtggagcagtttcctcatggatgtgctttcccctctgagcttcatcaaggtctcccatgtccgtatgcaggggatcctcttactggtctttgccaagtatcagcatttgccctatatccagattctgtctactaaatccacccccactggcctgtttgggtactgggggaacaaaggtggagtcaacatctgcctgaagctttatggctactatgtcagcatcatcaactgccacctgcctccccacatttccaacaattaccagcggctggagcactttgaccggatcctggagatgcagaattgtgaggggcgagacatcccaaacatcctggaccacgacctcattatctggtttggagacatgaactttcggatcgaggactttgggttgcactttgttcgggaatccattaaaaatcggtgctacggtggcctgtgggagaaggaccagctcagcattgccaagaaacatgacccgctgctccgggagttccaggagggccgcctactcttcccgcccacctacaagtttgataggaactccaacgactatgacaccagtgagaaaaaacgcaagcctgcatggaccgatcgcatcctgtggaggctgaagcggcagccctgtgctggccccgacactcccataccgccggcgtcacacttctccttgtctctgaggggctacagcagccacatgacgtacggcatcagcgaccacaagcctgtctccggcacgttcgacttggagctgaagccattggtgtctgctccgctgatcgtcctgatgcccgaggacctgtggaccgtggaaaatgacatgatggtcagctactcttcaacctcggacttccccagcagcccgtgggactggattggactgtacaaggtggggctgcgggacgttaatgactacgtgtcctatgcctgggtcggggacagcaaggtctcctgcagcgacaacctgaaccaggtttacatcgacatcagcaatatccctaccactgaagatgagtttctcctctgttactacagcaacagtctgcgttctgtggtggggataagcagacccttccagatcccgcctggctccttgagggaggacccactgggtgaagcacagccacagatctgagccaggatgggagtgaatcccaggcggaggccagagctggcagccagctctgcctttccactgccgggagtgctgggggcccagcctggccccctgaagagacagccaagtgtcgtccacatactcctcccagagtgagctctaaccaggctcatttgctctctccactactcatctctggaattagccgcttaaatacaggtttttgttgctgagatgtgagtgaaaccagctagtgtgtcaacagtgaagacctggggacagttctgcgtctcatttctggattcctaccccctcttctagtcttgcccaagtagtcctgccaggcacatgccccatttggcacaggcctgcattcttgtcgtgccgtcctgggcctcaggctgtctgggaggggagatgctcacatttgtacaggctacatagactggtgcaagcagtgctggattccaggagtcttggcatctcatagcttgtccccgtgaggagtgagcagagggtctgggatttctgctttcagcaaaagcagtctgactcagtgggcagaatggaggggcccctctagccaggctcttacgccatggttatgagcaggttgatgagggtccttcggccagcacaaccttcctccctactcacggcatggagtctgactgcatggaagttccagatcctgacagagagaactgggaaggatccaggttcgcttccgttggtagcttgagtcccatgcctccaccctgccatctgaggaaggggtgacaagtggtcaaggagctgtggccacagacttttccagggtggtccttggcaggtgaggtgcgtctgtgccacccttgtcaggagccattgacgacgggccccccctggaccccccgggacctcagagtgggggcaggcagaagggagaaccagctcaagacattttggaggatctggccctggggttcttcagagaacaccctctaggggctttggggacatggcctgtccccacatccagcacttgcctccgccatggtcactcggcagcccttttcccaggagaagacacctctgggagcctgctcagtgcttgtcctgccatcctgtgtcctgggactgagggttactccagttgctctgtgttgcatactctcccccgcaagcctgtgtatgaagaattgtcccctggcttccagcaggccatggctggctgttttgtgactgttacattgtgcaggggtaattattagcgtggcttttaaaaaaaaaaaaaaaaaaaaaaaaaaaaaaaaaaaaaaacaaaaaaaaaaaaaaaaaaaaaaaaaaaaaaaaaaaaaaaaaaaaaaaagagagggggggcgcgcgcccaaaaacccccgcgggggggcgcccacacatctcacgcgccgacaccgccgactattcttcgtctgcaacaaggggggcccccacaataagatggggagggacgcgcttttattaaagcacgcaccgagagcgcggcgggcgccggcggtggtatacacacacagaccgagtggagacggtgggagaaaaaacacgttgggacgaacggggggcgatcacttgggtgaggagaagagacgacccctctcttaccttgggggggggggggaacaacataccggtgggcaaacacctacccat

SEQ ID NO: 62901 - DNA, 3462 bp, Homo sapiens
cggccgcacacctcgcgtcgtctggggcagtgttgcgcgtgcgctgatgacaggcccgacacgcccctcttacgtccgcgaacccgtcttcgctcagcctctcgcagctttgcgctcgtgggagagtcccgcctccttctgcgaaccgcaccacccagatcccggggtgcgcggagggcgcgtctctgacggaagccggggcggacggtcggagtccggaagaaaaacagtccgcgacagctaggcgcgtgagaccggccgcccgcaggctgctctggccgggacccgctggccgggagacgcgaacctgccggaccaccgcgcggggacgacggcggccatgagctcgcggaagctgagcgggccgaaaggcaggaggctcagcacatacatcaggaggtctgcctgatcccatggtgaaccccgggaatccgaaatcagattgagataagatcctttagggaagtgacttagcctggtctcttgcctgctctttcacggggaacaacgctaatcgcccacttagtctaagtcacgatgcttggatttgctgctaatcgtcggatttgagagtgggaacaagaaatccggacttttgctctccatcctcttagacatacacgtcgtgacttggaacgtggcttcggcagcgccccctctagatctcagtgacctgcttcagctgaacaaccggaacctcaatcttgacatatatgttattgggtctcccatgtccgtatgcaggggatcctcttactggtctttgccaagtatcagcatttgccctatatccagattctgtctactaaatccacccccactggcctgtttgggtactgggggaacaaaggtggagtcaacatctgcctgaagctttatggctactatgtcagcatcatcaactgccacctgcctccccacatttccaacaattaccagcggctggagcactttgaccggatcctggagatgcagaattgtgaggggcgagacatcccaaacatcctggaccacgacctcattatctggtttggagacatgaactttcggatcgaggactttgggttgcactttgttcgggaatccattaaaaatcggtgctacggtggcctgtgggagaaggaccagctcagcattgccaagaaacatgacccgctgctccgggagttccaggagggccgcctactcttcccgcccacctacaagtttgataggaactccaacgactatgacaccagtgagaaaaaacgcaagcctgcatggaccgatcgcatcctgtggaggctgaagcggcagccctgtgctggccccgacactcccataccgccggcgtcacacttctccttgtctctgaggggctacagcagccacatgacgtacggcatcagcgaccacaagcctgtctccggcacgttcgacttggagctgaagccattggtgtctgctccgctgatcgtcctgatgcccgaggacctgtggaccgtggaaaatgacatgatggtcagctactcttcaacctcggacttccccagcagcccgtgggactggattggactgtacaaggtggggctgcgggacgttaatgactacgtgtcctatgcctgggtcggggacagcaaggtctcctgcagcgacaacctgaaccaggtttacatcgacatcagcaatatccctaccactgaagatgagtttctcctctgttactacagcaacagtctgcgttctgtggtggggataagcagacccttccagatcccgcctggctccttgagggaggacccactgggtgaagcacagccacagatctgagccaggatgggagtgaatcccaggcggaggccagagctggcagccagctctgcctttccactgccgggagtgctgggggcccagcctggccccctgaagagacagccaagtgtcgtccacatactcctcccagagtgagctctaaccaggctcatttgctctctccactactcatctctggaattagccgcttaaatacaggtttttgttgctgagatgtgagtgaaaccagctagtgtgtcaacagtgaagacctggggacagttctgcgtctcatttctggattcctaccccctcttctagtcttgcccaagtagtcctgccaggcacatgccccatttggcacaggcctgcattcttgtcgtgccgtcctgggcctcaggctgtctgggaggggagatgctcacatttgtacaggctacatagactggtgcaagcagtgctggattccaggagtcttggcatctcatagcttgtccccgtgaggagtgagcagagggtctgggatttctgctttcagcaaaagcagtctgactcagtgggcagaatggaggggcccctctagccaggctcttacgccatggttatgagcaggttgatgagggtccttcggccagcacaaccttcctccctactcacggcatggagtctgactgcatggaagttccagatcctgacagagagaactgggaaggatccaggttcgcttccgttggtagcttgagtcccatgcctccaccctgccatctgaggaaggggtgacaagtggtcaaggagctgtggccacagacttttccagggtggtccttggcaggtgaggtgcgtctgtgccacccttgtcaggagccattgacgacgggccccccctggaccccccgggacctcagagtgggggcaggcagaagggagaaccagctcaagacattttggaggatctggccctggggttcttcagagaacaccctctaggggctttggggacatggcctgtccccacatccagcacttgcctccgccatggtcactcggcagcccttttcccaggagaagacacctctgggagcctgctcagtgcttgtcctgccatcctgtgtcctgggactgagggttactccagttgctctgtgttgcatactctcccccgcaagcctgtgtatgaagaattgtcccctggcttccagcaggccatggctggctgttttgtgactgttacattgtgcaggggtaattattagcgtggcttttaaaaaaaaaaaaaaaaaaaaaaaaaaaaaaaaaaaaaaacaaaaaaaaaaaaaaaaaaaaaaaaaaaaaaaaaaaaaaaaaaaaaaaagagagggggggcgcgcgcccaaaaacccccgcgggggggcgcccacacatctcacgcgccgacaccgccgactattcttcgtctgcaacaaggggggcccccacaataagatggggagggacgcgcttttattaaagcacgcaccgagagcgcggcgggcgccggcggtggtatacacacacagaccgagtggagacggtgggagaaaaaacacgttgggacgaacggggggcgatcacttgggtgaggagaagagacgacccctctcttaccttgggggggggggggaacaacataccggtgggcaaacacctacccat

SEQ ID NO: 62902 - DNA, 3504 bp, Homo sapiens
cctggtacggtcccgaattcctctgtggatcgcctccttctgcgaaccgcaccacccagatcccggggtgcgcggagggcgcgtctctgacggaagccggggcggacggtcggagtccggaagaaaaacagtccgcgacagctaggcgcgtgagaccggccgcccgcaggctgctctggccgggacccgctggccgggagacgcgaacctgccggaccaccgcgcggggacgacggcggccatgagctcgcggaagctgagcgggccgaaaggcaggaggctcagcatacacgtcgtgacttggaacgtggcttcggcagcgccccctctagatctcagtgacctgcttcagctgaacaaccggaacctcaatcttgacatatatgttattggtttgcaggaattgaactctgggatcataagcctcctttccgatgctgcctttaatgactcgtggagcagtttcctcatggatgtgctttcccctctgagcttcatcaaggtctcccatgtccgtatgcaggggatcctcttactggtctttgccaagtatcagcatttgccctatatccagattctgtctactaaatccacccccactggcctgtttgggtactgggggaacaaaggtggagtcaacatctgcctgaagctttatggctactatgtcagcatcatcaactgccacctgcctccccacatttccaacaattaccagcggctggagcactttgaccggatcctggagatgcagaattgtgaggggcgagacatcccaaacatcctggaccacgacctcattatctggtttggagacatgaactttcggatcgaggactttgggttgcactttgttcgggaatccattaaaaatcggtgctacggtggcctgtgggagaaggaccagctcagcattgccaagaaacatgacccgctgctccgggagttccaggagggccgcctactcttcccgcccacctacaagtttgataggaactccaacgactatgacaccagtgagaaaaaacgcaagcctgcatggaccgatcgcatcctgtggaggctgaagcggcagccctgtgctggccccgacactcccataccgccggcgtcacacttctccttgtctctgaggggctacagcagccacatgacgtacggcatcagcgaccacaagcctgtctccggcacgttcgacttggagctgaagccattggtgtctgctccgctgatcgtcctgatgcccgaggacctgtggaccgtggaaaatgacatgatggtcagctactcttcaacctcggacttccccagcagcccgtgggactggattggactgtacaaggtgatgtggtggcaaggcaggaagtccatcagcgacagcccctggttcatccttcccgagggctcctgggagctgggcagatgctgacgaactcaccctcatccaccccagcggttcttctgtagctaaaggctggcagtgaagggcggcggggaggcacacagtacggtagccaggcccagcagggagaccatctcttccttaggacttgccttaggtcccatgtcctccctgaccactgatggcctgactccccctcacaggtggggctgcgggacgttaatgactacgtgtcctatgcctgggtcggggacagcaaggtctcctgcagcgacaacctgaaccaggtttacatcgacatcagcaatatccctaccactgaagatgagtttctcctctgttactacagcaacagtctgcgttctgtggtggggataagcagacccttccagatcccgcctggctccttgagggaggacccactgggtgaagcacagccacagatctgagccaggatgggagtgaatcccaggcggaggccagagctggcagccagctctgcctttccactgccgggagtgctgggggcccagcctggccccctgaagagacagccaagtgtcgtccacatactcctcccagagtgagctctaaccaggctcatttgctctctccactactcatctctggaattagccgcttaaatacaggtttttgttgctgagatgtgagtgaaaccagctagtgtgtcaacagtgaagacctggggacagttctgcgtctcatttctggattcctaccccctcttctagtcttgcccaagtagtcctgccaggcacatgccccatttggcacaggcctgcattcttgtcgtgccgtcctgggcctcaggctgtctgggaggggagatgctcacatttgtacaggctacatagactggtgcaagcagtgctggattccaggagtcttggcatctcatagcttgtccccgtgaggagtgagcagagggtctgggatttctgctttcagcaaaagcagtctgactcagtgggcagaatggaggggcccctctagccaggctcttacgccatggttatgagcaggttgatgagggtccttcggccagcacaaccttcctccctactcacggcatggagtctgactgcatggaagttccagatcctgacagagagaactgggaaggatccaggttcgcttccgttggtagcttgagtcccatgcctccaccctgccatctgaggaaggggtgacaagtggtcaaggagctgtggccacagacttttccagggtggtccttggcaggtgaggtgcgtctgtgccacccttgtcaggagccattgacgacgggccccccctggaccccccgggacctcagagtgggggcaggcagaagggagaaccagctcaagacattttggaggatctggccctggggttcttcagagaacaccctctaggggctttggggacatggcctgtccccacatccagcacttgcctccgccatggtcactcggcagcccttttcccaggagaagacacctctgggagcctgctcagtgcttgtcctgccatcctgtgtcctgggactgagggttactccagttgctctgtgttgcatactctcccccgcaagcctgtgtatgaagaattgtcccctggcttccagcaggccatggctggctgttttgtgactgttacattgtgcaggggtaattattagcgtggcttttaaaaaaaaaaaaaaaaaaaaaaaaaaaaaaaaaaaaaaacaaaaaaaaaaaaaaaaaaaaaaaaaaaaaaaaaaaaaaaaaaaaaaaagagagggggggcgcgcgcccaaaaacccccgcgggggggcgcccacacatctcacgcgccgacaccgccgactattcttcgtctgcaacaaggggggcccccacaataagatggggagggacgcgcttttattaaagcacgcaccgagagcgcggcgggcgccggcggtggtatacacacacagaccgagtggagacggtgggagaaaaaacacgttgggacgaacggggggcgatcacttgggtgaggagaagagacgacccctctcttaccttgggggggggggggaacaacataccggtgggcaaacacctacccat

SEQ ID NO: 62903 - DNA, 1820 bp, Homo sapiens
cctggtacggtcccgaattcctctgtggatcgcctccttctgcgaaccgcaccacccagatcccggggtgcgcggagggcgcgtctctgacggaagccggggcggacggtcggagtccggaagaaaaacagtccgcgacagctaggcgcgtgagaccggccgcccgcaggctgctctggccgggacccgctggccgggagacgcgaacctgccggaccaccgcgcggggacgacggcggccatgagctcgcggaagctgagcgggccgaaaggcaggaggctcagcatacacgtcgtgacttggaacgtggcttcggcagcgccccctctagatctcagtgacctgcttcagctgaacaaccggaacctcaatcttgacatatatgttattggtttgcaggaattgaactctgggatcataagcctcctttccgatgctgcctttaatgactcgtggagcagtttcctcatggatgtgctttcccctctgagcttcatcaaggtctcccatgtccgtatgcaggggatcctcttactggtctttgccaagtatcagcatttgccctatatccagattctgtctactaaatccacccccactggcctgtttgggtactgggggaacaaaggtggagtcaacatctgcctgaagctttatggctactatgtcagcatcatcaactgccacctgcctccccacatttccaacaattaccagcggctggagcactttgaccggatcctggagatgcagaattgtgaggggcgagacatcccaaacatcctggaccacgacctcattatctggtttggagacatgaactttcggatcgaggactttgggttgcactttgttcgggaatccattaaaaatcggtgctacggtggcctgtgggagaaggaccagctcagcattgccaagaaacatgacccgctgctccgggagttccaggagggccgcctactcttcccgcccacctacaagtttgataggaactccaacgactatgacaccagtgagaaaaaacgcaagcctgcatggaccgatcgcatcctgtggaggctgaagcggcagccctgtgctggccccgacactcccataccgccggcgtcacacttctccttgtctctgaggggctacagcagccacatgacgtacggcatcagcgaccacaagcctgtctccggcacgttcgacttggagctgaagccattggtgtctgctccgctgatcgtcctgatgcccgaggacctgtggaccgtggaaaatgacatgatggtcagctactcttcaacctcggacttccccagcagcccgtgggactggattggactgtacaaggtggggctgcgggacgttaatgactacgtgtcctatgcctgggtcggggacagcaaggtctcctgcagcgacaacctgaaccaggtttacatcgacatcagcaatatccctaccactgaagatgagtttctcctctgttactacagcaacagtctgcgttctgtggtggggataagcagacccttccagatcccgcctggctccttgagggaggacccactgggtgaagcacagccacagatctgagccaggatgggagtgaatcccaggcggaggccagagctggcagccagctctgcctttccactgccgggagtgctgggggcccagcctggccccctgaagagacagccaagtgtcgtccacatactcctcccagagtgagctctaaccaggctcatttgctctctccactactcatctctggaattagccgcttaaatacaggtttttgttgctgagatgtgagtgaaaccag

SEQ ID NO: 62904 - DNA, 2236 bp, Homo sapiens
  misc_feature (10)..(10): n is a, c, g, or t
agtggatccnccgggctgctggaattcggcacgatggaccgatcgcatcctgtggaggctgaagcggcagccctgtgctggccccgacactcccataccgccggcgtcacacttctccttgtctctgaggggctacagcagccacatgacgtacggcatcagcgaccacaagcctgtctccggcacgttcgacttggagctgaagccattggtgtctgctccgctgatcgtcctgatgcccgaggacctgtggaccgtggaaaatgacatgatggtcagctactcttcaacctcggacttccccagcagcccgtgggactggattggactgtacaaggtggggctgcgggacgttaatgactacgtgtcctatgcctgggtcggggacagcaaggtctcctgcagcgacaacctgaaccaggtttacatcgacatcagcaatatccctaccactgaagatgagtttctcctctgttactacagcaacagtctgcgttctgtggtggggataagcagacccttccagatcccgcctggctccttgagggaggacccactgggtgaagcacagccacagatctgagccaggatgggagtgaatcccaggcggaggccagagctggcagccagctctgcctttccactgccgggagtgctgggggcccagcctggccccctgaagagacagccaagtgtcgtccacatactcctcccagagtgagctctaaccaggctcatttgctctctccactactcatctctggaattagccgcttaaatacaggtttttgttgctgagatgtgagtgaaaccagctagtgtgtcaacagtgaagacctggggacagttctgcgtctcatttctggattcctaccccctcttctagtcttgcccaagtagtcctgccaggcacatgccccatttggcacaggcctgcattcttgtcgtgccgtcctgggcctcaggctgtctgggaggggagatgctcacatttgtacaggctacatagactggtgcaagcagtgctggattccaggagtcttggcatctcatagcttgtccccgtgaggagtgagcagagggtctgggatttctgctttcagcaaaagcagtctgactcagtgggcagaatggaggggcccctctagccaggctcttacgccatggttatgagcaggttgatgagggtccttcggccagcacaaccttcctccctactcacggcatggagtctgactgcatggaagttccagatcctgacagagagaactgggaaggatccaggttcgcttccgttggtagcttgagtcccatgcctccaccctgccatctgaggaaggggtgacaagtggtcaaggagctgtggccacagacttttccagggtggtccttggcaggtgaggtgcgtctgtgccacccttgtcaggagccattgacgacgggccccccctggaccccccgggacctcagagtgggggcaggcagaagggagaaccagctcaagacattttggaggatctggccctggggttcttcagagaacaccctctaggggctttggggacatggcctgtccccacatccagcacttgcctccgccatggtcactcggcagcccttttcccaggagaagacacctctgggagcctgctcagtgcttgtcctgccatcctgtgtcctgggactgagggttactccagttgctctgtgttgcatactctcccccgcaagcctgtgtatgaagaattgtcccctggcttccagcaggccatggctggctgttttgtgactgttacattgtgcaggggtaattattagcgtggcttttaaaaaaaaaaaaaaaaaaaaaaaaaaaaaaaaaaaaaaacaaaaaaaaaaaaaaaaaaaaaaaaaaaaaaaaaaaaaaaaaaaaaaaagagagggggggcgcgcgcccaaaaacccccgcgggggggcgcccacacatctcacgcgccgacaccgccgactattcttcgtctgcaacaaggggggcccccacaataagatggggagggacgcgcttttattaaagcacgcaccgagagcgcggcgggcgccggcggtggtatacacacacagaccgagtggagacggtgggagaaaaaacacgttgggacgaacggggggcgatcacttgggtgaggagaagagacgacccctctcttaccttgggggggggggggaacaacataccggtgggcaaacacctacccat

SEQ ID NO: 62905 - DNA, 1908 bp, Homo sapiens
  misc_feature (1888)..(1888): n is a, c, g, or t
  misc_feature (1891)..(1891): n is a, c, g, or t
cctggtacggtcccgaattcctctgtggatcgcctccttctgcgaaccgcaccacccagatcccggggtgcgcggagggcgcgtctctgacggaagccggggcggacggtcggagtccggaagaaaaacagtccgcgacagctaggcgcgtgagaccggccgcccgcaggctgctctggccgggacccgctggccgggagacgcgaacctgccggaccaccgcgcggggacgacggcggccatgagctcgcggaagctgagcgggccgaaaggcaggaggctcagcatacacgtcgtgacttggaacgtggcttcggcagcgccccctctagatctcagtgacctgcttcagctgaacaaccggaacctcaatcttgacatatatgttattggtttgcaggaattgaactctgggatcataagcctcctttccgatgctgcctttaatgactcgtggagcagtttcctcatggatgtgctttcccctctgagcttcatcaaggtctcccatgtccgtatgcaggggatcctcttactggtctttgccaagtatcagcatttgccctatatccagattctgtctactaaatccacccccactggcctgtttgggtactgggggaacaaaggtggagtcaacatctgcctgaagctttatggctactatgtcagcatcatcaactgccacctgcctccccacatttccaacaattaccagcggctggagcactttgaccggatcctggagatgcagaattgtgaggggcgagacatcccaaacatcctggaccacgacctcattatctggtttggagacatgaactttcggatcgaggactttgggttgcactttgttcgggaatccattaaaaatcggtgctacggtggcctgtgggagaaggaccagctcagcattgccaagaaacatgacccgctgctccgggagttccaggagggccgcctactcttcccgcccacctacaagtttgataggaactccaacgactatgacaccagtgagaaaaaacgcaagcctgcatggaccgatcgcatcctgtggaggctgaagcggcagccctgtgctggccccgacactcccataccgccggcgtcacacttctccttgtctctgaggggctacagcagccacatgacgtacggcatcagcgaccacaagcctgtctccggcacgttcgacttggagctgaagccattggtgtctgctccgctgatcgtcctgatgcccgaggacctgtggaccgtggaaaatgacatgatggtcagctactcttcaacctcggacttccccagcagcccgtgggactggattggactgtacaaggtggggctgcgggacgttaatgactacgtgtcctatgcctgggtcggggacagcaaggtctcctgcagcgacaacctgaaccaggtttacatcgacatcagcaatatccctaccactgaagatgagtttctcctctgttactacagcaacagtctgcgttctgtggtggggataagcagacccttccagatcccgcctggctccttgagggaggacccactgggtgaagcacagccacagatctgagccaggatgggagtgaatcccaggcggaggccagagctggcagccagctctgcctttccactgccgggagtgctgggggcccagcctggccccctgaagagacagccaagtgtcgtccacatactcctcccagagtgagctctaaccaggctcatttgctctctccactactcatctctggaattagccgcttaaatacaggtttttgttgctgagatgtgagtgaaaccagctagtgtgtcaacagtgaagacctggggacagttctgcgtctcattccagagatgagtagtggagagnggnaatgagcctggttagag

SEQ ID NO: 62906 - DNA, 2304 bp, Homo sapiens
cctggtacggtcccgaattcctctgtggatcgcctccttctgcgaaccgcaccacccagatcccggggtgcgcggagggcgcgtctctgacggaagccggggcggacggtcggagtccggaagaaaaacagtccgcgacagctaggcgcgtgagaccggccgcccgcaggctgctctggccgggacccgctggccgggagacgcgaacctgccggaccaccgcgcggggacgacggcggccatgagctcgcggaagctgagcgggccgaaaggcaggaggctcagcatacacgtcgtgacttggaacgtggcttcggcagcgccccctctagatctcagtgacctgcttcagctgaacaaccggaacctcaatcttgacatatatgttattggtttgcaggaattgaactctgggatcataagcctcctttccgatgctgcctttaatgactcgtggagcagtttcctcatggatgtgctttcccctctgagcttcatcaaggtctcccatgtccgtatgcaggggatcctcttactggtctttgccaagtatcagcatttgccctatatccagattctgtctactaaatccacccccactggcctgtttgggtactgggggaacaaaggtggagtcaacatctgcctgaagctttatggctactatgtcagcatcatcaactgccacctgcctccccacatttccaacaattaccagcggctggagcactttgaccggatcctggagatgcagaattgtgaggggcgagacatcccaaacatcctggaccacgacctcattatctggtttggagacatgaactttcggatcgaggactttgggttgcactttgttcgggaatccattaaaaatcggtgctacggtggcctgtgggagaaggaccagctcagcattgccaagaaacatgacccgctgctccgggagttccaggagggccgcctactcttcccgcccacctacaagtttgataggaactccaacgactatgacaccagtgagaaaaaacgcaagcctgcatggaccgatcgcatcctgtggaggctgaagcggcagccctgtgctggccccgacactcccataccgccggcgtcacacttctccttgtctctgaggggctacagcagccacatgacgtacggcatcagcgaccacaagcctgtctccggcacgttcgacttggagctgaagccattggtgtctgctccgctgatcgtcctgatgcccgaggacctgtggaccgtggaaaatgacatgatggtcagctactcttcaacctcggacttccccagcagcccgtgggactggattggactgtacaaggtggggctgcgggacgttaatgactacgtgtcctatgcctgggtcggggacagcaaggtctcctgcagcgacaacctgaaccaggtttacatcgacatcagcaatatccctaccactgaagatgagtttctcctctgttactacagcaacagtctgcgttctgtggtggggataagcagacccttccagatcccgcctggctccttgagggaggacccactgggtgaagcacagccacagatctgagccaggatgggagtgaatcccaggcggaggccagagctggcagccagctctgcctttccactgccgggagtgctgggggcccagcctggccccctgaagagacagccaagtgtcgtccacatactcctcccagagtgagctctaaccaggctcatttgctctctccactactcatctctggaattagccgcttaaatacaggtttttgttgctgagatgtgagtgaaaccagcctggcttccagcaggccatggctggctgttttgtgactgttacattgtgcaggggtaattattagcgtggcttttaaaaaaaaaaaaaaaaaaaaaaaaaaaaaaaaaaaaaaacaaaaaaaaaaaaaaaaaaaaaaaaaaaaaaaaaaaaaaaaaaaaaaaagagagggggggcgcgcgcccaaaaacccccgcgggggggcgcccacacatctcacgcgccgacaccgccgactattcttcgtctgcaacaaggggggcccccacaataagatggggagggacgcgcttttattaaagcacgcaccgagagcgcggcgggcgccggcggtggtatacacacacagaccgagtggagacggtgggagaaaaaacacgttgggacgaacggggggcgatcacttgggtgaggagaagagacgacccctctcttaccttgggggggggggggaacaacataccggtgggcaaacacctacccat

SEQ ID NO: 62907 - DNA, 393 bp, Homo sapiens
ggacttgccttaggtcccatgtcctccctgaccactgatggcctgactccccctcacaggtggggctgcgggacgttaatgactacgtgtcctatgcctgggtcggggacagcaaggtctcctgcagcgacaacctgaaccaggtacgtcaccagcaccaggtacatcaccagcaggcaggcctgcctcagcactcctgtcttgtggaaggaacagagtgctgaataacttgtcactcagagctgggtggagcccagagccctggagctgaccccagtcctgtccatccccctccaggtttacatcgacatcagcaatatccctaccactgaagatgagtttctcctctgttactacagcaacagtctgcgttctgtggtggggataagcaga

SEQ ID NO: 62908 - DNA, 938 bp, Homo sapiens
ctgccgcccaggctggagtgcagtggcggtatcatagctcactgaagcctccacctcctgggctcaagtgattgatccttccacctcagcctccctagtagcgggactacaggtgcacgccaccacgcctggctgttatgtattttttgtagacacagggtttcactatgttgcccaggctagtctcgaactcctgggctcaagtgatcctcccaaactgttgggattatgggtgtgagccaccgtgcctggcccccgctggtatctgcgttgtgttcttgcacgttcacagctgttctcaccagagcatccccccatgtggggctttgggtcagataaggcgggaggcctgagagcagctgcctggccgcctccttaagcctctcagccgtgcctctgctctccgccattcctaccccccagcgctgggccccatgggattccgacagggccagccacccgccgactggtgttcggccctctttcctgatggccagccaaggtccgttggagcagcccagtggagttccatgcccaccccctctgggtgccccaccttccccactatgttggaagggcacagtgaggaacacttggcctcagaggagggaatgatgctgcgagattcagcccccttcccacccccgtgtctagctgaagccattggtgtctgctccgctgatcgtcctgatgcccgaggacctgtggaccgtggaaaatgacatgatggtcagctactcttcaacctcggacttccccagcagcccgtgggactggattggactgtacaaggtgatgtggtggcaaggcaggaagtccatcagcgacagcccctggttcatccttcccgagggctcctgggagctgggcagatgctgacgaactcaccctcatccaccccagcggttcttctgtagctaaaggctggcagtgaaggg

SEQ ID NO: 62909 - DNA, 149 bp, Homo sapiens
gggactgagggttactccagttgctctgtgttgcatactctcccccgcaagcctgtgtatgaagaattgtcccctggcttccagcaggccatggctggctgttttgtgactgttacattgtgcaggggtaattattagcgtggctttta

SEQ ID NO: 62910 - DNA, 3571 bp, Homo sapiens
cggccgcacacctcgcgtcgtctggggcagtgttgcgcgtgcgctgatgacaggcccgacacgcccctcttacgtccgcgaacccgtcttcgctcagcctctcgcagctttgcgctcgtgggagagtcccgcctccttctgcgaaccgcaccacccagatcccggggtgcgcggagggcgcgtctctgacggaagccggggcggacggtcggagtccggaagaaaaacagtccgcgacagctaggcgcgtgagaccggccgcccgcaggctgctctggccgggacccgctggccgggagacgcgaacctgccggaccaccgcgcggggacgacggcggccatgagctcgcggaagctgagcgggccgaaaggcaggaggctcagcacatacatcaggaggtctgcctgatcccatggtgaaccccgggaatccgaaatcagattgagataagatcctttagggaagtgacttagcctggtctcttgcctgctctttcacggggaacaacgctaatcgcccacttagtctaagtcacgatgcttggatttgctgctaatcgtcggatttgagagtgggaacaagaaatccggacttttgctctccatcctcttagacatacacgtcgtgacttggaacgtggcttcggcagcgccccctctagatctcagtgacctgcttcagctgaacaaccggaacctcaatcttgacatatatgttattggtttgcaggaattgaactctgggatcataagcctcctttccgatgctgcctttaatgactcgtggagcagtttcctcatggatgtgctttcccctctgagcttcatcaaggtctcccatgtccgtatgcaggggatcctcttactggtctttgccaagtatcagcatttgccctatatccagattctgtctactaaatccacccccactggcctgtttgggtactgggggaacaaaggtggagtcaacatctgcctgaagctttatggctactatgtcagcatcatcaactgccacctgcctccccacatttccaacaattaccagcggctggagcactttgaccggatcctggagatgcagaattgtgaggggcgagacatcccaaacatcctggaccacgacctcattatctggtttggagacatgaactttcggatcgaggactttgggttgcactttgttcgggaatccattaaaaatcggtgctacggtggcctgtgggagaaggaccagctcagcattgccaagaaacatgacccgctgctccgggagttccaggagggccgcctactcttcccgcccacctacaagtttgataggaactccaacgactatgacaccagtgagaaaaaacgcaagcctgcatggaccgatcgcatcctgtggaggctgaagcggcagccctgtgctggccccgacactcccataccgccggcgtcacacttctccttgtctctgaggggctacagcagccacatgacgtacggcatcagcgaccacaagcctgtctccggcacgttcgacttggagctgaagccattggtgtctgctccgctgatcgtcctgatgcccgaggacctgtggaccgtggaaaatgacatgatggtcagctactcttcaacctcggacttccccagcagcccgtgggactggattggactgtacaaggtggggctgcgggacgttaatgactacgtgtcctatgcctgggtcggggacagcaaggtctcctgcagcgacaacctgaaccaggtttacatcgacatcagcaatatccctaccactgaagatgagtttctcctctgttactacagcaacagtctgcgttctgtggtggggataagcagacccttccagatcccgcctggctccttgagggaggacccactgggtgaagcacagccacagatctgagccaggatgggagtgaatcccaggcggaggccagagctggcagccagctctgcctttccactgccgggagtgctgggggcccagcctggccccctgaagagacagccaagtgtcgtccacatactcctcccagagtgagctctaaccaggctcatttgctctctccactactcatctctggaattagccgcttaaatacaggtttttgttgctgagatgtgagtgaaaccagctagtgtgtcaacagtgaagacctggggacagttctgcgtctcatttctggattcctaccccctcttctagtcttgcccaagtagtcctgccaggcacatgccccatttggcacaggcctgcattcttgtcgtgccgtcctgggcctcaggctgtctgggaggggagatgctcacatttgtacaggctacatagactggtgcaagcagtgctggattccaggagtcttggcatctcatagcttgtccccgtgaggagtgagcagagggtctgggatttctgctttcagcaaaagcagtctgactcagtgggcagaatggaggggcccctctagccaggctcttacgccatggttatgagcaggttgatgagggtccttcggccagcacaaccttcctccctactcacggcatggagtctgactgcatggaagttccagatcctgacagagagaactgggaaggatccaggttcgcttccgttggtagcttgagtcccatgcctccaccctgccatctgaggaaggggtgacaagtggtcaaggagctgtggccacagacttttccagggtggtccttggcaggtgaggtgcgtctgtgccacccttgtcaggagccattgacgacgggccccccctggaccccccgggacctcagagtgggggcaggcagaagggagaaccagctcaagacattttggaggatctggccctggggttcttcagagaacaccctctaggggctttggggacatggcctgtccccacatccagcacttgcctccgccatggtcactcggcagcccttttcccaggagaagacacctctgggagcctgctcagtgcttgtcctgccatcctgtgtcctgggactgagggttactccagttgctctgtgttgcatactctcccccgcaagcctgtgtatgaagaattgtcccctggcttccagcaggccatggctggctgttttgtgactgttacattgtgcaggggtaattattagcgtggcttttaaaaaaaaaaaaaaaaaaaaaaaaaaaaaaaaaaaaaaacaaaaaaaaaaaaaaaaaaaaaaaaaaaaaaaaaaaaaaaaaaaaaaaagagagggggggcgcgcgcccaaaaacccccgcgggggggcgcccacacatctcacgcgccgacaccgccgactattcttcgtctgcaacaaggggggcccccacaataagatggggagggacgcgcttttattaaagcacgcaccgagagcgcggcgggcgccggcggtggtatacacacacagaccgagtggagacggtgggagaaaaaacacgttgggacgaacggggggcgatcacttgggtgaggagaagagacgacccctctcttaccttgggggggggggggaacaacataccggtgggcaaacacctacccat

SEQ ID NO: 62911 - DNA, 3231 bp, Homo sapiens
cggccgcacacctcgcgtcgtctggggcagtgttgcgcgtgcgctgatgacaggcccgacacgcccctcttacgtccgcgaacccgtcttcgctcagcctctcgcagctttgcgctcgtgggagagtcccgcctccttctgcgaaccgcaccacccagatcccggggtgcgcggagggcgcgtctctgacggaagccggggcggacggtcggagtccggaagaaaaacagtccgcgacagctaggcgcgtgagaccggccgcccgcaggctgctctggccgggacccgctggccgggagacgcgaacctgccggaccaccgcgcggggacgacggcggccatgagctcgcggaagctgagcgggccgaaaggcaggaggctcagcatacacgtcgtgacttggaacgtggcttcggcagcgccccctctagatctcagtgacctgcttcagctgaacaaccggaacctcaatcttgacatatatgttattgggtctcccatgtccgtatgcaggggatcctcttactggtctttgccaagtatcagcatttgccctatatccagattctgtctactaaatccacccccactggcctgtttgggtactgggggaacaaaggtggagtcaacatctgcctgaagctttatggctactatgtcagcatcatcaactgccacctgcctccccacatttccaacaattaccagcggctggagcactttgaccggatcctggagatgcagaattgtgaggggcgagacatcccaaacatcctggaccacgacctcattatctggtttggagacatgaactttcggatcgaggactttgggttgcactttgttcgggaatccattaaaaatcggtgctacggtggcctgtgggagaaggaccagctcagcattgccaagaaacatgacccgctgctccgggagttccaggagggccgcctactcttcccgcccacctacaagtttgataggaactccaacgactatgacaccagtgagaaaaaacgcaagcctgcatggaccgatcgcatcctgtggaggctgaagcggcagccctgtgctggccccgacactcccataccgccggcgtcacacttctccttgtctctgaggggctacagcagccacatgacgtacggcatcagcgaccacaagcctgtctccggcacgttcgacttggagctgaagccattggtgtctgctccgctgatcgtcctgatgcccgaggacctgtggaccgtggaaaatgacatgatggtcagctactcttcaacctcggacttccccagcagcccgtgggactggattggactgtacaaggtggggctgcgggacgttaatgactacgtgtcctatgcctgggtcggggacagcaaggtctcctgcagcgacaacctgaaccaggtttacatcgacatcagcaatatccctaccactgaagatgagtttctcctctgttactacagcaacagtctgcgttctgtggtggggataagcagacccttccagatcccgcctggctccttgagggaggacccactgggtgaagcacagccacagatctgagccaggatgggagtgaatcccaggcggaggccagagctggcagccagctctgcctttccactgccgggagtgctgggggcccagcctggccccctgaagagacagccaagtgtcgtccacatactcctcccagagtgagctctaaccaggctcatttgctctctccactactcatctctggaattagccgcttaaatacaggtttttgttgctgagatgtgagtgaaaccagctagtgtgtcaacagtgaagacctggggacagttctgcgtctcatttctggattcctaccccctcttctagtcttgcccaagtagtcctgccaggcacatgccccatttggcacaggcctgcattcttgtcgtgccgtcctgggcctcaggctgtctgggaggggagatgctcacatttgtacaggctacatagactggtgcaagcagtgctggattccaggagtcttggcatctcatagcttgtccccgtgaggagtgagcagagggtctgggatttctgctttcagcaaaagcagtctgactcagtgggcagaatggaggggcccctctagccaggctcttacgccatggttatgagcaggttgatgagggtccttcggccagcacaaccttcctccctactcacggcatggagtctgactgcatggaagttccagatcctgacagagagaactgggaaggatccaggttcgcttccgttggtagcttgagtcccatgcctccaccctgccatctgaggaaggggtgacaagtggtcaaggagctgtggccacagacttttccagggtggtccttggcaggtgaggtgcgtctgtgccacccttgtcaggagccattgacgacgggccccccctggaccccccgggacctcagagtgggggcaggcagaagggagaaccagctcaagacattttggaggatctggccctggggttcttcagagaacaccctctaggggctttggggacatggcctgtccccacatccagcacttgcctccgccatggtcactcggcagcccttttcccaggagaagacacctctgggagcctgctcagtgcttgtcctgccatcctgtgtcctgggactgagggttactccagttgctctgtgttgcatactctcccccgcaagcctgtgtatgaagaattgtcccctggcttccagcaggccatggctggctgttttgtgactgttacattgtgcaggggtaattattagcgtggcttttaaaaaaaaaaaaaaaaaaaaaaaaaaaaaaaaaaaaaaacaaaaaaaaaaaaaaaaaaaaaaaaaaaaaaaaaaaaaaaaaaaaaaaagagagggggggcgcgcgcccaaaaacccccgcgggggggcgcccacacatctcacgcgccgacaccgccgactattcttcgtctgcaacaaggggggcccccacaataagatggggagggacgcgcttttattaaagcacgcaccgagagcgcggcgggcgccggcggtggtatacacacacagaccgagtggagacggtgggagaaaaaacacgttgggacgaacggggggcgatcacttgggtgaggagaagagacgacccctctcttaccttgggggggggggggaacaacataccggtgggcaaacacctacccat

SEQ ID NO: 62912 - DNA, 3349 bp, Homo sapiens
cctggtacggtcccgaattcctctgtggatcgcctccttctgcgaaccgcaccacccagatcccggggtgcgcggagggcgcgtctctgacggaagccggggcggacggtcggagtccggaagaaaaacagtccgcgacagctaggcgcgtgagaccggccgcccgcaggctgctctggccgggacccgctggccgggagacgcgaacctgccggaccaccgcgcggggacgacggcggccatgagctcgcggaagctgagcgggccgaaaggcaggaggctcagcatacacgtcgtgacttggaacgtggcttcggcagcgccccctctagatctcagtgacctgcttcagctgaacaaccggaacctcaatcttgacatatatgttattggtttgcaggaattgaactctgggatcataagcctcctttccgatgctgcctttaatgactcgtggagcagtttcctcatggatgtgctttcccctctgagcttcatcaaggtctcccatgtccgtatgcaggggatcctcttactggtctttgccaagtatcagcatttgccctatatccagattctgtctactaaatccacccccactggcctgtttgggtactgggggaacaaaggtggagtcaacatctgcctgaagctttatggctactatgtcagcatcatcaactgccacctgcctccccacatttccaacaattaccagcggctggagcactttgaccggatcctggagatgcagaattgtgaggggcgagacatcccaaacatcctggaccacgacctcattatctggtttggagacatgaactttcggatcgaggactttgggttgcactttgttcgggaatccattaaaaatcggtgctacggtggcctgtgggagaaggaccagctcagcattgccaagaaacatgacccgctgctccgggagttccaggagggccgcctactcttcccgcccacctacaagtttgataggaactccaacgactatgacaccagaaaaacgcaagcctgcatggaccgatcgcatcctgtggaggctgaagcggcagccctgtgctggcccacctacaagtttgataggaactccaacgactatgacaccagtgagaaaaaacgcaagcctgcatggaccgatcgcatcctgtggaggctgaagcggcagccctgtgctggccccgacactcccataccgccggcgtcacacttctccttgtctctgaggggctacagcagccacatgacgtacggcatcagcgaccacaagcctgtctccggcacgttcgacttggagctgaagccattggtgtctgctccgctgatcgtcctgatgcccgaggacctgtggaccgtggaaaatgacatgatggtcagctactcttcaacctcggacttccccagcagcccgtgggactggattggactgtacaaggtggggctgcgggacgttaatgactacgtgtcctatgcctgggtcggggacagcaaggtctcctgcagcgacaacctgaaccaggtttacatcgacatcagcaatatccctaccactgaagatgagtttctcctctgttactacagcaacagtctgcgttctgtggtggggataagcagacccttccagatcccgcctggctccttgagggaggacccactgggtgaagcacagccacagatctgagccaggatgggagtgaatcccaggcggaggccagagctggcagccagctctgcctttccactgccgggagtgctgggggcccagcctggccccctgaagagacagccaagtgtcgtccacatactcctcccagagtgagctctaaccaggctcatttgctctctccactactcatctctggaattagccgcttaaatacaggtttttgttgctgagatgtgagtgaaaccagctagtgtgtcaacagtgaagacctggggacagttctgcgtctcatttctggattcctaccccctcttctagtcttgcccaagtagtcctgccaggcacatgccccatttggcacaggcctgcattcttgtcgtgccgtcctgggcctcaggctgtctgggaggggagatgctcacatttgtacaggctacatagactggtgcaagcagtgctggattccaggagtcttggcatctcatagcttgtccccgtgaggagtgagcagagggtctgggatttctgctttcagcaaaagcagtctgactcagtgggcagaatggaggggcccctctagccaggctcttacgccatggttatgagcaggttgatgagggtccttcggccagcacaaccttcctccctactcacggcatggagtctgactgcatggaagttccagatcctgacagagagaactgggaaggatccaggttcgcttccgttggtagcttgagtcccatgcctccaccctgccatctgaggaaggggtgacaagtggtcaaggagctgtggccacagacttttccagggtggtccttggcaggtgaggtgcgtctgtgccacccttgtcaggagccattgacgacgggccccccctggaccccccgggacctcagagtgggggcaggcagaagggagaaccagctcaagacattttggaggatctggccctggggttcttcagagaacaccctctaggggctttggggacatggcctgtccccacatccagcacttgcctccgccatggtcactcggcagcccttttcccaggagaagacacctctgggagcctgctcagtgcttgtcctgccatcctgtgtcctgggactgagggttactccagttgctctgtgttgcatactctcccccgcaagcctgtgtatgaagaattgtcccctggcttccagcaggccatggctggctgttttgtgactgttacattgtgcaggggtaattattagcgtggcttttaaaaaaaaaaaaaaaaaaaaaaaaaaaaaaaaaaaaaaacaaaaaaaaaaaaaaaaaaaaaaaaaaaaaaaaaaaaaaaaaaaaaaaagagagggggggcgcgcgcccaaaaacccccgcgggggggcgcccacacatctcacgcgccgacaccgccgactattcttcgtctgcaacaaggggggcccccacaataagatggggagggacgcgcttttattaaagcacgcaccgagagcgcggcgggcgccggcggtggtatacacacacagaccgagtggagacggtgggagaaaaaacacgttgggacgaacggggggcgatcacttgggtgaggagaagagacgacccctctcttaccttgggggggggggggaacaacataccggtgggcaaacacctacccat

SEQ ID NO: 62913 - DNA, 2519 bp, Homo sapiens
tcctgtgtatacgacgggctgtgggagctgcatccttgtgagagccgtgtcgtgcaaacattctggaccacaacctcattatctggtttggagacatgaactttcggatcgaggactttgggttgcactttgttcgggaatccattaaaaatcggtgctacggtggcctgtgggagaaggaccagctcagcattgccaagaaacatgacccgctgctccgggagttccaggagggccgcctactcttcccgcccacctacaagtttgataggaactccaacgactatgacaccagtgagaaaaaacgcaagcctgcatggaccgatcgcatcctgtggaggctgaagcggcagccctgtgctggccccgacactcccataccgccggcgtcacacttctccttgtctctgaggggctacagcagccacatgacgtacggcatcagcgaccacaagcctgtctccggcacgttcgacttggagctgaagccattggtgtctgctccgctgatcgtcctgatgcccgaggacctgtggaccgtggaaaatgacatgatggtcagctactcttcaacctcggacttccccagcagcccgtgggactggattggactgtacaaggtggggctgcgggacgttaatgactacgtgtcctatgcctgggtcggggacagcaaggtctcctgcagcgacaacctgaaccaggtttacatcgacatcagcaatatccctaccactgaagatgagtttctcctctgttactacagcaacagtctgcgttctgtggtggggataagcagacccttccagatcccgcctggctccttgagggaggacccactgggtgaagcacagccacagatctgagccaggatgggagtgaatcccaggcggaggccagagctggcagccagctctgcctttccactgccgggagtgctgggggcccagcctggccccctgaagagacagccaagtgtcgtccacatactcctcccagagtgagctctaaccaggctcatttgctctctccactactcatctctggaattagccgcttaaatacaggtttttgttgctgagatgtgagtgaaaccagctagtgtgtcaacagtgaagacctggggacagttctgcgtctcatttctggattcctaccccctcttctagtcttgcccaagtagtcctgccaggcacatgccccatttggcacaggcctgcattcttgtcgtgccgtcctgggcctcaggctgtctgggaggggagatgctcacatttgtacaggctacatagactggtgcaagcagtgctggattccaggagtcttggcatctcatagcttgtccccgtgaggagtgagcagagggtctgggatttctgctttcagcaaaagcagtctgactcagtgggcagaatggaggggcccctctagccaggctcttacgccatggttatgagcaggttgatgagggtccttcggccagcacaaccttcctccctactcacggcatggagtctgactgcatggaagttccagatcctgacagagagaactgggaaggatccaggttcgcttccgttggtagcttgagtcccatgcctccaccctgccatctgaggaaggggtgacaagtggtcaaggagctgtggccacagacttttccagggtggtccttggcaggtgaggtgcgtctgtgccacccttgtcaggagccattgacgacgggccccccctggaccccccgggacctcagagtgggggcaggcagaagggagaaccagctcaagacattttggaggatctggccctggggttcttcagagaacaccctctaggggctttggggacatggcctgtccccacatccagcacttgcctccgccatggtcactcggcagcccttttcccaggagaagacacctctgggagcctgctcagtgcttgtcctgccatcctgtgtcctgggactgagggttactccagttgctctgtgttgcatactctcccccgcaagcctgtgtatgaagaattgtcccctggcttccagcaggccatggctggctgttttgtgactgttacattgtgcaggggtaattattagcgtggcttttaaaaaaaaaaaaaaaaaaaaaaaaaaaaaaaaaaaaaaacaaaaaaaaaaaaaaaaaaaaaaaaaaaaaaaaaaaaaaaaaaaaaaaagagagggggggcgcgcgcccaaaaacccccgcgggggggcgcccacacatctcacgcgccgacaccgccgactattcttcgtctgcaacaaggggggcccccacaataagatggggagggacgcgcttttattaaagcacgcaccgagagcgcggcgggcgccggcggtggtatacacacacagaccgagtggagacggtgggagaaaaaacacgttgggacgaacggggggcgatcacttgggtgaggagaagagacgacccctctcttaccttgggggggggggggaacaacataccggtgggcaaacacctacccat

SEQ ID NO: 62914 - DNA, 1967 bp, Homo sapiens
cccttccaccaccctccaccagcctcccttccaccagcagcccgtgggactggattggactgtacaaggtggggctgcgggacgttaatgactacgtgtcctatgcctgggtcggggacagcaaggtctcctgcagcgacaacctgaaccaggtttacatcgacatcagcaatatccctaccactgaagatgagtttctcctctgttactacagcaacagtctgcgttctgtggtggggataagcagacccttccagatcccgcctggctccttgagggaggacccactgggtgaagcacagccacagatctgagccaggatgggagtgaatcccaggcggaggccagagctggcagccagctctgcctttccactgccgggagtgctgggggcccagcctggccccctgaagagacagccaagtgtcgtccacatactcctcccagagtgagctctaaccaggctcatttgctctctccactactcatctctggaattagccgcttaaatacaggtttttgttgctgagatgtgagtgaaaccagctagtgtgtcaacagtgaagacctggggacagttctgcgtctcatttctggattcctaccccctcttctagtcttgcccaagtagtcctgccaggcacatgccccatttggcacaggcctgcattcttgtcgtgccgtcctgggcctcaggctgtctgggaggggagatgctcacatttgtacaggctacatagactggtgcaagcagtgctggattccaggagtcttggcatctcatagcttgtccccgtgaggagtgagcagagggtctgggatttctgctttcagcaaaagcagtctgactcagtgggcagaatggaggggcccctctagccaggctcttacgccatggttatgagcaggttgatgagggtccttcggccagcacaaccttcctccctactcacggcatggagtctgactgcatggaagttccagatcctgacagagagaactgggaaggatccaggttcgcttccgttggtagcttgagtcccatgcctccaccctgccatctgaggaaggggtgacaagtggtcaaggagctgtggccacagacttttccagggtggtccttggcaggtgaggtgcgtctgtgccacccttgtcaggagccattgacgacgggccccccctggaccccccgggacctcagagtgggggcaggcagaagggagaaccagctcaagacattttggaggatctggccctggggttcttcagagaacaccctctaggggctttggggacatggcctgtccccacatccagcacttgcctccgccatggtcactcggcagcccttttcccaggagaagacacctctgggagcctgctcagtgcttgtcctgccatcctgtgtcctgggactgagggttactccagttgctctgtgttgcatactctcccccgcaagcctgtgtatgaagaattgtcccctggcttccagcaggccatggctggctgttttgtgactgttacattgtgcaggggtaattattagcgtggcttttaaaaaaaaaaaaaaaaaaaaaaaaaaaaaaaaaaaaaaacaaaaaaaaaaaaaaaaaaaaaaaaaaaaaaaaaaaaaaaaaaaaaaaagagagggggggcgcgcgcccaaaaacccccgcgggggggcgcccacacatctcacgcgccgacaccgccgactattcttcgtctgcaacaaggggggcccccacaataagatggggagggacgcgcttttattaaagcacgcaccgagagcgcggcgggcgccggcggtggtatacacacacagaccgagtggagacggtgggagaaaaaacacgttgggacgaacggggggcgatcacttgggtgaggagaagagacgacccctctcttaccttgggggggggggggaacaacataccggtgggcaaacacctacccat

SEQ ID NO: 62915 - DNA, 298 bp, Homo sapiens
ttctagcaccgggatctttgcttctaataccattcttcaataatataaaccagggctctttagagaaatggctgattataggtctgggaagaatatacacaagatgagcctggagcatcttgtgctaaacaggaagtgctaaaaaaaataaaataaatggtggaagtatgtcaaagggacacaggagcaaatcaagagtttttcatggccaaagctaaaacaatttgagcaacaaaatatattaataagtgttgtattataactccaagtataaatagatattcttgcatctatgttg

SEQ ID NO: 62916 - DNA, 608 bp, Homo sapiens
  misc_feature (92)..(92): n is a, c, g, or t
tgccccaagagatatcccccccaccaacccaagagtggaagggagcctctgcttccccccctcacaaagcttaaatcaaaagaataacgcanctttcctatttcaagatattgacttcgtggccagggaaaccacatgttccaaggaaagtaatgaagagttgaccgaaagctgtgagaccaaaaaacttggccaaagcctagattgcaacgctgaagtttatgtggtaccctgggagaaaaaaatttaccctactgtcaactgtcaaccactgggaatgatctcactgatgaaaaggcctccaggtttttcacctttccgatcatcacgaataggggaaataaaagaagaaacaactagtcacctaaggtcctgcgagtacaagggtcgacccccaaaggcaggggcagagccagcatctgagagggaggtctcttgaccaatgggcagaatcttcactccaggcacatagccccaaccacctctgccagcaaccttgagaggaaggacaagaagaaagatgggatagaatttaaatagagaagaatgccattttatcactctgcctctgggtgaaataaagatcagtcttgatgttctaactctaa

SEQ ID NO: 62917 - DNA, 545 bp, Homo sapiens
ccctatagtgcaaagaaagtatatgcttcataaccaatgttgtacttttgcctagaaaaacaagatatggctttaaatagctacaatcatctttggatgtatatgtcactgctgcttcaagttattggatgcatttgaacctctgagtttgtctttcattttaaatattgtctgttcttttaaataaacaaccacagatgtcaggaaaaagtcttaccttgtcaactggttgctccactttttaaaaatgattgaatgataacatcatattaactgcgttttactatacttacagagtcacctaaggtcctgcgagtacaagggtcgacccccaaaggcaggggcagagccagcatctgagagggaggtctcttgaccaatgggcagaatcttcactccaggcacatagccccaaccacctctgccagcaaccttgagaggaaggacaagaagaaagatgggatagaatttaaatagagaagaatgccattttatcactctgcctctgggtgaaataaagatcagtcttgatgttctaactctaa

SEQ ID NO: 62918 - DNA, 196 bp, Homo sapiens
ggaagtcagggggacacactgctggggagatagagagggtctcttgaccagttgtgaggggaactaacttcttgtccagcaaccttgagaggaaggacaagaagaaagatgggatagaatttaaatagagaagaatgccattttatcactctgcctctgggtgaaataaagatcagtcttgatgttctaactctaa

SEQ ID NO: 62919 - DNA, 451 bp, Homo sapiens
gaatgcacagcaaccgtggggaagaggagcagtacgaaattctccgtggctacccagacctgccagattactccagccgagggccctgtggtgacagcccagtacgactgcctcggctgtgtgcatcctatatcaacgcagagcccaggtttttcacctttccgatcatcacgaataggggaaataaaagaagaaacaactagtcacctaaggtcctgcgagtacaagggtcgacccccaaaggcaggggcagagccagcatctgagagggaggtctcttgaccaatgggcagaatcttcactccaggcacatagccccaaccacctctgccagcaaccttgagaggaaggacaagaagaaagatgggatagaatttaaatagagaagaatgccattttatcactctgcctctgggtgaaataaagatcagtcttgatgttctaactctaa

SEQ ID NO: 62920 - DNA, 687 bp, Homo sapiens
  misc_feature (92)..(92): n is a, c, g, or t
  misc_feature (631)..(631): n is a, c, g, or t
tgccccaagagatatcccccccaccaacccaagagtggaagggagcctctgcttccccccctcacaaagcttaaatcaaaagaataacgcanctttcctatttcaagatattgacttcgtggccagggaaaccacatgttccaaggaaagtaatgaagagttgaccgaaagctgtgagaccaaaaaacttggccaaagcctagattgcaacgctgaagtttatgtggtaccctgggagaaaaaaatttaccctactgtcaactgtcaaccactgggaatgatctcactgatgaaaaggcctccaggtttttcacctttccgatcatcacgaataggggaaataaaagaagaaacaactagtcacctaaggtcctgcgagtacaagggtcgacccccaaaggcaggggcagagccagcatctgagagggaggtctcttgaccaatgggcagaatcttcactccaggcacatagccccaaccacctctgccagcaaccttgagaggaaggacaagaagaaagatgggatagaatttaaatagagaagaatgccattttatcactctgcctctgggtgaaataaagatcagtcttgatgttctaactctaagagcatatgaaagcaagtgttanggaggttagagggttaaaatcttctgcaatgggttgtaagaataaaaaaaactcga

SEQ ID NO: 62921 - DNA, 4574 bp, Homo sapiens
gaattccgggagcccgcggaggctgctgcagcagcccgaaccggcgtccgagtccggggaaggcccccgcgagcgcagggaggggccggaaagttccggcgaactgggggagcggcagtgggagagcgtcgggcgggaggcggtggtcctgggagcggccccggcgcccgaagccgccccgagctggtggggagggtcccggccggtggggccgggctggcgggggaggggcgcctgggggtgcaagaggcgaattggctgcccggggtgcaggagggacaggtggtgcgggctgtcaggaaacctacctgaacgggaaggagccccaggagggagagggacccggcgagggctcaggacccggaggcgccggcggaggaggaggtggtgactggcaggcccgggccccacggtacctccggggctgaaggggacgcaggatgtaggggcatggggagtcgggcgcagaagagtgcggggaacgctgagctctgggagccactgcctgagggcaggccgcggccggcgggaacctcttctgccgtctcagcctgggcgtcgctgaagctgtgtctgcggggaggcagcggaaggcggcagaggctgggaggcggcagaatgcagccagaggagggcacaggctggctgctggagctgctgtccgaggtgcagctgcaacagtacttcctgcggctccgagatgacctcaacgtcacccgcctgtcccactttgagtacgtcaagaatgaggacctggagaagatcggcatgggtcggcctggccagcggcggctgtgggaggctgtgaagaggaggaaggccttgtgcaaacgcaagtcgtggatgagtaaggtgttcagtggaaagcgactggaggctgagttcccacctcatcactctcagagcaccttccggaagacctcgcccgcccctgggggcccagcaggggaggggcccctgcagagcctcacctgcctcattggggagaaggacctgcgcctcctggagaagctgggtgatggttcctttggcgtggtgcgcaggggcgagtgggacgcgccctcagggaagacggtgagtgtggctgtgaagtgcctgaagcccgatgtcctgagccagccagaagccatggacgacttcatccgggaggtcaatgccatgcactcgctcgaccaccgaaacctcatccgcctctacggggtggtgctcacgccgcccatgaagatggtgacagagctggcacctctgggatcgttgttggaccggctacgtaagcaccagggccacttcctcctggggactctgagccgctacgctgtgcaggtggctgagggcatgggctacctggagtccaagcgctttattcaccgtgacctggctgcccgcaatctgctgttggctacccgcgacctggtcaagatcggggactttgggctgatgcgagcactacctcagaatgacgaccattacgtcatgcaggaacatcgcaaggtgcccttcgcctggtgtgcccccgagagcctgaagacacgcaccttctcccatgccagcgacacctggatgttcggggtgacactgtgggaaatgttcacctacggccaggagccctggatcggcctcaacggcagtcagatcctgcataagatcgacaaggagggggagcggctgccccggcccgaggactgtccccaggacatctacaacgtcatggtccagtgctgggctcacaagccagaggacagacccacgtttgtggccctgcgggacttcctgctggaggcccagcccacagacatgcgggcccttcaggactttgaggaaccggacaagctgcacatccagatgaatgatgtcatcaccgtcatcgagggaagggccgagaactactggtggcgtggccagaacacacggacgctgtgtgtggggcccttccctcgcaacgtggtgacctccgtggccggcctgtcggcccaggacatcagccagcccctgcagaacagcttcatccacacagggcatggcgacagtgacccccgccactgctggggcttcccggacaggattgacgaactgtatctgggaaaccccatggacccccccgacctcctgagcgtggaactgagcacctcccggcccccccagcatctaggaggggtgaaaaaaccaacctatgaccctgtgagcgaggaccaagaccccttgtccagcgacttcaagaggctgggcctgcggaagccaggcctgccccgagggctgtggctggcgaagccctcggcgcgggtgccgggcaccaaggccagccgaggcagcggggctgaggtcacgctcatcgacttcggtgaggagcccgtggtcccggccctacggccctgcgcgccctccctggcgcagctggccatggacgcctgctccctgctggacgagaccccgcctcagagccccacgcgggcactgccccggcccctgcaccccacgcctgtggtggactgggacgcacgcccgctgccccccccgcccgcctatgacgacgtggcccaggatgaggatgactttgagatctgctccatcaacagcaccctcgtgggcgcgggggtccctgccgggcccagccagggccagaccaactacgcctttgtgcctgagcaggcgcggccgccccctcccctggaggacaacctgttcctcccgccccagggtgggggcaagccgcccagctccgcacagaccgcagagatcttccaggcgctacagcaggagtgcatgaggcaactgcaggctccggccggctccccggccccctctcccagcccggggggtgacgacaagccccaggtgcctcctcgggtacccatcccccctcggcccacgcgcccacacgtccagctgtctccagcccccccgggcgaggaggagaccagccagtggcctggacctgcttcccctccccgggtgcctccgcgggagcccctgtcccctcaaggctcgaggacacccagccccctggtaccacctggcagctccccgctgccaccccggctctcaagctcacctgggaagaccatgcccaccacccagagctttgcctcagaccccaagtacgccaccccccaggtgatccaggcccctggcccgcgggctggtccctgcatcctgcccatcgtccgggatggcaagaaggtcagcagcacccactattacttgctgcccgagcgaccatcctacctggagcgctaccagcgcttcctgcgtgaggcccagagccccgaggagcctaccgcccctgcctgtgcctctgctgctgcccccacccagcaccccagcccccgccgcccccacggccaccgtgcggccgatgccccaggctgccttggaccccaaggccaacttctccaccaacaacagcaacccaggggcccggccaccacccccgagggccactgctcggctgccacagaggggctgccctggcgatgggccagaggcgggccggccagcagacaagatccagatggccatggtgcatggggtgaccacagaggagtgccaggcggccctgcagtgccacggctggagcgtgcagagggctgcccagtatctgaaggtggagcagctcttcgggctgggtctgcggcccagaggggagtgccacaaagtgctggagatgttcgactggaacctggagcaggccggctgccaccttctgggctcctggggccctgcccaccacaagcgctgagatgcgtctggagagccagagggcctgcctgaaggaatcacctgagcctgtccgtccaccaggagtggggagatgcccccatccagtcctggaggacccgctgctcctgctgctcccggggatggagcaaggccaaggctgcgggaggctgggagccctgccctgcccatccctcccgcaccagcgctgtccctgcacactttggttcagtcccggtgcccctgccaagatgtggaaggggccgggtgaagacaggcttgagggctgccccagcaggctctgggtatgacctgcctctggccctggtcctgggcggggcctgtgggtggagtagtacccccaggccctgccctgggtgacagactgggaggaaaccaggctggacctgggcaggcgggatgtgttggccacagggagaggcggaccggcacccggtgggacctcctaggactgggccttcttccagggggcccctggcagcagctggggtgtcgggcagaatgtgacttgtggccttaccatggacttgaatgggacttggctggcctcaggatcttgtgcctggaaatagcctgaggtggctcaggaagcggagaaagggtgccagaccattctctggcggggaccagggcccaaggccccagggctggaaggagaccaaggggcagccgccctggagggacatcagtgcttcctcttccacccaattcccccacgcggttccatgttttcccaccagcctgttggcgaagttgctgctccggcattcagtacctgcttcttccagagaaataaagttagtttctattttatgttaaaaaacaaaaaaagtcgacga

SEQ ID NO: 62922 - DNA, 1935 bp, Homo sapiens
ggcacgagggagagagaacctggagcaggccggctgccaccttctgggctcctggggccctgcccaccacaagcgctgagatgcgtctggagagccagagggcctgcctgaaggaatcacctgagcctgtccgtccaccaggagtggggagatgcccccatccagtcctggaggacccgctgctcctgctgctcccggggatggagcaaggccaaggctgcgggaggctgggagccctgccctgcccatccctcccgcaccagcgctgtccctgcacatcttggcaggggcacgattccggatctcattgccacgcgcccccgacgaccgcccgacgtgcattcccgattccttttggttccaagtccaatatggcaactctaaaggatcagctgatttataatcttctaaaggaagaacagaccccccagaataagattacagttgttggggttggtgctgttggcatggcctgtgccatcagtatcttaatgaaggacttggcagatgaacttgctcttgttgatgtcatcgaagacaaattgaagggagagatgatggatctccaacatggcagccttttccttagaacaccaaagattgtctctggcaaagactataatgtaactgcaaactccaagctggtcattatcacggctggggcacgtcagcaagagggagaaagccgtcttaatttggtccagcgtaacgtgaacatctttaaattcatcattcctaatgttgtaaaatacagcccgaactgcaagttgcttattgtttcaaatccagtggatatcttgacctacgtggcttggaagataagtggttttcccaaaaaccgtgttattggaagtggttgcaatctggattcagcccgattccgttacctgatgggggaaaggctgggagttcacccattaagctgtcatgggtgggtccttggggaacatggagattccagtgtgcctgtatggagtggaatgaatgttgctggtgtctctctgaagactctgcacccagatttagggactgataaagataaggaacagtggaaagaggttcacaagcaggtggttgagagtgcttatgaggtgatcaaactcaaaggctacacatcctgggctattggactctctgtagcagatttggcagagagtataatgaagaatcttaggcgggtgcacccagtttccaccatgattaagggtctttacggaataaaggatgatgtcttccttagtgttccttgcattttgggacagaatggaatctcagaccttgtgaaggtgactctgacttctgaggaagaggcccgtttgaagaagagtgcagatacactttgggggatccaaaaggagctgcaattttaaagtcttctgatgtcatatcatttcactgtctaggctacaacaggattctaggtggaggttgtgcatgttgtcctttttatctgatctgtgattaaagcagtaatattttaagatggactgggaaaaacatcaactcctgaagttagaaataagaatggtttgtaaaatccacagctatatcctgatgctggatggtattaatcttgtgtagtcttcaactggttagtgtgaaatagttctgccacctctgacgcaccactgccaatgctgtacgtactgcatttgccccttgagccaggtggatgtttaccgtgtgttatataacttcctggctccttcactgaacatgcctagtccaacattttttcccagtgagtcacatcctgggatccagtgtataaatccaatatcatgtcttgtgcataattcttccaaaggatcttattttgtgaactatatcagtagtgtacattaccatataatgtaaaaagatctacatacaaacaatgcaaccaactatccaagtgttataccaactaaaacccccaataaaccttgaacagtg

SEQ ID NO: 62923 - DNA, 2166 bp, Homo sapiens
  misc_feature (922)..(922): n is a, c, g, or t
  misc_feature (1489)..(1489): n is a, c, g, or t
tgtcttcagtgaaatgataccggtccccactgcccagctcacctcccggggctgcaggaggcaccggagataatggctgtagagggtcttgtaacctgaacattgcttgcaaacataaggaattctagttactgggaggaagcacagggcagaggccagaagaggccctcagatttgaggcaccctagcccagacggataaggatccaccagctctgggggcgtgagacccaagctggcaagaatctgcaatctggagccaaggctgtgggtgcctcagtggaggccgagtcagaccgacgtggccagctttgaccctcatggcctcctttcttctgtcccttgaccttcggctcctccctgtccaccctggcctccgagtctcctccacttttccttccgtctcagccctcagctctaggcgcccctccagagacccagctgtcttcccaggccccttcccagcaaggactagcttcatctgaaccacacacacactcacggttcaacctcagactaaaattatcctctcccctgggcaggatgaagggcagccgactccctggtgagggtggagacagacagcaccaaatggtcaggccagagaaggggccagggctaaaaatggacaaggaggtgtctgtggagggcccctgcggctccatcgatgcgggttagggctggagtctgcggggtggcgggtgcaggaagggagggtggggcaggactgggaggagactccgaccttggctgggcggtgccctccctctccacacagctgggtgtggggccgctcagccacaggctgcatgcctgtcggtctctttctggcaccctccttgaggccagcatcaggctttgggttcatgtttgggggtgtgccctggacggagtgtgggcctccagccaggctgccccactgncagtttggcaaaaccaggacctatctggaagccgaagccggggatcaccaggtggacccagcggggtgggactgagtgactgaccctggggtgttggattccatctggcccccggctgccttcaaacaggtgttcagtggaaagcgactggaggctgagttcccacctcatcactctcagagcaccttccggaagacctcgcccgcccctgggggcccagcaggggaggggcccctgcagagcctcacctgcctcattggggagaaggacctgcgcctcctggagaagctgggtgatggttcctttggcgtggtgcgcaggggcgagtgggacgcgccctcagggaagacggtgagctctctgtgtcctgccagcgcagcagaggcatgggacccggggctggtagtggctcttctgcccccaaccagggtgtggatgggactggggatgcgtcacagtgtggctcatcccagagtccgtgctcaggatttttggggttttatttatttatttatttttgagatggagtctcgctctgtcgcccaggctggagtgcagtaggcacgntctcggcttcctgcaacctccactttccgggttcaagcaatcctcctgcctcagcctcctgagtagctgggattacaggcatgcaccaccacactcagttaatttttgtatttttagtagagacggggtttcaccatgttggccaggctggtctcgaactcctgacctcagatgatctgcccactttagcctcccaaagtgcttggattacaggtgtgagccaccacgtccagcccatgctcaggtttaactaagcacatttattatttcaactataaaaataatttattataaaagtttggaaagtatttgaaaaacaagaaaaaaaaaatcgcctgtaatcccaccactcagaggaagccgagcctcttcctcccactttaggtattttgttggatttagttaagatacaaattctggatacagcttttaaaatcttgttctttcttctcggcgttgcatttaacattttcccctcagggataacgtgtcaccacagcatacagttctggtgtgactgtttcctgtgcagcagccgtgtccttactgctcagatcacgtgcggtgcattcccagcacctcagagggctcctcattctccgtccactcagtgcgtccttctcccggggaagccgctgtcactcagtgcatccttctcccggggaagccgctgtgca

SEQ ID NO: 62924 - DNA, 4352 bp, Homo sapiens
gcagttgggtggggaagccggggagtagggctggactgtgaccactgccctggagagaagacatgaaacaggacagaggatcccggctgcagccagcgtgaggaaagctctgctccctgccagaccggccagctgtggaaacccagcggggcttgcagcagagcggaggggcccaccccgttcttcctcatttcccacccctggtgtgggatttggggggctcctgggcagagtgcgaagctccggagccgaggccactggatccccagtgactgctcgggggggtcccgctgcgtggagatgccggcagcacgtcggttccctggcctggagctctccttccctctcctggccagactgcggcgacgcctgtacacaaggctgggaggcggcagaatgcagccagaggagggcacaggctggctgctggagctgctgtccgaggtgcagctgcaacagtacttcctgcggctccgagatgacctcaacgtcacccgcctgtcccactttgagtacgtcaagaatgaggacctggagaagatcggcatgggtcggcctggccagcggcggctgtgggaggctgtgaagaggaggaaggccttgtgcaaacgcaagtcgtggatgagtaaggtgttcagtggaaagcgactggaggctgagttcccacctcatcactctcagagcaccttccggaagacctcgcccgcccctgggggcccagcaggggaggggcccctgcagagcctcacctgcctcattggggagaaggacctgcgcctcctggagaagctgggtgatggttcctttggcgtggtgcgcaggggcgagtgggacgcgccctcagggaagacggtgagtgtggctgtgaagtgcctgaagcccgatgtcctgagccagccagaagccatggacgacttcatccgggaggtcaatgccatgcactcgctcgaccaccgaaacctcatccgcctctacggggtggtgctcacgccgcccatgaagatggtgacagagctggcacctctgggatcgttgttggaccggctacgtaagcaccagggccacttcctcctggggactctgagccgctacgctgtgcaggtggctgagggcatgggctacctggagtccaagcgctttattcaccgtgacctggctgcccgcaatctgctgttggctacccgcgacctggtcaagatcggggactttgggctgatgcgagcactacctcagaatgacgaccattacgtcatgcaggaacatcgcaaggtgcccttcgcctggtgtgcccccgagagcctgaagacacgcaccttctcccatgccagcgacacctggatgttcggggtgacactgtgggaaatgttcacctacggccaggagccctggatcggcctcaacggcagtcagatcctgcataagatcgacaaggagggggagcggctgccccggcccgaggactgtccccaggacatctacaacgtcatggtccagtgctgggctcacaagccagaggacagacccacgtttgtggccctgcgggacttcctgctggaggcccagcccacagacatgcgggcccttcaggactttgaggaaccggacaagctgcacatccagatgaatgatgtcatcaccgtcatcgagggaagggccgagaactactggtggcgtggccagaacacacggacgctgtgtgtggggcccttccctcgcaacgtggtgacctccgtggccggcctgtcggcccaggacatcagccagcccctgcagaacagcttcatccacacagggcatggcgacagtgacccccgccactgctggggcttcccggacaggattgacgaactgtatctgggaaaccccatggacccccccgacctcctgagcgtggaactgagcacctcccggcccccccagcatctaggaggggtgaaaaaaccaacctatgaccctgtgagcgaggaccaagaccccttgtccagcgacttcaagaggctgggcctgcggaagccaggcctgccccgagggctgtggctggcgaagccctcggcgcgggtgccgggcaccaaggccagccgaggcagcggggctgaggtcacgctcatcgacttcggtgaggagcccgtggtcccggccctacggccctgcgcgccctccctggcgcagctggccatggacgcctgctccctgctggacgagaccccgcctcagagccccacgcgggcactgccccggcccctgcaccccacgcctgtggtggactgggacgcacgcccgctgccccccccgcccgcctatgacgacgtggcccaggatgaggatgactttgagatctgctccatcaacagcaccctcgtgggcgcgggggtccctgccgggcccagccagggccagaccaactacgcctttgtgcctgagcaggcgcggccgccccctcccctggaggacaacctgttcctcccgccccagggtgggggcaagccgcccagctccgcacagaccgcagagatcttccaggcgctacagcaggagtgcatgaggcaactgcaggctccggccggctccccggccccctctcccagcccggggggtgacgacaagccccaggtgcctcctcgggtacccatcccccctcggcccacgcgcccacacgtccagctgtctccagcccccccgggcgaggaggagaccagccagtggcctggacctgcttcccctccccgggtgcctccgcgggagcccctgtcccctcaaggctcgaggacacccagccccctggtaccacctggcagctccccgctgccaccccggctctcaagctcacctgggaagaccatgcccaccacccagagctttgcctcagaccccaagtacgccaccccccaggtgatccaggcccctggcccgcgggctggtccctgcatcctgcccatcgtccgggatggcaagaaggtcagcagcacccactattacttgctgcccgagcgaccatcctacctggagcgctaccagcgcttcctgcgtgaggcccagagccccgaggagcctaccgcccctgcctgtgcctctgctgctgcccccacccagcaccccagcccccgccgcccccacggccaccgtgcggccgatgccccaggctgccttggaccccaaggccaacttctccaccaacaacagcaacccaggggcccggccaccacccccgagggccactgctcggctgccacagaggggctgccctggcgatgggccagaggcgggccggccagcagacaagatccagatggccatggtgcatggggtgaccacagaggagtgccaggcggccctgcagtgccacggctggagcgtgcagagggctgcccagtatctgaaggtggagcagctcttcgggctgggtctgcggcccagaggggagtgccacaaagtgctggagatgttcgactggaacctggagcaggccggctgccaccttctgggctcctggggccctgcccaccacaagcgctgagatgcgtctggagagccagagggcctgcctgaaggaatcacctgagcctgtccgtccaccaggagtggggagatgcccccatccagtcctggaggacccgctgctcctgctgctcccggggatggagcaaggccaaggctgcgggaggctgggagccctgccctgcccatccctcccgcaccagcgctgtccctgcacactttggttcagtcccggtgcccctgccaagatgtggaaggggccgggtgaagacaggcttgagggctgccccagcaggctctgggtatgacctgcctctggccctggtcctgggcggggcctgtgggtggagtagtacccccaggccctgccctgggtgacagactgggaggaaaccaggctggacctgggcaggcgggatgtgttggccacagggagaggcggaccggcacccggtgggacctcctaggactgggccttcttccagggggcccctggcagcagctggggtgtcgggcagaatgtgacttgtggccttaccatggacttgaatgggacttggctggcctcaggatcttgtgcctggaaatagcctgaggtggctcaggaagcggagaaagggtgccagaccattctctggcggggaccagggcccaaggccccagggctggaaggagaccaaggggcagccgccctggagggacatcagtgcttcctcttccacccaattcccccacgcggttccatgttttcccaccagcctgttggcgaagttgctgctccggcattcagtacctgcttcttccagagaaataaagttagtttctattttatgttaaaaaacaaaaaaagtcgacga

SEQ ID NO: 62925 - DNA, 4525 bp, Homo sapiens
gcagttgggtggggaagccggggagtagggctggactgtgaccactgccctggagagaagacatgaaacaggacagaggatcccggctgcagccagcgtgaggaaagctctgctccctgccagaccggccagctgtggaaacccagcggggcttgcagcagagcggaggggcccaccccgttcttcctcatttcccacccctggtgtgggatttggggggctcctgggcagagtgcgaagctccggagccgaggccactggatccccagtgactgctcgggggggtcccgctgcgtggagatgccggcagcacgtcggttccctggcctggagctctccttccctctcctggccagactgcggcgacgcctgtacacaaggctgggaggcggcagaatgcagccagaggagggcacaggctggctgctggagctgctgtccgaggtgcagctgcaacagtacttcctgcggctccgagatgacctcaacgtcacccgcctgtcccactttgagtacgtcaagaatgaggacctggagaagatcggcatgggtcggcctggccagcggcggctgtgggaggctgtgaagaggaggaaggccttgtgcaaacgcaagtcgtggatgagtaaggtgttcagtggaaagcgactggaggctgagttcccacctcatcactctcagagcaccttccggaagacctcgcccgcccctgggggcccagcaggggaggggcccctgcagagcctcacctgcctcattggggagaaggacctgcgcctcctggagaagctgggtgatggttcctttggcgtggtgcgcaggggcgagtgggacgcgccctcagggaagacggtgagtgtggctgtgaagtgcctgaagcccgatgtcctgagccagccagaagccatggacgacttcatccgggaggtcaatgccatgcactcgctcgaccaccgaaacctcatccgcctctacggggtggtgctcacgccgcccatgaagatggtgacagagctggcacctctgggatcgttgttggaccggctacgtaagcaccagggccacttcctcctggggactctgagccgctacgctgtgcaggtggctgagggcatgggctacctggagtccaagcgctttattcaccgtgacctggctgcccgcaatctgctgttggctacccgcgacctggtcaagatcggggactttgggctgatgcgagcactacctcagaatgacgaccattacgtcatgcaggaacatcgcaaggtgcccttcgcctggtgtgcccccgagagcctgaagacacgcaccttctcccatgccagcgacacctggatgttcggggtgacactgtgggaaatgttcacctacggccaggagccctggatcggcctcaacggcagtcagatcctgcataagatcgacaaggagggggagcggctgccccggcccgaggactgtccccaggacatctacaacgtcatggtccagtgctgggctcacaagccagaggacagacccacgtttgtggccctgcgggacttcctgctggaggcccagcccacagacatgcgggcccttcaggactttgaggaaccggacaagctgcacatccagatgaatgatgtcatcaccgtcatcgagggaagggccgagaactactggtggcgtggccagaacacacggacgctgtgtgtggggcccttccctcgcaacgtggtgacctccgtggccggcctgtcggcccaggacatcagccagcccctgcagaacagcttcatccacacagggcatggcgacagtgacccccgccactgctggggcttcccggacaggattgacgagacaccccccagctgagacgtgcggtcaggttctgtggactgggaggcgggaggcctgtgcttcagacccaagactacacccggtttcctccaggacgaaggggctctgatgagattctgccacccctccacacgcttcccctgctctcttgacccagctctctcccccacagactgtatctgggaaaccccatggacccccccgacctcctgagcgtggaactgagcacctcccggcccccccagcatctaggaggggtgaaaaaaccaacctatgaccctgtgagcgaggaccaagaccccttgtccagcgacttcaagaggctgggcctgcggaagccaggcctgccccgagggctgtggctggcgaagccctcggcgcgggtgccgggcaccaaggccagccgaggcagcggggctgaggtcacgctcatcgacttcggtgaggagcccgtggtcccggccctacggccctgcgcgccctccctggcgcagctggccatggacgcctgctccctgctggacgagaccccgcctcagagccccacgcgggcactgccccggcccctgcaccccacgcctgtggtggactgggacgcacgcccgctgccccccccgcccgcctatgacgacgtggcccaggatgaggatgactttgagatctgctccatcaacagcaccctcgtgggcgcgggggtccctgccgggcccagccagggccagaccaactacgcctttgtgcctgagcaggcgcggccgccccctcccctggaggacaacctgttcctcccgccccagggtgggggcaagccgcccagctccgcacagaccgcagagatcttccaggcgctacagcaggagtgcatgaggcaactgcaggctccggccggctccccggccccctctcccagcccggggggtgacgacaagccccaggtgcctcctcgggtacccatcccccctcggcccacgcgcccacacgtccagctgtctccagcccccccgggcgaggaggagaccagccagtggcctggacctgcttcccctccccgggtgcctccgcgggagcccctgtcccctcaaggctcgaggacacccagccccctggtaccacctggcagctccccgctgccaccccggctctcaagctcacctgggaagaccatgcccaccacccagagctttgcctcagaccccaagtacgccaccccccaggtgatccaggcccctggcccgcgggctggtccctgcatcctgcccatcgtccgggatggcaagaaggtcagcagcacccactattacttgctgcccgagcgaccatcctacctggagcgctaccagcgcttcctgcgtgaggcccagagccccgaggagcctaccgcccctgcctgtgcctctgctgctgcccccacccagcaccccagcccccgccgcccccacggccaccgtgcggccgatgccccaggctgccttggaccccaaggccaacttctccaccaacaacagcaacccaggggcccggccaccacccccgagggccactgctcggctgccacagaggggctgccctggcgatgggccagaggcgggccggccagcagacaagatccagatggccatggtgcatggggtgaccacagaggagtgccaggcggccctgcagtgccacggctggagcgtgcagagggctgcccagtatctgaaggtggagcagctcttcgggctgggtctgcggcccagaggggagtgccacaaagtgctggagatgttcgactggaacctggagcaggccggctgccaccttctgggctcctggggccctgcccaccacaagcgctgagatgcgtctggagagccagagggcctgcctgaaggaatcacctgagcctgtccgtccaccaggagtggggagatgcccccatccagtcctggaggacccgctgctcctgctgctcccggggatggagcaaggccaaggctgcgggaggctgggagccctgccctgcccatccctcccgcaccagcgctgtccctgcacactttggttcagtcccggtgcccctgccaagatgtggaaggggccgggtgaagacaggcttgagggctgccccagcaggctctgggtatgacctgcctctggccctggtcctgggcggggcctgtgggtggagtagtacccccaggccctgccctgggtgacagactgggaggaaaccaggctggacctgggcaggcgggatgtgttggccacagggagaggcggaccggcacccggtgggacctcctaggactgggccttcttccagggggcccctggcagcagctggggtgtcgggcagaatgtgacttgtggccttaccatggacttgaatgggacttggctggcctcaggatcttgtgcctggaaatagcctgaggtggctcaggaagcggagaaagggtgccagaccattctctggcggggaccagggcccaaggccccagggctggaaggagaccaaggggcagccgccctggagggacatcagtgcttcctcttccacccaattcccccacgcggttccatgttttcccaccagcctgttggcgaagttgctgctccggcattcagtacctgcttcttccagagaaataaagttagtttctattttatgttaaaaaacaaaaaaagtcgacga

SEQ ID NO: 62926 - DNA, 4264 bp, Homo sapiens
gcagttgggtggggaagccggggagtagggctggactgtgaccactgccctggagagaagacatgaaacaggacagaggatcccggctgcagccagcgtgaggaaagctctgctccctgccagaccggccagctgtggaaacccagcggggcttgcagcagagcggaggggcccaccccgttcttcctcatttcccacccctggtgtgggatttggggggctcctgggcagagtgcgaagctccggagccgaggccactggatccccagtgactgctcgggggggtcccgctgcgtggagatgccggcagcacgtcggttccctggcctggagctctccttccctctcctggccagactgcggcgacgcctgtacacaaggctgggaggcggcagaatgcagccagaggagggcacaggctggctgctggagctgctgtccgaggtgcagctgcaacagtacttcctgcggctccgagatgacctcaacgtcacccgcctgtcccactttgagtacgtcaagaatgaggacctggagaagatcggcatgggtcggcctggccagcggcggctgtgggaggctgtgaagaggaggaaggccttgtgcaaacgcaagtcgtggatgagtaaggtgttcagtggaaagcgactggaggctgagttcccacctcatcactctcagagcaccttccggaagacctcgcccgcccctgggggcccagcaggggaggggcccctgcagagcctcacctgcctcattggggagaaggacctgcgcctcctggagaagctgggtgatggttcctttggcgtggtgcgcaggggcgagtgggacgcgccctcagggaagacggtgagtgtggctgtgaagtgcctgaagcccgatgtcctgagccagccagaagccatggacgacttcatccgggaggtcaatgccatgcactcgctcgaccaccgaaacctcatccgcctctacggggtggtgctcacgccgcccatgaagatggtgacagagctggcacctctgggatcgttgttggaccggctacgtaagcaccagggccacttcctcctggggactctgagccgctacgctgtgcaggtggctgagggcatgggctacctggagtccaagcgctttattcaccgtgacctggctgcccgcaatctgctgttggctacccgcgacctggtcaagatcggggactttgggctgatgcgagcactacctcagaatgacgaccattacgtcatgcaggaacatcgcaaggtgcccttcgcctggtgtgcccccgagagcctgaagacacgcaccttctcccatgccagcgacacctggatgttcggggtgacactgtgggaaatgttcacctacggccaggagccctggatcggcctcaacggcagtcagatcctgcataagatcgacaaggagggggagcggctgccccggcccgaggactgtccccaggacatctacaacgtcatggtccagtgctgggctcacaagccagaggacagacccacgtttgtggccctgcgggacttcctgctggaggcccagcccacagacatgcgggcccttcaggactttgaggaaccggacaagctgcacatccagatgaatgatgtcatcaccgtcatcgagggaagggccgagaactactggtggcgtggccagaacacacggacgctgtgtgtggggcccttccctcgcaacgtggtgacctccgtggccggcctgtcggcccaggacatcagccagcccctgcagaacagcttcatccacacagggcatggcgacagtgacccccgccactgctggggcttcccggacaggattgacgaactgtatctgggaaaccccatggacccccccgacctcctgagcgtggaactgagcacctcccggcccccccagcatctaggaggggtgaaaaaaccaacctatgaccctgtgagcgaggaccaagaccccttgtccagcgacttcaagaggctgggcctgcggaagccaggcctgccccgagggctgtggctggcgaagccctcggcgcgggtgccgggcaccaaggccagccgaggcagcggggctgaggtcacgctcatcgacttcggtgaggagcccgtggtcccggccctacggccctgcgcgccctccctggcgcagctggccatggacgcctgctccctgctggacgagaccccgcctcagagccccacgcgggcactgccccggcccctgcaccccacgcctgtggtggactgggacgcacgcccgctgccccccccgcccgcctatgacgacgtggcccaggatgaggatgactttgagatctgctccatcaacagcaccctcgtgggcgcgggggtccctgccgggcccagccagggccagaccaactacgcctttgtgcctgagcaggcgcggccgccccctcccctggaggacaacctgttcctcccgccccagggtgggggcaagccgcccagctccgcacagaccgcagagatcttccaggcgctacagcaggagtgcatgaggcaactgcaggctccggccggctccccggccccctctcccagcccggggggtgacgacaagccccaggtgcctcctcgggtacccatcccccctcggcccacgcgcccacacgtccagctgtctccagcccccccgggcgaggaggagaccagccagtggcctggacctgcttcccctccccgggtgcctccgcgggagcccctgtcccctcaaggctcgaggacacccagccccctggtaccacctggcagctccccgctgccaccccggctctcaagctcactggtccctgcatcctgcccatcgtccgggatggcaagaaggtcagcagcacccactattacttgctgcccgagcgaccatcctacctggagcgctaccagcgcttcctgcgtgaggcccagagccccgaggagcctaccgcccctgcctgtgcctctgctgctgcccccacccagcaccccagcccccgccgcccccacggccaccgtgcggccgatgccccaggctgccttggaccccaaggccaacttctccaccaacaacagcaacccaggggcccggccaccacccccgagggccactgctcggctgccacagaggggctgccctggcgatgggccagaggcgggccggccagcagacaagatccagatggccatggtgcatggggtgaccacagaggagtgccaggcggccctgcagtgccacggctggagcgtgcagagggctgcccagtatctgaaggtggagcagctcttcgggctgggtctgcggcccagaggggagtgccacaaagtgctggagatgttcgactggaacctggagcaggccggctgccaccttctgggctcctggggccctgcccaccacaagcgctgagatgcgtctggagagccagagggcctgcctgaaggaatcacctgagcctgtccgtccaccaggagtggggagatgcccccatccagtcctggaggacccgctgctcctgctgctcccggggatggagcaaggccaaggctgcgggaggctgggagccctgccctgcccatccctcccgcaccagcgctgtccctgcacactttggttcagtcccggtgcccctgccaagatgtggaaggggccgggtgaagacaggcttgagggctgccccagcaggctctgggtatgacctgcctctggccctggtcctgggcggggcctgtgggtggagtagtacccccaggccctgccctgggtgacagactgggaggaaaccaggctggacctgggcaggcgggatgtgttggccacagggagaggcggaccggcacccggtgggacctcctaggactgggccttcttccagggggcccctggcagcagctggggtgtcgggcagaatgtgacttgtggccttaccatggacttgaatgggacttggctggcctcaggatcttgtgcctggaaatagcctgaggtggctcaggaagcggagaaagggtgccagaccattctctggcggggaccagggcccaaggccccagggctggaaggagaccaaggggcagccgccctggagggacatcagtgcttcctcttccacccaattcccccacgcggttccatgttttcccaccagcctgttggcgaagttgctgctccggcattcagtacctgcttcttccagagaaataaagttagtttctattttatgttaaaaaacaaaaaaagtcgacga

SEQ ID NO: 62927 - DNA, 4045 bp, Homo sapiens
gcagttgggtggggaagccggggagtagggctggactgtgaccactgccctggagagaagacatgaaacaggacagaggatcccggctgcagccagcgtgaggaaagctctgctccctgccagaccggccagctgtggaaacccagcggggcttgcagcagagcggaggggcccaccccgttcttcctcatttcccacccctggtgtgggatttggggggctcctgggcagagtgcgaagctccggagccgaggccactggatccccagtgactgctcgggggggtcccgctgcgtggagatgccggcagcacgtcggttccctggcctggagctctccttccctctcctggccagactgcggcgacgcctgtacacaaggctgggaggcggcagaatgcagccagaggagggcacaggctggctgctggagctgctgtccgaggtgcagctgcaacagtacttcctgcggctccgagatgacctcaacgtcacccgcctgtcccactttgagtacgtcaagaatgaggacctggagaagatcggcatgggtcggcctggccagcggcggctgtgggaggctgtgaagaggaggaaggccttgtgcaaacgcaagtcgtggatgagtaaggtgttcagtggaaagcgactggaggctgagttcccacctcatcactctcagagcaccttccggaagacctcgcccgcccctgggggcccagcaggggaggggcccctgcagagcctcacctgcctcattggggagaaggacctgcgcctcctggagaagctgggtgatggttcctttggcgtggtgcgcaggggcgagtgggacgcgccctcagggaagacggtgagtgtggctgtgaagtgcctgaagcccgatgtcctgagccagccagaagccatggacgacttcatccgggaggtcaatgccatgcactcgctcgaccaccgaaacctcatccgcctctacggggtggtgctcacgccgcccatgaagatggtgacagagctggcacctctgggatcgttgttggaccggctacgtaagcaccagggccacttcctcctggggactctgagccgctacgctgtgcaggtggctgagggcatgggctacctggagtccaagcgctttattcaccgtgacctggctgcccgcaatctgctgttggctacccgcgacctggtcaagatcggggactttgggctgatgcgagcactacctcagaatgacgaccattacgtcatgcaggaacatcgcaaggtgcccttcgcctggtgtgcccccgagagcctgaagacacgcaccttctcccatgccagcgacacctggatgttcggggtgacactgtgggaaatgttcacctacggccaggagccctggatcggcctcaacggcagtcagatcctgcataagatcgacaaggagggggagcggctgccccggcccgaggactgtccccaggacatctacaacgtcatggtccagtgctgggctcacaagccagaggacagacccacgtttgtggccctgcgggacttcctgctggaggcccagcccacagacatgcgggcccttcaggactttgaggaaccggacaagctgcacatccagatgaatgatgtcatcaccgtcatcgagggaagggccgagaactactggtggcgtggccagaacacacggacgctgtgtgtggggcccttccctcgcaacgtggtgacctccgtggccggcctgtcggcccaggacatcagccagcccctgcagaacagcttcatccacacagggcatggcgacagtgacccccgccactgctggggcttcccggacaggattgacgaactgtatctgggaaaccccatggacccccccgacctcctgagcgtggaactgagcacctcccggcccccccagcatctaggaggggtgaaaaaaccaacctatgaccctgtgagcgaggaccaagaccccttgtccagcgacttcaagaggctgggcctgcggaagccaggcctgccccgagggctgtggctggcgaagccctcggcgcgggtgccgggcaccaaggccagccgaggcagcggggctgaggtcacgctcatcgacttcggtgaggagcccgtggtcccggccctacggccctgcgcgccctccctggcgcagctggccatggacgcctgctccctgctggacgagaccccgcctcagagccccacgcgggcactgccccggcccctgcaccccacgcctgtggtggactgggacgcacgcccgctgccccccccgcccgcctatgacgacgtggcccaggatgaggatgactttgagatctgctccatcaacagcaccctcgtgggcgcgggggtccctgccgggcccagccagggccagaccaactacgcctttgtgcctgagcaggcgcggccgccccctcccctggaggacaacctgttcctcccgccccagggtgggggcaagccgcccagctccgcacagaccgcagagatcttccaggcgctacagcaggagtgcatgaggcaactgcaggctccggccggctccccggccccctccaggtgatccaggcccctggcccgcgggctggtccctgcatcctgcccatcgtccgggatggcaagaaggtcagcagcacccactattacttgctgcccgagcgaccatcctacctggagcgctaccagcgcttcctgcgtgaggcccagagccccgaggagcctaccgcccctgcctgtgcctctgctgctgcccccacccagcaccccagcccccgccgcccccacggccaccgtgcggccgatgccccaggctgccttggaccccaaggccaacttctccaccaacaacagcaacccaggggcccggccaccacccccgagggccactgctcggctgccacagaggggctgccctggcgatgggccagaggcgggccggccagcagacaagatccagatggccatggtgcatggggtgaccacagaggagtgccaggcggccctgcagtgccacggctggagcgtgcagagggctgcccagtatctgaaggtggagcagctcttcgggctgggtctgcggcccagaggggagtgccacaaagtgctggagatgttcgactggaacctggagcaggccggctgccaccttctgggctcctggggccctgcccaccacaagcgctgagatgcgtctggagagccagagggcctgcctgaaggaatcacctgagcctgtccgtccaccaggagtggggagatgcccccatccagtcctggaggacccgctgctcctgctgctcccggggatggagcaaggccaaggctgcgggaggctgggagccctgccctgcccatccctcccgcaccagcgctgtccctgcacactttggttcagtcccggtgcccctgccaagatgtggaaggggccgggtgaagacaggcttgagggctgccccagcaggctctgggtatgacctgcctctggccctggtcctgggcggggcctgtgggtggagtagtacccccaggccctgccctgggtgacagactgggaggaaaccaggctggacctgggcaggcgggatgtgttggccacagggagaggcggaccggcacccggtgggacctcctaggactgggccttcttccagggggcccctggcagcagctggggtgtcgggcagaatgtgacttgtggccttaccatggacttgaatgggacttggctggcctcaggatcttgtgcctggaaatagcctgaggtggctcaggaagcggagaaagggtgccagaccattctctggcggggaccagggcccaaggccccagggctggaaggagaccaaggggcagccgccctggagggacatcagtgcttcctcttccacccaattcccccacgcggttccatgttttcccaccagcctgttggcgaagttgctgctccggcattcagtacctgcttcttccagagaaataaagttagtttctattttatgttaaaaaacaaaaaaagtcgacga

SEQ ID NO: 62928 - DNA, 3306 bp, Homo sapiens
gcggtggagggagggactgagttgcccgagtgctcctagactctcccgcgtctgcattcgggaggcaggttgtagctggaggcctggcccccagcctagtgcaaggccctaggtgtcccccggcacccccgcacctctcagaactcctggaacccagccgaggagtgaaatcaagtggccagaagaggactggggccccggccttgccagggaactgaggggtgaggaggaggtgtgggcggggcgctggccccacagacctgaaagctggcgttgggtcccaggtctgctgggatctttctggtaaccgtggacaggtcatgttgcctgctgcagcagcttccagcgtgcctccttatttgcaaaccatagggaaagctgcctgacccacctagagagttgtgggtaaggccgtgtgcaaacaggcctgtacggggcatggtgggtcacgggggctgttggggaggagggccggtggcacacagcctggtcctgaggcctgagctccatcccccttctgccacagtggccagggtgtgaggagggtcccagtgccggggctgccccgccacgcctggcgttcaccgtgccatctctgtcgcgcagggccgagaactactggtggcgtggccagaacacacggacgctgtgtgtggggcccttccctcgcaacgtggtgacctccgtggccggcctgtcggcccaggacatcagccagcccctgcagaacagcttcatccacacagggcatggcgacagtgacccccgccactgctggggcttcccggacaggattgacgaactgtatctgggaaaccccatggacccccccgacctcctgagcgtggaactgagcacctcccggcccccccagcatctaggaggggtgaaaaaaccaacctatgaccctgtgagcgaggaccaagaccccttgtccagcgacttcaagaggctgggcctgcggaagccaggcctgccccgagggctgtggctggcgaagccctcggcgcgggtgccgggcaccaaggccagccgaggcagcggggctgaggtcacgctcatcgacttcggtgaggagcccgtggtcccggccctacggccctgcgcgccctccctggcgcagctggccatggacgcctgctccctgctggacgagaccccgcctcagagccccacgcgggcactgccccggcccctgcaccccacgcctgtggtggactgggacgcacgcccgctgccccccccgcccgcctatgacgacgtggcccaggatgaggatgactttgagatctgctccatcaacagcaccctcgtgggcgcgggggtccctgccgggcccagccagggccagaccaactacgcctttgtgcctgagcaggcgcggccgccccctcccctggaggacaacctgttcctcccgccccagggtgggggcaagccgcccagctccgcacagaccgcagagatcttccaggcgctacagcaggagtgcatgaggcaactgcaggctccggccggctccccggccccctctcccagcccggggggtgacgacaagccccaggtgcctcctcgggtacccatcccccctcggcccacgcgcccacacgtccagctgtctccagcccccccgggcgaggaggagaccagccagtggcctggacctgcttcccctccccgggtgcctccgcgggagcccctgtcccctcaaggctcgaggacacccagccccctggtaccacctggcagctccccgctgccaccccggctctcaagctcacctgggaagaccatgcccaccacccagagctttgcctcagaccccaagtacgccaccccccaggtgatccaggcccctggcccgcgggctggtccctgcatcctgcccatcgtccgggatggcaagaaggtcagcagcacccactattacttgctgcccgagcgaccatcctacctggagcgctaccagcgcttcctgcgtgaggcccagagccccgaggagcctaccgcccctgcctgtgcctctgctgctgcccccacccagcaccccagcccccgccgcccccacggccaccgtgcggccgatgccccaggctgccttggaccccaaggccaacttctccaccaacaacagcaacccaggggcccggccaccacccccgagggccactgctcggctgccacagaggggctgccctggcgatgggccagaggcgggccggccagcagacaagatccagatggccatggtgcatggggtgaccacagaggagtgccaggcggccctgcagtgccacggctggagcgtgcagagggctgcccagtatctgaaggtggagcagctcttcgggctgggtctgcggcccagaggggagtgccacaaagtgctggagatgttcgactggaacctggagcaggccggctgccaccttctgggctcctggggccctgcccaccacaagcgctgagatgcgtctggagagccagagggcctgcctgaaggaatcacctgagcctgtccgtccaccaggagtggggagatgcccccatccagtcctggaggacccgctgctcctgctgctcccggggatggagcaaggccaaggctgcgggaggctgggagccctgccctgcccatccctcccgcaccagcgctgtccctgcacactttggttcagtcccggtgcccctgccaagatgtggaaggggccgggtgaagacaggcttgagggctgccccagcaggctctgggtatgacctgcctctggccctggtcctgggcggggcctgtgggtggagtagtacccccaggccctgccctgggtgacagactgggaggaaaccaggctggacctgggcaggcgggatgtgttggccacagggagaggcggaccggcacccggtgggacctcctaggactgggccttcttccagggggcccctggcagcagctggggtgtcgggcagaatgtgacttgtggccttaccatggacttgaatgggacttggctggcctcaggatcttgtgcctggaaatagcctgaggtggctcaggaagcggagaaagggtgccagaccattctctggcggggaccagggcccaaggccccagggctggaaggagaccaaggggcagccgccctggagggacatcagtgcttcctcttccacccaattcccccacgcggttccatgttttcccaccagcctgttggcgaagttgctgctccggcattcagtacctgcttcttccagagaaataaagttagtttctattttatgttaaaaaacaaaaaaagtcgacga

SEQ ID NO: 62929 - DNA, 4329 bp, Homo sapiens
gcagttgggtggggaagccggggagtagggctggactgtgaccactgccctggagagaagacatgaaacaggacagaggatcccggctgcagccagcgtgaggaaagctctgctccctgccagaccggccagctgtggaaacccagcggggcttgcagcagagcggaggggcccaccccgttcttcctcatttcccacccctggtgtgggatttggggggctcctgggcagagtgcgaagctccggagccgaggccactggatccccagtgactgctcgggggggtcccgctgcgtggagatgccggcagcacgtcggttccctggcctggagctctccttccctctcctggccagactgcggcgacgcctgtacacaaggctgggaggcggcagaatgcagccagaggagggcacaggctggctgctggagctgctgtccgaggtgcagctgcaacagtacttcctgcggctccgagatgacctcaacgtcacccgcctgtcccactttgagtacgtcaagaatgaggacctggagaagatcggcatgggtcggcctggccagcggcggctgtgggaggctgtgaagaggaggaaggccttgtgcaaacgcaagtcgtggatgagtaaggtgttcagtggaaagcgactggaggctgagttcccacctcatcactctcagagcaccttccggaagacctcgcccgcccctgggggcccagcaggggaggggcccctgcagagcctcacctgcctcattggggagaaggacctgcgcctcctggagaagctgggtgatggttcctttggcgtggtgcgcaggggcgagtgggacgcgccctcagggaagacggtgagtgtggctgtgaagtgcctgaagcccgatgtcctgagccagccagaagccatggacgacttcatccgggaggtcaatgccatgcactcgctcgaccaccgaaacctcatccgcctctacggggtggtgctcacgccgcccatgaagatggtgacagagctggcacctctgggatcgttgttggaccggctacgtaagcaccagggccacttcctcctggggactctgagccgctacgctgtgcaggtggctgagggcatgggctacctggagtccaagcgctttattcaccgtgacctggctgcccgcaatctgctgttggctacccgcgacctggtcaagatcggggactttgggctgatgcgagcactacctcagaatgacgaccattacgtcatgcaggaacatcgcaaggtgcccttcgcctggtgtgcccccgagagcctgaagacacgcaccttctcccatgccagcgacacctggatgttcggggtgacactgtgggaaatgttcacctacggccaggagccctggatcggcctcaacggcagtcagatcctgcataagatcgacaaggagggggagcggctgccccggcccgaggactgtccccaggacatctacaacgtcatggtccagtgctgggctcacaagccagaggacagacccacgtttgtggccctgcgggacttcctgctggaggcccagcccacagacatgcgggcccttcaggactttgaggaaccggacaagctgcacatccagatgaatgatgtcatcaccgtcatcgagggaagggccgagaactactggtggcgtggccagaacacacggacgctgtgtgtggggcccttccctcgcaacgtggtgacctccgtggccggcctgtcggcccaggacatcagccagcccctgcagaacagcttcatccacacagggcatggcgacagtgacccccgccactgctggggcttcccggacaggattgacgaactgtatctgggaaaccccatggacccccccgacctcctgagcgtggaactgagcacctcccggcccccccagcatctaggaggggtgaaaaaaccaacctatgaccctgtgagcgaggaccaagaccccttgtccagcgacttcaagaggctgggcctgcggaagccaggcctgccccgagggctgtggctggcgaagccctcggcgcgggtgccgggcaccaaggccagccgaggcagcggggctgaggtcacgctcatcgacttcggtgaggagcccgtggtcccggccctacggccctgcgcgccctccctggcgcagctggccatggacgcctgctccctgctggacgagaccccgcctcagagccccacgcgggcactgccccggcccctgcaccccacgcctgtggtggactgggacgcacgcccgctgccccccccgcccgcctatgacgacgtggcccaggatgaggatgactttgagatctgctccatcaacagcaccctcgtgggcgcgggggtccctgccgggcccagccagggccagaccaactacgcctttgtgcctgagcaggcgcggccgccccctcccctggaggacaacctgttcctcccgccccagggtgggggcaagccgcccagctccgcacagaccgcagagatcttccaggcgctacagcaggagtgcatgaggcaactgcaggctccggccggctccccggccccctctcccagcccggggggtgacgacaagccccaggtgcctcctcgggtacccatcccccctcggcccacgcgcccacacgtccagctgtctccagcccccccgggcgaggaggagaccagccagtggcctggacctgcttcccctccccgggtgcctccgcgggagcccctgtcccctcaaggctcgaggacacccagccccctggtaccacctggcagctccccgctgccaccccggctctcaagctcacctgggaagaccatgcccaccacccagagctttgcctcagaccccaagtacgccaccccccaggtgatccaggcccctggcccgcgggctggtccctgcatcctgcccatcgtccgggatggcaagaaggtcagcagcacccactattacttgctgcccgagcgaccatcctacctggagcgctaccagcgcttcctgcgtgaggcccagagccccgaggagcctaccgcccctgcctgtgcctctgctgctgcccccacccagcaccccagcccccgccgcccccacggccaccgtgcggccgatgccccaggctgccttggaccccaaggccaacttctccaccaacaacagcaacccaggggcccggccaccacccccgagggccactgctcggctgccacagaggggctgccctggcgatgggccagaggcgggccggccagcagacaagatccagatggccatggtgcatggggtgaccacagaggagtgccaggcggccctgcagtgccacggctggagcgtgcagagggctgcccagtatctgaaggtggagcagctcttcgggctgggtctgcggcccagaggggagtgccacaaagtgctggagatgttcgactggaacctggagcaggccggctgccaccttctgggctcctggggccctgcccaccacaagcgctgagatgcgtctggagagccagagggcctgcctgaaggaatcacctgagcctgtccgtccaccaggagtggggagatgcccccatccagtcctggaggacccgctgctcctgctgctcccggggatggagcaaggccaaggctgcgggaggctgggagccctgccctgcccatccctcccgcaccagcgctgtccctgcacactttggttcagtcccggtgcccctgccaagatgtggaaggggccgggtgaagacaggcttgagggctgccccagcaggctctgggtatgacctgcctctggccctggtcctgggcggggcctgtgggtggagtagtacccccaggccctgccctgggtgacagactgggaggaaaccaggctggacctgggcaggcgggatgtgttggccacagggagaggcggaccggcacccggtgggacctcctaggactgggccttcttccagggggcccctggcagcagctggggtgtcgggcagaatgtgacttgtggccttaccatggacttgaatgggacttggctggcctcaggatcttgtgcctggaaatagcctgaggtggctcaggaagcggagaaagggtgccagaccattctctggcggggaccagggcccaaggccccagggctggaaggagaccaaggggcagccgccctggagggacatcagtgcttcctcttccacccaattcccccacgcggttccatgttttcccaccagcctgttggcgaagttgctgctccggcattcagtacctgcttcttccagagaggagtagagcaaccggtgaccgacc

SEQ ID NO: 62930 - DNA, 3479 bp, Homo sapiens
gcggtggagggagggactgagttgcccgagtgctcctagactctcccgcgtctgcattcgggaggcaggttgtagctggaggcctggcccccagcctagtgcaaggccctaggtgtcccccggcacccccgcacctctcagaactcctggaacccagccgaggagtgaaatcaagtggccagaagaggactggggccccggccttgccagggaactgaggggtgaggaggaggtgtgggcggggcgctggccccacagacctgaaagctggcgttgggtcccaggtctgctgggatctttctggtaaccgtggacaggtcatgttgcctgctgcagcagcttccagcgtgcctccttatttgcaaaccatagggaaagctgcctgacccacctagagagttgtgggtaaggccgtgtgcaaacaggcctgtacggggcatggtgggtcacgggggctgttggggaggagggccggtggcacacagcctggtcctgaggcctgagctccatcccccttctgccacagtggccagggtgtgaggagggtcccagtgccggggctgccccgccacgcctggcgttcaccgtgccatctctgtcgcgcagggccgagaactactggtggcgtggccagaacacacggacgctgtgtgtggggcccttccctcgcaacgtggtgacctccgtggccggcctgtcggcccaggacatcagccagcccctgcagaacagcttcatccacacagggcatggcgacagtgacccccgccactgctggggcttcccggacaggattgacgagacaccccccagctgagacgtgcggtcaggttctgtggactgggaggcgggaggcctgtgcttcagacccaagactacacccggtttcctccaggacgaaggggctctgatgagattctgccacccctccacacgcttcccctgctctcttgacccagctctctcccccacagactgtatctgggaaaccccatggacccccccgacctcctgagcgtggaactgagcacctcccggcccccccagcatctaggaggggtgaaaaaaccaacctatgaccctgtgagcgaggaccaagaccccttgtccagcgacttcaagaggctgggcctgcggaagccaggcctgccccgagggctgtggctggcgaagccctcggcgcgggtgccgggcaccaaggccagccgaggcagcggggctgaggtcacgctcatcgacttcggtgaggagcccgtggtcccggccctacggccctgcgcgccctccctggcgcagctggccatggacgcctgctccctgctggacgagaccccgcctcagagccccacgcgggcactgccccggcccctgcaccccacgcctgtggtggactgggacgcacgcccgctgccccccccgcccgcctatgacgacgtggcccaggatgaggatgactttgagatctgctccatcaacagcaccctcgtgggcgcgggggtccctgccgggcccagccagggccagaccaactacgcctttgtgcctgagcaggcgcggccgccccctcccctggaggacaacctgttcctcccgccccagggtgggggcaagccgcccagctccgcacagaccgcagagatcttccaggcgctacagcaggagtgcatgaggcaactgcaggctccggccggctccccggccccctctcccagcccggggggtgacgacaagccccaggtgcctcctcgggtacccatcccccctcggcccacgcgcccacacgtccagctgtctccagcccccccgggcgaggaggagaccagccagtggcctggacctgcttcccctccccgggtgcctccgcgggagcccctgtcccctcaaggctcgaggacacccagccccctggtaccacctggcagctccccgctgccaccccggctctcaagctcacctgggaagaccatgcccaccacccagagctttgcctcagaccccaagtacgccaccccccaggtgatccaggcccctggcccgcgggctggtccctgcatcctgcccatcgtccgggatggcaagaaggtcagcagcacccactattacttgctgcccgagcgaccatcctacctggagcgctaccagcgcttcctgcgtgaggcccagagccccgaggagcctaccgcccctgcctgtgcctctgctgctgcccccacccagcaccccagcccccgccgcccccacggccaccgtgcggccgatgccccaggctgccttggaccccaaggccaacttctccaccaacaacagcaacccaggggcccggccaccacccccgagggccactgctcggctgccacagaggggctgccctggcgatgggccagaggcgggccggccagcagacaagatccagatggccatggtgcatggggtgaccacagaggagtgccaggcggccctgcagtgccacggctggagcgtgcagagggctgcccagtatctgaaggtggagcagctcttcgggctgggtctgcggcccagaggggagtgccacaaagtgctggagatgttcgactggaacctggagcaggccggctgccaccttctgggctcctggggccctgcccaccacaagcgctgagatgcgtctggagagccagagggcctgcctgaaggaatcacctgagcctgtccgtccaccaggagtggggagatgcccccatccagtcctggaggacccgctgctcctgctgctcccggggatggagcaaggccaaggctgcgggaggctgggagccctgccctgcccatccctcccgcaccagcgctgtccctgcacactttggttcagtcccggtgcccctgccaagatgtggaaggggccgggtgaagacaggcttgagggctgccccagcaggctctgggtatgacctgcctctggccctggtcctgggcggggcctgtgggtggagtagtacccccaggccctgccctgggtgacagactgggaggaaaccaggctggacctgggcaggcgggatgtgttggccacagggagaggcggaccggcacccggtgggacctcctaggactgggccttcttccagggggcccctggcagcagctggggtgtcgggcagaatgtgacttgtggccttaccatggacttgaatgggacttggctggcctcaggatcttgtgcctggaaatagcctgaggtggctcaggaagcggagaaagggtgccagaccattctctggcggggaccagggcccaaggccccagggctggaaggagaccaaggggcagccgccctggagggacatcagtgcttcctcttccacccaattcccccacgcggttccatgttttcccaccagcctgttggcgaagttgctgctccggcattcagtacctgcttcttccagagaaataaagttagtttctattttatgttaaaaaacaaaaaaagtcgacga

SEQ ID NO: 62931 - DNA, 2828 bp, Homo sapiens
gcagttgggtggggaagccggggagtagggctggactgtgaccactgccctggagagaagacatgaaacaggacagaggatcccggctgcagccagcgtgaggaaagctctgctccctgccagaccggccagctgtggaaacccagcggggcttgcagcagagcggaggggcccaccccgttcttcctcatttcccacccctggtgtgggatttggggggctcctgggcagagtgcgaagctccggagccgaggccactggatccccagtgactgctcgggggggtcccgctgcgtggagatgccggcagcacgtcggttccctggcctggagctctccttccctctcctggccagactgcggcgacgcctgtacacaaggctgggaggcggcagaatgcagccagaggagggcacaggctggctgctggagctgctgtccgaggtgcagctgcaacagtacttcctgcggctccgagatgacctcaacgtcacccgcctgtcccactttgagtacgtcaagaatgaggacctggagaagatcggcatgggtcggcctggccagcggcggctgtgggaggctgtgaagaggaggaaggccttgtgcaaacgcaagtcgtggatgagtaaggtgttcagtggaaagcgactggaggctgagttcccacctcatcactctcagagcaccttccggaagacctcgcccgcccctgggggcccagcaggggaggggcccctgcagagcctcacctgcctcattggggagaaggacctgcgcctcctggagaagctgggtgatggttcctttggcgtggtgcgcaggggcgagtgggacgcgccctcagggaagacggtgagtgtggctgtgaagtgcctgaagcccgatgtcctgagccagccagaagccatggacgacttcatccgggaggtcaatgccatgcactcgctcgaccaccgaaacctcatccgcctctacggggtggtgctcacgccgcccatgaagatggtgacagagctggcacctctgggatcgttgttggaccggctacgtaagcaccagggccacttcctcctggggactctgagccgctacgctgtgcaggtggctgagggcatgggctacctggagtccaagcgctttattcaccgtgacctggctgcccgcaatctgctgttggctacccgcgacctggtcaagatcggggactttgggctgatgcgagcactacctcagaatgacgaccattacgtcatgcaggaacatcgcaaggtgcccttcgcctggtgtgcccccgagagcctgaagacacgcaccttctcccatgccagcgacacctggatgttcggggtgacactgtgggaaatgttcacctacggccaggagccctggatcggcctcaacggcagtcagatcctgcataagatcgacaaggagggggagcggctgccccggcccgaggactgtccccaggacatctacaacgtcatggtccagtgctgggctcacaagccagaggacagacccacgtttgtggccctgcgggacttcctgctggaggcccagcccacagacatgcgggcccttcaggactttgaggaaccggacaagctgcacatccagatgaatgatgtcatcaccgtcatcgagggaagggccgagaactactggtggcgtggccagaacacacggacgctgtgtgtggggcccttccctcgcaacgtggtgacctccgtggccggcctgtcggcccaggacatcagccagcccctgcagaacagcttcatccacacagggcatggcgacagtgacccccgccactgctggggcttcccggacaggattgacgaactgtatctgggaaaccccatggacccccccgacctcctgagcgtggaactgagcacctcccggcccccccagcatctaggaggggtgaaaaaaccaacctatgaccctgtgagcgaggaccaagaccccttgtccagcgacttcaagaggctgggcctgcggaagccaggcctgccccgagggctgtggctggcgaagccctcggcgcgggtgccgggcaccaaggccagccgaggcagcggggctgaggtcacgctcatcgacttcggtgaggagcccgtggtcccggccctacggccctgcgcgccctccctggcgcagctggccatggacgcctgctccctgctggacgagaccccgcctcagagccccacgcgggcactgccccggcccctgcaccccacgcctgtggtggactgggacgcacgcccgctgccccccccgcccgcctatgacgacgtggcccaggatgaggatgactttgagatctgctccatcaacagcaccctcgtgggcgcgggggtccctgccgggcccagccagggccagaccaactacgcctttgtgcctgagcaggcgcggccgccccctcccctggaggacaacctgttcctcccgccccagggtgggggcaagccgcccagctccgcacagaccgcagagatcttccaggcgctacagcaggagtgcatgaggcaactgcaggctccggccggctccccggccccctctcccagcccggggggtgacgacaagccccagccaggtgatccaggcccctggcccgcgggctggtccctgcatcctgcccatcgtccgggatggcaagaaggtcagcagcacccactattacttgctgcccgagcgaccatcctacctggagcgctaccagcgcttcctgcgtgaggcccagagccccgaggagcctaccgccctgcctgtgcctctgctgctgccggggcggtggtccccgacgccac

SEQ ID NO: 62932 - DNA, 1476 bp, Homo sapiens
gcagttgggtggggaagccggggagtagggctggactgtgaccactgccctggagagaagacatgaaacaggacagaggatcccggctgcagccagcgtgaggaaagctctgctccctgccagaccggccagctgtggaaacccagcggggcttgcagcagagcggaggggcccaccccgttcttcctcatttcccacccctggtgtgggatttggggggctcctgggcagagtgcgaagctccggagccgaggccactggatccccagtgactgctcgggggggtcccgctgcgtggagatgccggcagcacgtcggttccctggcctggagctctccttccctctcctggccagactgcggcgacgcctgtacacaaggctgggaggcggcagaatgcagccagaggagggcacaggctggctgctggagctgctgtccgaggtgcagctgcaacagtacttcctgcggctccgagatgacctcaacgtcacccgcctgtcccactttgagtacgtcaagaatgaggacctggagaagatcggcatgggtcggcctggccagcggcggctgtgggaggctgtgaagaggaggaaggccttgtgcaaacgcaagtcgtggatgagtaaggtgttcagtggaaagcgactggaggctgagttcccacctcatcactctcagagcaccttccggaagacctcgcccgcccctgggggcccagcaggggaggggcccctgcagagcctcacctgcctcattggggagaaggacctgcgcctcctggagaagctgggtgatggttcctttggcgtggtgcgcaggggcgagtgggacgcgccctcagggaagacggtgagtgtggctgtgaagtgcctgaagcccgatgtcctgagccagccagaagccatggacgacttcatccgggaggtcaatgccatgcactcgctcgaccaccgaaacctcatccgcctctacggggtggtgctcacgccgcccatgaagatggtgacagagctggcacctctgggatcgttgttggaccggctacgtaagcaccagggccacttcctcctggggactctgagccgctacgctgtgcaggtggctgagggcatgggctacctggagtccaagcgctttattcaccgtgacctggctgcccgcaatctgctgttggctacccgcgacctggtcaagatcggggactttgggctgatgcgagcactacctcagaatgacgaccattacgtcatgcaggaacatcgcaaggtgcccttcgcctggtgaggggcaggtgctgccagagccgccctggagggacatcagtgcttcctcttccacccaattcccccacgcggttccatgttttcccaccagcctgttggcgaagttgctgctccggcattcagtacctgcttcttccagagaaataaagttagtttctattttatgttaaaaaacaaaaaaagtcgacga

SEQ ID NO: 62933 - DNA, 1502 bp, Homo sapiens
gaattccgggagcccgcggaggctgctgcagcagcccgaaccggcgtccgagtccggggaaggcccccgcgagcgcagggaggggccggaaagttccggcgaactgggggagcggcagtgggagagcgtcgggcgggaggcggtggtcctgggagcggccccggcgcccgaagccgccccgagctggtggggagggtcccggccggtggggccgggctggcgggggaggggcgcctgggggtgcaagaggcgaattggctgcccggggtgcaggagggacaggtggtgcgggctgtcaggaaacctacctgaacgggaaggagccccaggagggagagggacccggcgagggctcaggacccggaggcgccggcggaggaggaggtggtgactggcaggcccgggccccacggtacctccggggctgaaggggacgcaggatgtaggggcatggggagtcgggcgcagaagagtgcggggaacgctgagctctgggagccactgcctgagggcaggccgcggccggcgggaacctcttctgccgtctcagcctgggcgtcgctgaagctgtgtctgcggggaggcagcggaaggcggcagaggctgggaggcggcagaatgcagccagaggagggcacaggctggctgctggagctgctgtccgaggtgcagctgcaacagtacttcctgcggctccgagatgacctcaacgtcacccgcctgtcccactttgagtacgtcaagaatgaggacctggagaagatcggcatgggtcggcctggccagcggcggctgtgggaggctgtgaagaggaggaaggccttgtgcaaacgcaagtcgtggatgagtaaggtgttcagtggaaagcgactggaggctgagttcccacctcatcactctcagagcaccttccggaagacctcgcccgcccctgggggcccagcaggggaggggcccctgcagagcctcacctgcctcattggggagaaggacctgcgcctcctggagaagctgggtgatggttcctttggcgtggtgcgcaggggcgagtgggacgcgccctcagggaagacggtgagtgtggctgtgaagtgcctgaagcccgatgtcctgagccagccagaagccatggacgacttcatccgggaggtcaatgccatgcactcgctcgaccaccgaaacctcatccgcctctacggggtggtgctcacgccgcccatgaagatggtgacagagctggcacctctgggatcgttgttggaccggctacgtaagcaccagggccacttcctcctggggactctgagccgctacgctgtgcaggtggctgagggcatgggctacctggagtccaagcgctttattcaccgtgacctggctgcccgcaatctgctgttggctacccacggactcctggtctgaggcccaaataaacgactgttaattcctcaaaaaaaaagaacacgaaaacgacaaagagagagaagaaaaggacaaaaagc

SEQ ID NO: 62934 - DNA, 380 bp, Homo sapiens
ctgagcgtggaactgagcacctcccggcccccccagcatctaggaggggtgaaaagtaagagcccctctgctccctggtgtccctaactcatcggctactcaggaaggggcactgtcttcacaggccaccctaaggctgctgttctgtttttggggacagtggggtcagggcagcaggcgggacagctgtgtccctggctccggctgggcgtggggtggaagacaggcagctgtatccgccgaggtgggcctcctcgggctgggtctgcagcaggcccgtccgccccggcgtccctcctccctccttccacggccgagctcagatcctggctttcctcacttccccctaatcctgctctcctgtcccaagccaaaaccac

SEQ ID NO: 62935 - DNA, 1801 bp, Homo sapiens
  misc_feature (922)..(922): n is a, c, g, or t
  misc_feature (1489)..(1489): n is a, c, g, or t
tgtcttcagtgaaatgataccggtccccactgcccagctcacctcccggggctgcaggaggcaccggagataatggctgtagagggtcttgtaacctgaacattgcttgcaaacataaggaattctagttactgggaggaagcacagggcagaggccagaagaggccctcagatttgaggcaccctagcccagacggataaggatccaccagctctgggggcgtgagacccaagctggcaagaatctgcaatctggagccaaggctgtgggtgcctcagtggaggccgagtcagaccgacgtggccagctttgaccctcatggcctcctttcttctgtcccttgaccttcggctcctccctgtccaccctggcctccgagtctcctccacttttccttccgtctcagccctcagctctaggcgcccctccagagacccagctgtcttcccaggccccttcccagcaaggactagcttcatctgaaccacacacacactcacggttcaacctcagactaaaattatcctctcccctgggcaggatgaagggcagccgactccctggtgagggtggagacagacagcaccaaatggtcaggccagagaaggggccagggctaaaaatggacaaggaggtgtctgtggagggcccctgcggctccatcgatgcgggttagggctggagtctgcggggtggcgggtgcaggaagggagggtggggcaggactgggaggagactccgaccttggctgggcggtgccctccctctccacacagctgggtgtggggccgctcagccacaggctgcatgcctgtcggtctctttctggcaccctccttgaggccagcatcaggctttgggttcatgtttgggggtgtgccctggacggagtgtgggcctccagccaggctgccccactgncagtttggcaaaaccaggacctatctggaagccgaagccggggatcaccaggtggacccagcggggtgggactgagtgactgaccctggggtgttggattccatctggcccccggctgccttcaaacaggtgttcagtggaaagcgactggaggctgagttcccacctcatcactctcagagcaccttccggaagacctcgcccgcccctgggggcccagcaggggaggggcccctgcagagcctcacctgcctcattggggagaaggacctgcgcctcctggagaagctgggtgatggttcctttggcgtggtgcgcaggggcgagtgggacgcgccctcagggaagacggtgagctctctgtgtcctgccagcgcagcagaggcatgggacccggggctggtagtggctcttctgcccccaaccagggtgtggatgggactggggatgcgtcacagtgtggctcatcccagagtccgtgctcaggatttttggggttttatttatttatttatttttgagatggagtctcgctctgtcgcccaggctggagtgcagtaggcacgntctcggcttcctgcaacctccactttccgggttcaagcaatcctcctgcctcagcctcctgagtagctgggattacaggcatgcaccaccacactcagttaatttttgtatttttagtagagacggggtttcaccatgttggccaggctggtctcgaactcctgacctcagatgatctgcccactttagcctcccaaagtgcttggattacaggtgtgagccaccacgtccagcccatgctcaggtttaactaagcacatttattatttcaactataaaaataatttattataaaagtttggaaagtatttg

SEQ ID NO: 62936 - DNA, 4435 bp, Homo sapiens
gcagttgggtggggaagccggggagtagggctggactgtgaccactgccctggagagaagacatgaaacaggacagaggatcccggctgcagccagcgtgaggaaagctctgctccctgccagaccggccagctgtggaaacccagcggggcttgcagcagagcggaggggcccaccccgttcttcctcatttcccacccctggtgtgggatttggggggctcctgggcagagtgcgaagctccggagccgaggccactggatccccagtgactgctcgggggggtcccgctgcgtggagatgccggcagcacgtcggttccctggcctggagctctccttccctctcctggccagactgcggcgacgcctgtacacaaggctgggaggcggcagaatgcagccagaggagggcacaggctggctgctggagctgctgtccgaggtgcagctgcaacagtacttcctgcggctccgagatgacctcaacgtcacccgcctgtcccactttgagtacgtcaagaatgaggacctggagaagatcggcatgggtcggcctggccagcggcggctgtgggaggctgtgaagaggaggaaggccttgtgcaaacgcaagtcgtggatgagtaaggtgttcagtggaaagcgactggaggctgagttcccacctcatcactctcagagcaccttccggaagacctcgcccgcccctgggggcccagcaggggaggggcccctgcagagcctcacctgcctcattggggagaaggacctgcgcctcctggagaagctgggtgatggttcctttggcgtggtgcgcaggggcgagtgggacgcgccctcagggaagacggtgagtgtggctgtgaagtgcctgaagcccgatgtcctgagccagccagaagccatggacgacttcatccgggaggtcaatgccatgcactcgctcgaccaccgaaacctcatccgcctctacggggtggtgctcacgccgcccatgaagatggcatcagtttcccaaattgcctcgagggagaggcctgagaaactgcaggactcctagaggtccccagacagcaggccaggaaggtgacagagctggcacctctgggatcgttgttggaccggctacgtaagcaccagggccacttcctcctggggactctgagccgctacgctgtgcaggtggctgagggcatgggctacctggagtccaagcgctttattcaccgtgacctggctgcccgcaatctgctgttggctacccgcgacctggtcaagatcggggactttgggctgatgcgagcactacctcagaatgacgaccattacgtcatgcaggaacatcgcaaggtgcccttcgcctggtgtgcccccgagagcctgaagacacgcaccttctcccatgccagcgacacctggatgttcggggtgacactgtgggaaatgttcacctacggccaggagccctggatcggcctcaacggcagtcagatcctgcataagatcgacaaggagggggagcggctgccccggcccgaggactgtccccaggacatctacaacgtcatggtccagtgctgggctcacaagccagaggacagacccacgtttgtggccctgcgggacttcctgctggaggcccagcccacagacatgcgggcccttcaggactttgaggaaccggacaagctgcacatccagatgaatgatgtcatcaccgtcatcgagggaagggccgagaactactggtggcgtggccagaacacacggacgctgtgtgtggggcccttccctcgcaacgtggtgacctccgtggccggcctgtcggcccaggacatcagccagcccctgcagaacagcttcatccacacagggcatggcgacagtgacccccgccactgctggggcttcccggacaggattgacgaactgtatctgggaaaccccatggacccccccgacctcctgagcgtggaactgagcacctcccggcccccccagcatctaggaggggtgaaaaaaccaacctatgaccctgtgagcgaggaccaagaccccttgtccagcgacttcaagaggctgggcctgcggaagccaggcctgccccgagggctgtggctggcgaagccctcggcgcgggtgccgggcaccaaggccagccgaggcagcggggctgaggtcacgctcatcgacttcggtgaggagcccgtggtcccggccctacggccctgcgcgccctccctggcgcagctggccatggacgcctgctccctgctggacgagaccccgcctcagagccccacgcgggcactgccccggcccctgcaccccacgcctgtggtggactgggacgcacgcccgctgccccccccgcccgcctatgacgacgtggcccaggatgaggatgactttgagatctgctccatcaacagcaccctcgtgggcgcgggggtccctgccgggcccagccagggccagaccaactacgcctttgtgcctgagcaggcgcggccgccccctcccctggaggacaacctgttcctcccgccccagggtgggggcaagccgcccagctccgcacagaccgcagagatcttccaggcgctacagcaggagtgcatgaggcaactgcaggctccggccggctccccggccccctctcccagcccggggggtgacgacaagccccaggtgcctcctcgggtacccatcccccctcggcccacgcgcccacacgtccagctgtctccagcccccccgggcgaggaggagaccagccagtggcctggacctgcttcccctccccgggtgcctccgcgggagcccctgtcccctcaaggctcgaggacacccagccccctggtaccacctggcagctccccgctgccaccccggctctcaagctcacctgggaagaccatgcccaccacccagagctttgcctcagaccccaagtacgccaccccccaggtgatccaggcccctggcccgcgggctggtccctgcatcctgcccatcgtccgggatggcaagaaggtcagcagcacccactattacttgctgcccgagcgaccatcctacctggagcgctaccagcgcttcctgcgtgaggcccagagccccgaggagcctaccgcccctgcctgtgcctctgctgctgcccccacccagcaccccagcccccgccgcccccacggccaccgtgcggccgatgccccaggctgccttggaccccaaggccaacttctccaccaacaacagcaacccaggggcccggccaccacccccgagggccactgctcggctgccacagaggggctgccctggcgatgggccagaggcgggccggccagcagacaagatccagatggccatggtgcatggggtgaccacagaggagtgccaggcggccctgcagtgccacggctggagcgtgcagagggctgcccagtatctgaaggtggagcagctcttcgggctgggtctgcggcccagaggggagtgccacaaagtgctggagatgttcgactggaacctggagcaggccggctgccaccttctgggctcctggggccctgcccaccacaagcgctgagatgcgtctggagagccagagggcctgcctgaaggaatcacctgagcctgtccgtccaccaggagtggggagatgcccccatccagtcctggaggacccgctgctcctgctgctcccggggatggagcaaggccaaggctgcgggaggctgggagccctgccctgcccatccctcccgcaccagcgctgtccctgcacactttggttcagtcccggtgcccctgccaagatgtggaaggggccgggtgaagacaggcttgagggctgccccagcaggctctgggtatgacctgcctctggccctggtcctgggcggggcctgtgggtggagtagtacccccaggccctgccctgggtgacagactgggaggaaaccaggctggacctgggcaggcgggatgtgttggccacagggagaggcggaccggcacccggtgggacctcctaggactgggccttcttccagggggcccctggcagcagctggggtgtcgggcagaatgtgacttgtggccttaccatggacttgaatgggacttggctggcctcaggatcttgtgcctggaaatagcctgaggtggctcaggaagcggagaaagggtgccagaccattctctggcggggaccagggcccaaggccccagggctggaaggagaccaaggggcagccgccctggagggacatcagtgcttcctcttccacccaattcccccacgcggttccatgttttcccaccagcctgttggcgaagttgctgctccggcattcagtacctgcttcttccagagaaataaagttagtttctattttatgttaaaaaacaaaaaaagtcgacga

SEQ ID NO: 62937 - DNA, 4024 bp, Homo sapiens
cttttgagcaggagtccgggccctcgtgtcaccgctctgaagtcaaggagaggctgggaggcggcagaatgcagccagaggagggcacaggctggctgctggagctgctgtccgaggtgcagctgcaacagtacttcctgcggctccgagatgacctcaacgtcacccgcctgtcccactttgagtacgtcaagaatgaggacctggagaagatcggcatgggtcggcctggccagcggcggctgtgggaggctgtgaagaggaggaaggccttgtgcaaacgcaagtcgtggatgagtaaggtgttcagtggaaagcgactggaggctgagttcccacctcatcactctcagagcaccttccggaagacctcgcccgcccctgggggcccagcaggggaggggcccctgcagagcctcacctgcctcattggggagaaggacctgcgcctcctggagaagctgggtgatggttcctttggcgtggtgcgcaggggcgagtgggacgcgccctcagggaagacggtgagtgtggctgtgaagtgcctgaagcccgatgtcctgagccagccagaagccatggacgacttcatccgggaggtcaatgccatgcactcgctcgaccaccgaaacctcatccgcctctacggggtggtgctcacgccgcccatgaagatggtgacagagctggcacctctgggatcgttgttggaccggctacgtaagcaccagggccacttcctcctggggactctgagccgctacgctgtgcaggtggctgagggcatgggctacctggagtccaagcgctttattcaccgtgacctggctgcccgcaatctgctgttggctacccgcgacctggtcaagatcggggactttgggctgatgcgagcactacctcagaatgacgaccattacgtcatgcaggaacatcgcaaggtgcccttcgcctggtgtgcccccgagagcctgaagacacgcaccttctcccatgccagcgacacctggatgttcggggtgacactgtgggaaatgttcacctacggccaggagccctggatcggcctcaacggcagtcagatcctgcataagatcgacaaggagggggagcggctgccccggcccgaggactgtccccaggacatctacaacgtcatggtccagtgctgggctcacaagccagaggacagacccacgtttgtggccctgcgggacttcctgctggaggcccagcccacagacatgcgggcccttcaggactttgaggaaccggacaagctgcacatccagatgaatgatgtcatcaccgtcatcgagggaagggccgagaactactggtggcgtggccagaacacacggacgctgtgtgtggggcccttccctcgcaacgtggtgacctccgtggccggcctgtcggcccaggacatcagccagcccctgcagaacagcttcatccacacagggcatggcgacagtgacccccgccactgctggggcttcccggacaggattgacgaactgtatctgggaaaccccatggacccccccgacctcctgagcgtggaactgagcacctcccggcccccccagcatctaggaggggtgaaaaaaccaacctatgaccctgtgagcgaggaccaagaccccttgtccagcgacttcaagaggctgggcctgcggaagccaggcctgccccgagggctgtggctggcgaagccctcggcgcgggtgccgggcaccaaggccagccgaggcagcggggctgaggtcacgctcatcgacttcggtgaggagcccgtggtcccggccctacggccctgcgcgccctccctggcgcagctggccatggacgcctgctccctgctggacgagaccccgcctcagagccccacgcgggcactgccccggcccctgcaccccacgcctgtggtggactgggacgcacgcccgctgccccccccgcccgcctatgacgacgtggcccaggatgaggatgactttgagatctgctccatcaacagcaccctcgtgggcgcgggggtccctgccgggcccagccagggccagaccaactacgcctttgtgcctgagcaggcgcggccgccccctcccctggaggacaacctgttcctcccgccccagggtgggggcaagccgcccagctccgcacagaccgcagagatcttccaggcgctacagcaggagtgcatgaggcaactgcaggctccggccggctccccggccccctctcccagcccggggggtgacgacaagccccaggtgcctcctcgggtacccatcccccctcggcccacgcgcccacacgtccagctgtctccagcccccccgggcgaggaggagaccagccagtggcctggacctgcttcccctccccgggtgcctccgcgggagcccctgtcccctcaaggctcgaggacacccagccccctggtaccacctggcagctccccgctgccaccccggctctcaagctcacctgggaagaccatgcccaccacccagagctttgcctcagaccccaagtacgccaccccccaggtgatccaggcccctggcccgcgggctggtccctgcatcctgcccatcgtccgggatggcaagaaggtcagcagcacccactattacttgctgcccgagcgaccatcctacctggagcgctaccagcgcttcctgcgtgaggcccagagccccgaggagcctaccgcccctgcctgtgcctctgctgctgcccccacccagcaccccagcccccgccgcccccacggccaccgtgcggccgatgccccaggctgccttggaccccaaggccaacttctccaccaacaacagcaacccaggggcccggccaccacccccgagggccactgctcggctgccacagaggggctgccctggcgatgggccagaggcgggccggccagcagacaagatccagatggccatggtgcatggggtgaccacagaggagtgccaggcggccctgcagtgccacggctggagcgtgcagagggctgcccagtatctgaaggtggagcagctcttcgggctgggtctgcggcccagaggggagtgccacaaagtgctggagatgttcgactggaacctggagcaggccggctgccaccttctgggctcctggggccctgcccaccacaagcgctgagatgcgtctggagagccagagggcctgcctgaaggaatcacctgagcctgtccgtccaccaggagtggggagatgcccccatccagtcctggaggacccgctgctcctgctgctcccggggatggagcaaggccaaggctgcgggaggctgggagccctgccctgcccatccctcccgcaccagcgctgtccctgcacactttggttcagtcccggtgcccctgccaagatgtggaaggggccgggtgaagacaggcttgagggctgccccagcaggctctgggtatgacctgcctctggccctggtcctgggcggggcctgtgggtggagtagtacccccaggccctgccctgggtgacagactgggaggaaaccaggctggacctgggcaggcgggatgtgttggccacagggagaggcggaccggcacccggtgggacctcctaggactgggccttcttccagggggcccctggcagcagctggggtgtcgggcagaatgtgacttgtggccttaccatggacttgaatgggacttggctggcctcaggatcttgtgcctggaaatagcctgaggtggctcaggaagcggagaaagggtgccagaccattctctggcggggaccagggcccaaggccccagggctggaaggagaccaaggggcagccgccctggagggacatcagtgcttcctcttccacccaattcccccacgcggttccatgttttcccaccagcctgttggcgaagttgctgctccggcattcagtacctgcttcttccagagaaataaagttagtttctattttatgttaaaaaacaaaaaaagtcgacga

SEQ ID NO: 62938 - DNA, 4216 bp, Homo sapiens
gcagttgggtggggaagccggggagtagggctggactgtgaccactgccctggagagaagacatgaaacaggacagaggatcccggctgcagccagcgtgaggaaagctctgctccctgccagaccggccagctgtggaaacccagcggggcttgcagcagagcggaggggcccaccccgttcttcctcatttcccacccctggtgtgggatttggggggctcctgggcagagtgcgaagctccggagccgaggccactggatccccagtgactgctcgggggggtcccgctgcgtggagatgccggcagcacgtcggttccctggcctggagctctccttccctctcctggccagactgcggcgacgcctgtacacaaggctgggaggcggcagaatgcagccagaggagggcacaggctggctgctggagctgctgtccgaggtgcagctgcaacagtacttcctgcggctccgagatgacctcaacgtcacccgcctgtcccactttgagtacgtcaagaatgaggacctggagaagatcggcatgggtcggcctggccagcggcggctgtgggaggctgtgaagaggaggaaggccttgtgcaaacgcaagtcgtggatgagtaaggtggtgagtgtggctgtgaagtgcctgaagcccgatgtcctgagccagccagaagccatggacgacttcatccgggaggtcaatgccatgcactcgctcgaccaccgaaacctcatccgcctctacggggtggtgctcacgccgcccatgaagatggcatcagtttcccaaattgcctcgagggagaggcctgagaaactgcaggactcctagaggtccccagacagcaggccaggaaggtgacagagctggcacctctgggatcgttgttggaccggctacgtaagcaccagggccacttcctcctggggactctgagccgctacgctgtgcaggtggctgagggcatgggctacctggagtccaagcgctttattcaccgtgacctggctgcccgcaatctgctgttggctacccgcgacctggtcaagatcggggactttgggctgatgcgagcactacctcagaatgacgaccattacgtcatgcaggaacatcgcaaggtgcccttcgcctggtgtgcccccgagagcctgaagacacgcaccttctcccatgccagcgacacctggatgttcggggtgacactgtgggaaatgttcacctacggccaggagccctggatcggcctcaacggcagtcagatcctgcataagatcgacaaggagggggagcggctgccccggcccgaggactgtccccaggacatctacaacgtcatggtccagtgctgggctcacaagccagaggacagacccacgtttgtggccctgcgggacttcctgctggaggcccagcccacagacatgcgggcccttcaggactttgaggaaccggacaagctgcacatccagatgaatgatgtcatcaccgtcatcgagggaagggccgagaactactggtggcgtggccagaacacacggacgctgtgtgtggggcccttccctcgcaacgtggtgacctccgtggccggcctgtcggcccaggacatcagccagcccctgcagaacagcttcatccacacagggcatggcgacagtgacccccgccactgctggggcttcccggacaggattgacgaactgtatctgggaaaccccatggacccccccgacctcctgagcgtggaactgagcacctcccggcccccccagcatctaggaggggtgaaaaaaccaacctatgaccctgtgagcgaggaccaagaccccttgtccagcgacttcaagaggctgggcctgcggaagccaggcctgccccgagggctgtggctggcgaagccctcggcgcgggtgccgggcaccaaggccagccgaggcagcggggctgaggtcacgctcatcgacttcggtgaggagcccgtggtcccggccctacggccctgcgcgccctccctggcgcagctggccatggacgcctgctccctgctggacgagaccccgcctcagagccccacgcgggcactgccccggcccctgcaccccacgcctgtggtggactgggacgcacgcccgctgccccccccgcccgcctatgacgacgtggcccaggatgaggatgactttgagatctgctccatcaacagcaccctcgtgggcgcgggggtccctgccgggcccagccagggccagaccaactacgcctttgtgcctgagcaggcgcggccgccccctcccctggaggacaacctgttcctcccgccccagggtgggggcaagccgcccagctccgcacagaccgcagagatcttccaggcgctacagcaggagtgcatgaggcaactgcaggctccggccggctccccggccccctctcccagcccggggggtgacgacaagccccaggtgcctcctcgggtacccatcccccctcggcccacgcgcccacacgtccagctgtctccagcccccccgggcgaggaggagaccagccagtggcctggacctgcttcccctccccgggtgcctccgcgggagcccctgtcccctcaaggctcgaggacacccagccccctggtaccacctggcagctccccgctgccaccccggctctcaagctcacctgggaagaccatgcccaccacccagagctttgcctcagaccccaagtacgccaccccccaggtgatccaggcccctggcccgcgggctggtccctgcatcctgcccatcgtccgggatggcaagaaggtcagcagcacccactattacttgctgcccgagcgaccatcctacctggagcgctaccagcgcttcctgcgtgaggcccagagccccgaggagcctaccgcccctgcctgtgcctctgctgctgcccccacccagcaccccagcccccgccgcccccacggccaccgtgcggccgatgccccaggctgccttggaccccaaggccaacttctccaccaacaacagcaacccaggggcccggccaccacccccgagggccactgctcggctgccacagaggggctgccctggcgatgggccagaggcgggccggccagcagacaagatccagatggccatggtgcatggggtgaccacagaggagtgccaggcggccctgcagtgccacggctggagcgtgcagagggctgcccagtatctgaaggtggagcagctcttcgggctgggtctgcggcccagaggggagtgccacaaagtgctggagatgttcgactggaacctggagcaggccggctgccaccttctgggctcctggggccctgcccaccacaagcgctgagatgcgtctggagagccagagggcctgcctgaaggaatcacctgagcctgtccgtccaccaggagtggggagatgcccccatccagtcctggaggacccgctgctcctgctgctcccggggatggagcaaggccaaggctgcgggaggctgggagccctgccctgcccatccctcccgcaccagcgctgtccctgcacactttggttcagtcccggtgcccctgccaagatgtggaaggggccgggtgaagacaggcttgagggctgccccagcaggctctgggtatgacctgcctctggccctggtcctgggcggggcctgtgggtggagtagtacccccaggccctgccctgggtgacagactgggaggaaaccaggctggacctgggcaggcgggatgtgttggccacagggagaggcggaccggcacccggtgggacctcctaggactgggccttcttccagggggcccctggcagcagctggggtgtcgggcagaatgtgacttgtggccttaccatggacttgaatgggacttggctggcctcaggatcttgtgcctggaaatagcctgaggtggctcaggaagcggagaaagggtgccagaccattctctggcggggaccagggcccaaggccccagggctggaaggagaccaaggggcagccgccctggagggacatcagtgcttcctcttccacccaattcccccacgcggttccatgttttcccaccagcctgttggcgaagttgctgctccggcattcagtacctgcttcttccagagaaataaagttagtttctattttatgttaaaaaacaaaaaaagtcgacga

SEQ ID NO: 62939 - DNA, 3299 bp, Homo sapiens
  misc_feature (873)..(873): n is a, c, g, or t
gcagttgggtggggaagccggggagtagggctggactgtgaccactgccctggagagaagacatgaaacaggacagaggatcccggctgcagccagcgtgaggaaagctctgctccctgccagaccggccagctgtggaaacccagcggggcttgcagcagagcggaggggcccaccccgttcttcctcatttcccacccctggtgtgggatttggggggctcctgggcagagtgcgaagctccggagccgaggccactggatccccagtgactgctcgggggggtcccgctgcgtggagatgccggcagcacgtcggttccctggcctggagctctccttccctctcctggccagactgcggcgacgcctgtacacaaggctgggaggcggcagaatgcagccagaggagggcacaggctggctgctggagctgctgtccgaggtgcagctgcaacagtacttcctgcggctccgagatgacctcaacgtcacccgcctgtcccactttgagtacgtcaagaatgaggacctggagaagatcggcatgggtcggcctggccagcggcggctgtgggaggctgtgaagaggaggaaggccttgtgcaaacgcaagtcgtggatgagtaaggtgttcagtggaaagcgactggaggctgagttcccacctcatcactctcagagcaccttccggaagacctcgcccgcccctgggggcccagcaggggaggggcccctgcagagcctcacctgcctcattggggagaaggacctgcgcctcctggagaagctgggtgatggttcctttggcgtggtgcgcaggggcgagtgggacgcgccctcagggaagacggtgagcccacctcagcctgcnttcttcactcagaaaccaacctatgaccctgtgagcgaggaccaagaccccttgtccagcgacttcaagaggctgggcctgcggaagccaggcctgccccgagggctgtggctggcgaagccctcggcgcgggtgccgggcaccaaggccagccgaggcagcggggctgaggtcacgctcatcgacttcggtgaggagcccgtggtcccggccctacggccctgcgcgccctccctggcgcagctggccatggacgcctgctccctgctggacgagaccccgcctcagagccccacgcgggcactgccccggcccctgcaccccacgcctgtggtggactgggacgcacgcccgctgccccccccgcccgcctatgacgacgtggcccaggatgaggatgactttgagatctgctccatcaacagcaccctcgtgggcgcgggggtccctgccgggcccagccagggccagaccaactacgcctttgtgcctgagcaggcgcggccgccccctcccctggaggacaacctgttcctcccgccccagggtgggggcaagccgcccagctccgcacagaccgcagagatcttccaggcgctacagcaggagtgcatgaggcaactgcaggctccggccggctccccggccccctctcccagcccggggggtgacgacaagccccaggtgcctcctcgggtacccatcccccctcggcccacgcgcccacacgtccagctgtctccagcccccccgggcgaggaggagaccagccagtggcctggacctgcttcccctccccgggtgcctccgcgggagcccctgtcccctcaaggctcgaggacacccagccccctggtaccacctggcagctccccgctgccaccccggctctcaagctcacctgggaagaccatgcccaccacccagagctttgcctcagaccccaagtacgccaccccccaggtgatccaggcccctggcccgcgggctggtccctgcatcctgcccatcgtccgggatggcaagaaggtcagcagcacccactattacttgctgcccgagcgaccatcctacctggagcgctaccagcgcttcctgcgtgaggcccagagccccgaggagcctaccgcccctgcctgtgcctctgctgctgcccccacccagcaccccagcccccgccgcccccacggccaccgtgcggccgatgccccaggctgccttggaccccaaggccaacttctccaccaacaacagcaacccaggggcccggccaccacccccgagggccactgctcggctgccacagaggggctgccctggcgatgggccagaggcgggccggccagcagacaagatccagatggccatggtgcatggggtgaccacagaggagtgccaggcggccctgcagtgccacggctggagcgtgcagagggctgcccagtatctgaaggtggagcagctcttcgggctgggtctgcggcccagaggggagtgccacaaagtgctggagatgttcgactggaacctggagcaggccggctgccaccttctgggctcctggggccctgcccaccacaagcgctgagatgcgtctggagagccagagggcctgcctgaaggaatcacctgagcctgtccgtccaccaggagtggggagatgcccccatccagtcctggaggacccgctgctcctgctgctcccggggatggagcaaggccaaggctgcgggaggctgggagccctgccctgcccatccctcccgcaccagcgctgtccctgcacactttggttcagtcccggtgcccctgccaagatgtggaaggggccgggtgaagacaggcttgagggctgccccagcaggctctgggtatgacctgcctctggccctggtcctgggcggggcctgtgggtggagtagtacccccaggccctgccctgggtgacagactgggaggaaaccaggctggacctgggcaggcgggatgtgttggccacagggagaggcggaccggcacccggtgggacctcctaggactgggccttcttccagggggcccctggcagcagctggggtgtcgggcagaatgtgacttgtggccttaccatggacttgaatgggacttggctggcctcaggatcttgtgcctggaaatagcctgaggtggctcaggaagcggagaaagggtgccagaccattctctggcggggaccagggcccaaggccccagggctggaaggagaccaaggggcagccgccctggagggacatcagtgcttcctcttccacccaattcccccacgcggttccatgttttcccaccagcctgttggcgaagttgctgctccggcattcagtacctgcttcttccagagaaataaagttagtttctattttatgttaaaaaacaaaaaaagtcgacga

SEQ ID NO: 62940 - DNA, 4117 bp, Homo sapiens
gcagttgggtggggaagccggggagtagggctggactgtgaccactgccctggagagaagacatgaaacaggacagaggatcccggctgcagccagcgtgaggaaagctctgctccctgccagaccggccagctgtggaaacccagcggggcttgcagcagagcggaggggcccaccccgttcttcctcatttcccacccctggtgtgggatttggggggctcctgggcagagtgcgaagctccggagccgaggccactggatccccagtgactgctcgggggggtcccgctgcgtggagatgccggcagcacgtcggttccctggcctggagctctccttccctctcctggccagactgcggcgacgcctgtacacaaggctgggaggcggcagaatgcagccagaggagggcacaggctggctgctggagctgctgtccgaggtgcagctgcaacagtacttcctgcggctccgagatgacctcaacgtcacccgcctgtcccactttgagtacgtcaagaatgaggacctggagaagatcggcatgggtcggcctggccagcggcggctgtgggaggctgtgaagaggaggaaggccttgtgcaaacgcaagtcgtggatgagtaaggtgttcagtggaaagcgactggaggctgagttcccacctcatcactctcagagcaccttccggaagacctcgcccgcccctgggggcccagcaggggaggggcccctgcagagcctcacctgcctcattggggagaaggacctgcgcctcctggagaagctgggtgatggttcctttggcgtggtgcgcaggggcgagtgggacgcgccctcagggaagacggtgagtgtggctgtgaagtgcctgaagcccgatgtcctgagccagccagaagccatggacgacttcatccgggaggtcaatgccatgcactcgctcgaccaccgaaacctcatccgcctctacggggtggtgctcacgccgcccatgaagatggtgacagagctggcacctctgggatcgttgttggaccggctacgtaagcaccagggccacttcctcctggggactctgagccgctacgctgtgcaggtggctgagggcatgggctacctggagtccaagcgctttattcaccgtgacctggctgcccgcaatctgctgttggctacccgcgacctggtcaagatcggggactttgggctgatgcgagcactacctcagaatgacgaccattacgtcatgcaggaacatcgcaaggtgcccttcgcctggtgtgcccccgagagcctgaagacacgcaccttctcccatgccagcgacacctggatgttcggggtgacactgtgggaaatgttcacctacggccaggagccctggatcggcctcaacggcagtcagatcctgcataagatcgacaaggagggggagcggctgccccggcccgaggactgtccccaggacatctacaacgtcatggtccagtgctgggctcacaagccagaggacagacccacgtttgtggccctgcgggacttcctgctggaggcccagcccacagacatgcgggcccttcaggactttgaggaaccggacaagctgcacatccagatgaatgatgtcatcaccgtcatcgagggaagggccgagaactactggtggcgtggccagaacacacggacgctgtgtgtggggcccttccctcgcaacgtggtgacctccgtggccggcctgtcggcccaggacatcagccagcccctgcagaacagcttcatccacacagggcatggcgacagtgacccccgccactgctggggcttcccggacaggattgacgaactgtatctgggaaaccccatggacccccccgacctcctgagcgtggaactgagcacctcccggcccccccagcatctaggaggggtgaaaaaaccaacctatgaccctgtgagcgaggaccaagaccccttgtccagcgacttcaagaggctgggcctgcggaagccaggcctgccccgagggctgtggctggcgaagccctcggcgcgggtgccgggcaccaaggccagccgaggcagcggggctgaggtcacgctcatcgacttcgcaccctcgtgggcgcgggggtccctgccgggcccagccagggccagaccaactacgcctttgtgcctgagcaggcgcggccgccccctcccctggaggacaacctgttcctcccgccccagggtgggggcaagccgcccagctccgcacagaccgcagagatcttccaggcgctacagcaggagtgcatgaggcaactgcaggctccggccggctccccggccccctctcccagcccggggggtgacgacaagccccaggtgcctcctcgggtacccatcccccctcggcccacgcgcccacacgtccagctgtctccagcccccccgggcgaggaggagaccagccagtggcctggacctgcttcccctccccgggtgcctccgcgggagcccctgtcccctcaaggctcgaggacacccagccccctggtaccacctggcagctccccgctgccaccccggctctcaagctcacctgggaagaccatgcccaccacccagagctttgcctcagaccccaagtacgccaccccccaggtgatccaggcccctggcccgcgggctggtccctgcatcctgcccatcgtccgggatggcaagaaggtcagcagcacccactattacttgctgcccgagcgaccatcctacctggagcgctaccagcgcttcctgcgtgaggcccagagccccgaggagcctaccgcccctgcctgtgcctctgctgctgcccccacccagcaccccagcccccgccgcccccacggccaccgtgcggccgatgccccaggctgccttggaccccaaggccaacttctccaccaacaacagcaacccaggggcccggccaccacccccgagggccactgctcggctgccacagaggggctgccctggcgatgggccagaggcgggccggccagcagacaagatccagatggccatggtgcatggggtgaccacagaggagtgccaggcggccctgcagtgccacggctggagcgtgcagagggctgcccagtatctgaaggtggagcagctcttcgggctgggtctgcggcccagaggggagtgccacaaagtgctggagatgttcgactggaacctggagcaggccggctgccaccttctgggctcctggggccctgcccaccacaagcgctgagatgcgtctggagagccagagggcctgcctgaaggaatcacctgagcctgtccgtccaccaggagtggggagatgcccccatccagtcctggaggacccgctgctcctgctgctcccggggatggagcaaggccaaggctgcgggaggctgggagccctgccctgcccatccctcccgcaccagcgctgtccctgcacactttggttcagtcccggtgcccctgccaagatgtggaaggggccgggtgaagacaggcttgagggctgccccagcaggctctgggtatgacctgcctctggccctggtcctgggcggggcctgtgggtggagtagtacccccaggccctgccctgggtgacagactgggaggaaaccaggctggacctgggcaggcgggatgtgttggccacagggagaggcggaccggcacccggtgggacctcctaggactgggccttcttccagggggcccctggcagcagctggggtgtcgggcagaatgtgacttgtggccttaccatggacttgaatgggacttggctggcctcaggatcttgtgcctggaaatagcctgaggtggctcaggaagcggagaaagggtgccagaccattctctggcggggaccagggcccaaggccccagggctggaaggagaccaaggggcagccgccctggagggacatcagtgcttcctcttccacccaattcccccacgcggttccatgttttcccaccagcctgttggcgaagttgctgctccggcattcagtacctgcttcttccagagaaataaagttagtttctattttatgttaaaaaacaaaaaaagtcgacga

SEQ ID NO: 62941 - DNA, 4295 bp, Homo sapiens
gcagttgggtggggaagccggggagtagggctggactgtgaccactgccctggagagaagacatgaaacaggacagaggatcccggctgcagccagcgtgaggaaagctctgctccctgccagaccggccagctgtggaaacccagcggggcttgcagcagagcggaggggcccaccccgttcttcctcatttcccacccctggtgtgggatttggggggctcctgggcagagtgcgaagctccggagccgaggccactggatccccagtgactgctcgggggggtcccgctgcgtggagatgccggcagcacgtcggttccctggcctggagctctccttccctctcctggccagactgcggcgacgcctgtacacaaggctgggaggcggcagaatgcagccagaggagggcacaggctggctgctggagctgctgtccgaggtgcagctgcaacagtacttcctgcggctccgagatgacctcaacgtcacccgcctgtcccactttgagtacgtcaagaatgaggacctggagaagatcggcatgggtcggcctggccagcggcggctgtgggaggctgtgaagaggaggaaggccttgtgcaaacgcaagtcgtggatgagtaaggtgttcagtggaaagcgactggaggctgagttcccacctcatcactctcagagcaccttccggaagacctcgcccgcccctgggggcccagcaggggaggggcccctgcagagcctcacctgcctcattggggagaaggacctgcgcctcctggagaagctgggtgatggttcctttggcgtggtgcgcaggggcgagtgggacgcgccctcagggaagacggtgagtgtggctgtgaagtgcctgaagcccgatgtcctgagccagccagaagccatggacgacttcatccgggaggtcaatgccatgcactcgctcgaccaccgaaacctcatccgcctctacggggtggtgctcacgccgcccatgaagatggtgacagagctggcacctctgggatcgttgttggaccggctacgtaagcaccagggccacttcctcctggggactctgagccgctacgctgtgcaggtggctgagggcatgggctacctggagtccaagcgctttattcaccgtgacctggctgcccgcaatctgctgttggctacccgcgacctggtcaagatcggggactttgggctgatgcgagcactacctcagaatgacgaccattacgtcatgcaggaacatcgcaaggtgcccttcgcctggtgtgcccccgagagcctgaagacacgcaccttctcccatgccagcgacacctggatgttcggggtgacactgtgggaaatgttcacctacggccaggagccctggatcggcctcaacggcagtcagatcctgcataagatcgacaaggagggggagcggctgccccggcccgaggactgtccccaggacatctacaacgtcatggtccagtgctgggctcacaagccagaggacagacccacgtttgtggccctgcgggacttcctgctggaggcccagcccacagacatgcgggcccttcaggactttgaggaaccggacaagctgcacatccagatgaatgatgtcatcaccgtcatcgagggaagggccgagaactactggtggcgtggccagaacacacggacgctgtgtgtggggcccttccctcgcaacgtggtgacctccgtggccggcctgtcggcccaggacatcagccagcccctgcagaacagcttcatccacacagggcatggcgacagtgacccccgccactgctggggcttcccggacaggattgacgaactgtatctgggaaaccccatggacccccccgacctcctgagcgtggaactgagcacctcccggcccccccagcatctaggaggggtgaaaaaaccaacctatgaccctgtgagcgaggaccaagaccccttgtccagcgacttcaagaggctgggcctgcggaagccaggcctgccccgagggctgtggctggcgaagccctcggcgcgggtgccgggcaccaaggccagccgaggcagcggggctgaggtcacgctcatcgacttcggtgaggagcccgtggtcccggccctacggccctgcgcgccctccctggcgcagctggccatggacgcctgctccctgctggacgagaccccgcctcagagccccacgcgggcactgccccggcccctgcaccccacgcctgtggtggactgggacgcacgcccgctgccccccccgcccgcctatgacgacgtggcccaggatgaggatgactttgagatctgctccatcaacagcaccctcgtgggcgcgggggtccctgccgggcccagccagggccagaccaactacgcctttgtgcctgagcaggcgcggccgccccctcccctggaggacaacctgttcctcccgccccagggtgggggcaagccgcccagctccgcacagaccgcagagatcttccaggcgctacagcaggagtgcatgaggcaactgcaggctccggccggctccccggccccctctcccagcccggggggtgacgacaagccccaggtgcctcctcgggtacccatcccccctcggcccacgcgcccacacgtccagctgtctccagcccccccgggcgaggaggagaccagccagtggcctggacctgcttcccctccccgggtgcctccgcgggagcccctgtcccctcaaggctcgaggacacccagccccctggtaccacctggcagctccccgctgccaccccggctctcaagctcacctgggaagaccatgcccaccacccagagctttgcctcagaccccaagtacgccaccccccaggtgatccaggcccctggcccgcgggctggtccctgcatcctgcccatcgtccgggatggcaagaaggtcagcagcacccactattacttgctgcccgagcgaccatcctacctggagcgctaccagcgcttcctgcgtgaggcccagagccccgaggagcctaccgcccctgcctgtgcctctgctgctgcccccacccagcaccccagcccccgccgcccccacggccaccgtgcggccgatgccccaggctgccttggaccccaaggccaacttctccaccaacaacagcaacccaggggcccggccaccacccccgagggccactgctcggctgccacagaggggctgccctggcgatgggccagaggcgggccggccagcagacaagatccagatggccatggtgcatggggtgaccacagaggagtgccaggcggccctgcagtgccacggctggagcgtgcagagggctgcccagtatctgaaggtggagcagctcttcgggctgggtctgcggcccagaggggagtgccacaaagtgctggagatgttcgactggaacctggagcaggccggctgccaccttctgggctcctggggccctgcccaccacaagcgctgagatgcgtctggagagccagagggcctgcctgaaggaatcacctgagcctgtccgtccaccaggagtggggagatgcccccatccagtcctggaggacccgctgctcctgctgctcccggggatggagcaaggccaaggctgcgggaggctgggagccctgccctgcccatccctcccgcaccagcgctgtccctgcacactttggttcagtcccggtgcccctgccaagatgtggaaggggccgggtgaagacaggcttgagggctgccccagcaggctctgggtatgacctgcctctggccctggtcctgggcggggcctgtgggtggagtagtacccccaggccctgccctgggtgacagactgggaggaaaccaggctggacctgggcaggcgggatgtgttggccacagggagaggcggaccggcacccggtgggacctcctaggactgggccttcttccagggggcccctggcagcagctggggtgtcgggcagaatgtgacttgtggccttaccatggacttgaatgggacttggctggcctcaggatcttgtgcctggaaatagcctgaggtggccccagggctggaaggagaccaaggggcagccgccctggagggacatcagtgcttcctcttccacccaattcccccacgcggttccatgttttcccaccagcctgttggcgaagttgctgctccggcattcagtacctgcttcttccagagaaataaagttagtttctattttatgttaaaaaacaaaaaaagtcgacga

SEQ ID NO: 62942 - DNA, 1512 bp, Homo sapiens
gcagttgggtggggaagccggggagtagggctggactgtgaccactgccctggagagaagacatgaaacaggacagaggatcccggctgcagccagcgtgaggaaagctctgctccctgccagaccggccagctgtggaaacccagcggggcttgcagcagagcggaggggcccaccccgttcttcctcatttcccacccctggtgtgggatttggggggctcctgggcagagtgcgaagctccggagccgaggccactggatccccagtgactgctcgggggggtcccgctgcgtggagatgccggcagcacgtcggttccctggcctggagctctccttccctctcctggccagactgcggcgacgcctgtacacaaggctgggaggcggcagaatgcagccagaggagggcacaggctggctgctggagctgctgtccgaggtgcagctgcaacagtacttcctgcggctccgagatgacctcaacgtcacccgcctgtcccactttgagtacgtcaagaatgaggacctggagaagatcggcatgggtcggcctggccagcggcggctgtgggaggctgtgaagaggaggaaggccttgtgcaaacgcaagtcgtggatgagtaaggtgttcagtggaaagcgactggaggctgagttcccacctcatcactctcagagcaccttccggaagacctcgcccgcccctgggggcccagcaggggaggggcccctgcagagcctcacctgcctcattggggagaaggacctgcgcctcctggagaagctgggtgatggttcctttggcgtggtgcgcaggggcgagtgggacgcgccctcagggaagacggtgagtgtggctgtgaagtgcctgaagcccgatgtcctgagccagccagaagccatggacgacttcatccgggaggtcaatgccatgcactcgctcgaccaccgaaacctcatccgcctctacggggtggtgctcacgccgcccatgaagatggtgacagagctggcacctctgggatcgttgttggaccggctacgtaagcaccagggccacttcctcctggggactctgagccgctacgctgtgcaggtggctgagggcatgggctacctggagtccaagcgctttattcaccgtgacctggctgcccgcaatctgctgttggctacccgcgacctggtcaagatcggggactttgggctgatgcgagcactacctcagaatgacgaccattacgtcatgcaggaacatcgcaaggtgcccttcgcctggtgaggggcaggtgctgccagctcacagagtccctgcagacccaggcctcaaagcttctgggggcccacgtgccagggtctgggtgctggaaatcacagggatacatgctgtgggactctccaaggggctttgctgggtggggtgatacggggatagatgctgtgtcctctccaaggggcattgttgggggtcgtgtttcagggatagatcctgtgtcctctccaaggg

SEQ ID NO: 62943 - DNA, 1293 bp, Homo sapiens
gcagttgggtggggaagccggggagtagggctggactgtgaccactgccctggagagaagacatgaaacaggacagaggatcccggctgcagccagcgtgaggaaagctctgctccctgccagaccggccagctgtggaaacccagcggggcttgcagcagagcggaggggcccaccccgttcttcctcatttcccacccctggtgtgggatttggggggctcctgggcagagtgcgaagctccggagccgaggccactggatccccagtgactgctcgggggggtcccgctgcgtggagatgccggcagcacgtcggttccctggcctggagctctccttccctctcctggccagactgcggcgacgcctgtacacaaggctgggaggcggcagaatgcagccagaggagggcacaggctggctgctggagctgctgtccgaggtgcagctgcaacagtacttcctgcggctccgagatgacctcaacgtcacccgcctgtcccactttgagtacgtcaagaatgaggacctggagaagatcggcatgggtcggcctggccagcggcggctgtgggaggctgtgaagaggaggaaggccttgtgcaaacgcaagtcgtggatgagtaaggtggtgagtgtggctgtgaagtgcctgaagcccgatgtcctgagccagccagaagccatggacgacttcatccgggaggtcaatgccatgcactcgctcgaccaccgaaacctcatccgcctctacggggtggtgctcacgccgcccatgaagatggtgacagagctggcacctctgggatcgttgttggaccggctacgtaagcaccagggccacttcctcctggggactctgagccgctacgctgtgcaggtggctgagggcatgggctacctggagtccaagcgctttattcaccgtgacctggctgcccgcaatctgctgttggctacccgcgacctggtcaagatcggggactttgggctgatgcgagcactacctcagaatgacgaccattacgtcatgcaggaacatcgcaaggtgcccttcgcctggtgaggggcaggtgctgccagctcacagagtccctgcagacccaggcctcaaagcttctgggggcccacgtgccagggtctgggtgctggaaatcacagggatacatgctgtgggactctccaaggggctttgctgggtggggtgatacggggatagatgctgtgtcctctccaaggggcattgttgggggtcgtgtttcagggatagatcctgtgtcctctccaaggg

SEQ ID NO: 62944 - DNA, 5077 bp, Homo sapiens
ctcatgcatatgcaggtgcgcgggtgacgaatgggcgagcgagctgtcagtctcgttccgaacttgttggctgcggtgccgggagcgcgggcgcgcagagcccgaggccgggacccgctgccttcaccgccgccgccgtcgccgccgggtgggagccgggccgggcagccggagcgcggccgccagcgagccggagctgccgccgcccctgcacgcccgccgcccaggcccgcgcgccggacgctgcgctcgaccccgcccgcgccgccgccgccgccgcctctgccgctgccgctgcctctgcgggcgctcggagggcgggcgggcgctgggaggccggcgcggcggctgggagccgggcgcgggcggcggcggcggggccgggcgggcgggtcgcgggggcaatgcgggcgcagggccgggggcgccttccccggcggctgctgctgctgctggcgctctgggtgcaggcggcgcggcccatgggctatttcgagctgcagctgagcgcgctgcggaacgtgaacggggagctgctgagcggcgcctgctgtgacggcgacggccggacaacgcgcgcggggggctgcggccacgacgagtgcgacacgtacgtgcgcgtgtgccttaaggagtaccaggccaaggtgacgcccacggggccctgcagctacggccacggcgccacgcccgtgctgggcggcaactccttctacctgccgccggcgggcgctgcgggggaccgagcgcgggcgcgggcccgggccggcggcgaccaggacccgggcctcgtcgtcatccccttccagttcgcctggccgcgctcctttaccctcatcgtggaggcctgggactgggacaacgataccaccccgaatgaggagctgctgatcgagcgagtgtcgcatgccggcatgatcaacccggaggaccgctggaagagcctgcacttcagcggccacgtggcgcacctggagctgcagatccgcgtgcgctgcgacgagaactactacagcgccacttgcaacaagttctgccggccccgcaacgactttttcggccactacacctgcgaccagtacggcaacaaggcctgcatggacggctggatgggcaaggagtgcaaggaagctgtgtgtaaacaagggtgtaatttgctccacgggggatgcaccgtgcctggggagtgcaggtgcagctacggctggcaagggaggttctgcgatgagtgtgtcccctaccccggctgcgtgcatggcagttgtgtggagccctggcagtgcaactgtgagaccaactggggcggcctgctctgtgacaaagacctgaactactgtggcagccaccacccctgcaccaacggaggcacgtgcatcaacgccgagcctgaccagtaccgctgcacctgccctgacggctactcgggcaggaactgtgagaaggctgagcacgcctgcacctccaacccgtgtgccaacgggggctcttgccatgaggtgccgtccggcttcgaatgccactgcccatcgggctggagcgggcccacctgtgcccttgacatcgatgagtgtgcttcgaacccgtgtgcggccggtggcacctgtgtggaccaggtggacggctttgagtgcatctgccccgagcagtgggtgggggccacctgccagctggacgccaatgagtgtgaagggaagccatgccttaacgctttttcttgcaaaaacctgattggcggctattactgtgattgcatcccgggctggaagggcatcaactgccatatcaacgtcaacgactgtcgcgggcagtgtcagcatgggggcacctgcaaggacctggtgaacgggtaccagtgtgtgtgcccacggggcttcggaggccggcattgcgagctggaacgagacaagtgtgccagcagcccctgccacagcggcggcctctgcgaggacctggccgacggcttccactgccactgcccccagggcttctccgggcctctctgtgaggtggatgtcgacctttgtgagccaagcccctgccggaacggcgctcgctgctataacctggagggtgactattactgcgcctgccctgatgactttggtggcaagaactgctccgtgccccgcgagccgtgccctggcggggcctgcagagtgatcgatggctgcgggtcagacgcggggcctgggatgcctggcacagcagcctccggcgtgtgtggcccccatggacgctgcgtcagccagccagggggcaacttttcctgcatctgtgacagtggctttactggcacctactgccatgagaacattgacgactgcctgggccagccctgccgcaatgggggcacatgcatcgatgaggtggacgccttccgctgcttctgccccagcggctgggagggcgagctctgcgacaccaatcccaacgactgccttcccgatccctgccacagccgcggccgctgctacgacctggtcaatgacttctactgtgcgtgcgacgacggctggaagggcaagacctgccactcacgcgagttccagtgcgatgcctacacctgcagcaacggtggcacctgctacgacagcggcgacaccttccgctgcgcctgcccccccggctggaagggcagcacctgcgccgtcgccaagaacagcagctgcctgcccaacccctgtgtgaatggtggcacctgcgtgggcagcggggcctccttctcctgcatctgccgggacggctgggagggtcgtacttgcactcacaataccaacgactgcaaccctctgccttgctacaatggtggcatctgtgttgacggcgtcaactggttccgctgcgagtgtgcacctggcttcgcggggcctgactgccgcatcaacatcgacgagtgccagtcctcgccctgtgcctacggggccacgtgtgtggatgagatcaacgggtatcgctgtagctgcccacccggccgagccggcccccggtgccaggaagtgatcgggttcgggagatcctgctggtcccggggcactccgttcccacacggaagctcctgggtggaagactgcaacagctgccgctgcctggatggccgccgtgactgcagcaaggtgtggtgcggatggaagccttgtctgctggccggccagcccgaggccctgagcgcccagtgcccactggggcaaaggtgcctggagaaggccccaggccagtgtctgcgaccaccctgtgaggcctggggggagtgcggcgcagaagagccaccgagcaccccctgcctgccacgctccggccacctggacaataactgtgcccgcctcaccttgcatttcaaccgtgaccacgtgccccagggcaccacggtgggcgccatttgctccgggatccgctccctgccagccacaagggctgtggcacgggaccgcctgctggtgttgctttgcgaccgggcgtcctcgggggccagtgccgtggaggtggccgtgtccttcagccctgccagggacctgcctgacagcagcctgatccagggcgcggcccacgccatcgtggccgccatcacccagcgggggaacagctcactgctcctggctgtcaccgaggtcaaggtggagacggttgttacgggcggctcttccacaggtctgctggtgcctgtgctgtgtggtgccttcagcgtgctgtggctggcgtgcgtggtcctgtgcgtgtggtggacacgcaagcgcaggaaagagcgggagaggagccggctgccgcgggaggagagcgccaacaaccagtgggccccgctcaaccccatccgcaaccccatcgagcggccggggggccacaaggacgtgctctaccagtgcaagaacttcacgccgccgccgcgcagggcggacgaggcgctgcccgggccggccggccacgcggccgtcagggaggatgaggaggacgaggatctgggccgcggtgaggaggactccctggaggcggagaagttcctctcacacaaattcaccaaagatcctggccgctcgccggggaggccggcccactgggcctcaggccccaaagtggacaaccgcgcggtcaggagcatcaatgaggcccgctacgccggcaaggagtaggggcggctgccagctgggccgggacccagggccctcggtgggagccatgccgtctgccggacccggaggccgaggccatgtgcatagtttctttattttgtgtaaaaaaaccaccaaaaacaaaaaccaaatgtttattttctacgtttctttaaccttgtataaattattcagtaactgtcaggctgaaaacaatggagtattctcggatagttgctatttttgtaaagtttccgtgcgtggcactcgctgtatgaaaggagagagcaaagggtgtctgcgtcgtcaccaaatcgtagcgtttgttaccagaggttgtgcactgtttacagaatcttccttttattcctcactcgggtttctctgtggctccaggccaaagtgccggtgagacccatggctgtgttggtgtggcccatggctgttggtgggacccgtggctgatggtgtggcctgtggctgtcggtgggactcgtggctgtcaatgggacctgtggctgtcggtgggacctacggtggtcggtgggaccctggttattgatgtggccctggctgccggcacggcccgtggctgttgacgcacctgtggttgttagtggggcctgaggtcatcggcgtggcccaaggccggcaggtcaacctcgcgcttgctggccagtccaccctgcctgccgtctgtgcttcctcctgcccagaacgcccgctccagcgatctctccactgtgctttcagaagtgcccttcctgctgcgcagttctcccatcctgggacggcggcagtattgaagctcgtgacaagtgccttcacacagacccctcgcaactgtccacgcgtgccgtggcaccaggcgctgcccacctgccggccccggccgcccctcctcgtgaaagtgcatttttgtaaatgtgtacatattaaaggaagcactctgtatatttgattgaataatgccacca

SEQ ID NO: 62945 - DNA, 1166 bp, Homo sapiens
gacagcagagacagcccgttccccctgccgcctgagggcaccagggagagggctgtatgtcctcacgccacactgtgtgtgcagtcagcagtgtggccacagatgggggccactctctcaacctcaggtgtcctcagggcccagaccgctgctgggcacagccaggctggctgccagctggttccctgccccgtggctgggggacagagcagcacgtatcagctgggctagggtcagggggccactggtgcgcagcctggcacagcctggcaggcttgaggcccagtgtgctgggggtggtcacacagccgtcagccacctccagctcttcccgggaccccatctagaatgccctgtttctttaaccttgtataaattattcagtaactgtcaggctgaaaacaatggagtattctcggatagttgctatttttgtaaagtttccgtgcgtggcactcgctgtatgaaaggagagagcaaagggtgtctgcgtcgtcaccaaatcgtagcgtttgttaccagaggttgtgcactgtttacagaatcttccttttattcctcactcgggtttctctgtggctccaggccaaagtgccggtgagacccatggctgtgttggtgtggcccatggctgttggtgggacccgtggctgatggtgtggcctgtggctgtcggtgggactcgtggctgtcaatgggacctgtggctgtcggtgggacctacggtggtcggtgggaccctggttattgatgtggccctggctgccggcacggcccgtggctgttgacgcacctgtggttgttagtggggcctgaggtcatcggcgtggcccaaggccggcaggtcaacctcgcgcttgctggccagtccaccctgcctgccgtctgtgcttcctcctgcccagaacgcccgctccagcgatctctccactgtgctttcagaagtgcccttcctgctgcgcagttctcccatcctgggacggcggcagtattgaagctcgtgacaagtgccttcacacagacccctcgcaactgtccacgcgtgccgtggcaccaggcgctgcccacctgccggccccggccgcccctcctcgtgaaagtgcatttttgtaaatgtgtacatattaaaggaagcactctgtatatttgattgaataatgccacca

SEQ ID NO: 62946 - DNA, 929 bp, Homo sapiens
ctgaggtgatctagaggatcccagaatcaatttctatcattgttttacagatctgggctgaggccatttgctcctgcttggttaaaaaaaataaaaaaataaaaaaaggtttcttcctgtttctttaaccttgtataaattattcagtaactgtcaggctgaaaacaatggagtattctcggatagttgctatttttgtaaagtttccgtgcgtggcactcgctgtatgaaaggagagagcaaagggtgtctgcgtcgtcaccaaatcgtagcgtttgttaccagaggttgtgcactgtttacagaatcttccttttattcctcactcgggtttctctgtggctccaggccaaagtgccggtgagacccatggctgtgttggtgtggcccatggctgttggtgggacccgtggctgatggtgtggcctgtggctgtcggtgggactcgtggctgtcaatgggacctgtggctgtcggtgggacctacggtggtcggtgggaccctggttattgatgtggccctggctgccggcacggcccgtggctgttgacgcacctgtggttgttagtggggcctgaggtcatcggcgtggcccaaggccggcaggtcaacctcgcgcttgctggccagtccaccctgcctgccgtctgtgcttcctcctgcccagaacgcccgctccagcgatctctccactgtgctttcagaagtgcccttcctgctgcgcagttctcccatcctgggacggcggcagtattgaagctcgtgacaagtgccttcacacagacccctcgcaactgtccacgcgtgccgtggcaccaggcgctgcccacctgccggccccggccgcccctcctcgtgaaagtgcatttttgtaaatgtgtacatattaaaggaagcactctgtatatttgattgaataatgccacca

SEQ ID NO: 62947 - DNA, 5157 bp, Homo sapiens
ctcatgcatatgcaggtgcgcgggtgacgaatgggcgagcgagctgtcagtctcgttccgaacttgttggctgcggtgccgggagcgcgggcgcgcagagcccgaggccgggacccgctgccttcaccgccgccgccgtcgccgccgggtgggagccgggccgggcagccggagcgcggccgccagcgagccggagctgccgccgcccctgcacgcccgccgcccaggcccgcgcgccggacgctgcgctcgaccccgcccgcgccgccgccgccgccgcctctgccgctgccgctgcctctgcgggcgctcggagggcgggcgggcgctgggaggccggcgcggcggctgggagccgggcgcgggcggcggcggcggggccgggcgggcgggtcgcgggggcaatgcgggcgcagggccgggggcgccttccccggcggctgctgctgctgctggcgctctgggtgcaggcggcgcggcccatgggctatttcgagctgcagctgagcgcgctgcggaacgtgaacggggagctgctgagcggcgcctgctgtgacggcgacggccggacaacgcgcgcggggggctgcggccacgacgagtgcgacacgtacgtgcgcgtgtgccttaaggagtaccaggccaaggtgacgcccacggggccctgcagctacggccacggcgccacgcccgtgctgggcggcaactccttctacctgccgccggcgggcgctgcgggggaccgagcgcgggcgcgggcccgggccggcggcgaccaggacccgggcctcgtcgtcatccccttccagttcgcctggccgcgctcctttaccctcatcgtggaggcctgggactgggacaacgataccaccccgaatgaggagctgctgatcgagcgagtgtcgcatgccggcatgatcaacccggaggaccgctggaagagcctgcacttcagcggccacgtggcgcacctggagctgcagatccgcgtgcgctgcgacgagaactactacagcgccacttgcaacaagttctgccggccccgcaacgactttttcggccactacacctgcgaccagtacggcaacaaggcctgcatggacggctggatgggcaaggagtgcaaggaagctgtgtgtaaacaagggtgtaatttgctccacgggggatgcaccgtgcctggggagtgcaggtgcagctacggctggcaagggaggttctgcgatgagtgtgtcccctaccccggctgcgtgcatggcagttgtgtggagccctggcagtgcaactgtgagaccaactggggcggcctgctctgtgacaaagacctgaactactgtggcagccaccacccctgcaccaacggaggcacgtgcatcaacgccgagcctgaccagtaccgctgcacctgccctgacggctactcgggcaggaactgtgagaaggctgagcacgcctgcacctccaacccgtgtgccaacgggggctcttgccatgaggtgccgtccggcttcgaatgccactgcccatcgggctggagcgggcccacctgtgcccttgacatcgatgagtgtgcttcgaacccgtgtgcggccggtggcacctgtgtggaccaggtggacggctttgagtgcatctgccccgagcagtgggtgggggccacctgccagctggacgccaatgagtgtgaagggaagccatgccttaacgctttttcttgcaaaaacctgattggcggctattactgtgattgcatcccgggctggaagggcatcaactgccatatcaacgtcaacgactgtcgcgggcagtgtcagcatgggggcacctgcaaggacctggtgaacgggtaccagtgtgtgtgcccacggggcttcggaggccggcattgcgagctggaacgagacaagtgtgccagcagcccctgccacagcggcggcctctgcgaggacctggccgacggcttccactgccactgcccccagggcttctccgggcctctctgtgaggtggatgtcgacctttgtgagccaagcccctgccggaacggcgctcgctgctataacctggagggtgactattactgcgcctgccctgatgactttggtggcaagaactgctccgtgccccgcgagccgtgccctggcggggcctgcagaggtgctgggtgcggcatggggtggtgggggaggtggtggggcaggggcgggcctgactcctgactgtactgcctgccatagtgatcgatggctgcgggtcagacgcggggcctgggatgcctggcacagcagcctccggcgtgtgtggcccccatggacgctgcgtcagccagccagggggcaacttttcctgcatctgtgacagtggctttactggcacctactgccatgagaacattgacgactgcctgggccagccctgccgcaatgggggcacatgcatcgatgaggtggacgccttccgctgcttctgccccagcggctgggagggcgagctctgcgacaccaatcccaacgactgccttcccgatccctgccacagccgcggccgctgctacgacctggtcaatgacttctactgtgcgtgcgacgacggctggaagggcaagacctgccactcacgcgagttccagtgcgatgcctacacctgcagcaacggtggcacctgctacgacagcggcgacaccttccgctgcgcctgcccccccggctggaagggcagcacctgcgccgtcgccaagaacagcagctgcctgcccaacccctgtgtgaatggtggcacctgcgtgggcagcggggcctccttctcctgcatctgccgggacggctgggagggtcgtacttgcactcacaataccaacgactgcaaccctctgccttgctacaatggtggcatctgtgttgacggcgtcaactggttccgctgcgagtgtgcacctggcttcgcggggcctgactgccgcatcaacatcgacgagtgccagtcctcgccctgtgcctacggggccacgtgtgtggatgagatcaacgggtatcgctgtagctgcccacccggccgagccggcccccggtgccaggaagtgatcgggttcgggagatcctgctggtcccggggcactccgttcccacacggaagctcctgggtggaagactgcaacagctgccgctgcctggatggccgccgtgactgcagcaaggtgtggtgcggatggaagccttgtctgctggccggccagcccgaggccctgagcgcccagtgcccactggggcaaaggtgcctggagaaggccccaggccagtgtctgcgaccaccctgtgaggcctggggggagtgcggcgcagaagagccaccgagcaccccctgcctgccacgctccggccacctggacaataactgtgcccgcctcaccttgcatttcaaccgtgaccacgtgccccagggcaccacggtgggcgccatttgctccgggatccgctccctgccagccacaagggctgtggcacgggaccgcctgctggtgttgctttgcgaccgggcgtcctcgggggccagtgccgtggaggtggccgtgtccttcagccctgccagggacctgcctgacagcagcctgatccagggcgcggcccacgccatcgtggccgccatcacccagcgggggaacagctcactgctcctggctgtcaccgaggtcaaggtggagacggttgttacgggcggctcttccacaggtctgctggtgcctgtgctgtgtggtgccttcagcgtgctgtggctggcgtgcgtggtcctgtgcgtgtggtggacacgcaagcgcaggaaagagcgggagaggagccggctgccgcgggaggagagcgccaacaaccagtgggccccgctcaaccccatccgcaaccccatcgagcggccggggggccacaaggacgtgctctaccagtgcaagaacttcacgccgccgccgcgcagggcggacgaggcgctgcccgggccggccggccacgcggccgtcagggaggatgaggaggacgaggatctgggccgcggtgaggaggactccctggaggcggagaagttcctctcacacaaattcaccaaagatcctggccgctcgccggggaggccggcccactgggcctcaggccccaaagtggacaaccgcgcggtcaggagcatcaatgaggcccgctacgccggcaaggagtaggggcggctgccagctgggccgggacccagggccctcggtgggagccatgccgtctgccggacccggaggccgaggccatgtgcatagtttctttattttgtgtaaaaaaaccaccaaaaacaaaaaccaaatgtttattttctacgtttctttaaccttgtataaattattcagtaactgtcaggctgaaaacaatggagtattctcggatagttgctatttttgtaaagtttccgtgcgtggcactcgctgtatgaaaggagagagcaaagggtgtctgcgtcgtcaccaaatcgtagcgtttgttaccagaggttgtgcactgtttacagaatcttccttttattcctcactcgggtttctctgtggctccaggccaaagtgccggtgagacccatggctgtgttggtgtggcccatggctgttggtgggacccgtggctgatggtgtggcctgtggctgtcggtgggactcgtggctgtcaatgggacctgtggctgtcggtgggacctacggtggtcggtgggaccctggttattgatgtggccctggctgccggcacggcccgtggctgttgacgcacctgtggttgttagtggggcctgaggtcatcggcgtggcccaaggccggcaggtcaacctcgcgcttgctggccagtccaccctgcctgccgtctgtgcttcctcctgcccagaacgcccgctccagcgatctctccactgtgctttcagaagtgcccttcctgctgcgcagttctcccatcctgggacggcggcagtattgaagctcgtgacaagtgccttcacacagacccctcgcaactgtccacgcgtgccgtggcaccaggcgctgcccacctgccggccccggccgcccctcctcgtgaaagtgcatttttgtaaatgtgtacatattaaaggaagcactctgtatatttgattgaataatgccacca

SEQ ID NO: 62948 - DNA, 1832 bp, Homo sapiens
ccttatgctaggtagaggctggggtttaattcggccgaggcacgctccggccacctggacaataactgtgcccgcctcaccttgcatttcaaccgtgaccacgtgccccagggcaccacggtgggcgccatttgctccgggatccgctccctgccagccacaagggctgtggcacgggaccgcctgctggtgttgctttgcgaccgggcgtcctcgggggccagtgccgtggaggtggccgtgtccttcagccctgccagggacctgcctgacagcagcctgatccagggcgcggcccacgccatcgtggccgccatcacccagcgggggaacagctcactgctcctggctgtcaccgaggtcaaggtggagacggttgttacgggcggctcttccacaggtctgctggtgcctgtgctgtgtggtgccttcagcgtgctgtggctggcgtgcgtggtcctgtgcgtgtggtggacacgcaagcgcaggaaagagcgggagaggagccggctgccgcgggaggagagcgccaacaaccagtgggccccgctcaaccccatccgcaaccccatcgagcggccggggggccacaaggacgtgctctaccagtgcaagaacttcacgccgccgccgcgcagggcggacgaggcgctgcccgggccggccggccacgcggccgtcagggaggatgaggaggacgaggatctgggccgcggtgaggaggactccctggaggcggagaagttcctctcacacaaattcaccaaagatcctggccgctcgccggggaggccggcccactgggcctcaggccccaaagtggacaaccgcgcggtcaggagcatcaatgaggcccgctacgccggcaaggagtaggggcggctgccagctgggccgggacccagggccctcggtgggagccatgccgtctgccggacccggaggccgaggccatgtgcatagtttctttattttgtgtaaaaaaaccaccaaaaacaaaaaccaaatgtttattttctacgtttctttaaccttgtataaattattcagtaactgtcaggctgaaaacaatggagtattctcggatagttgctatttttgtaaagtttccgtgcgtggcactcgctgtatgaaaggagagagcaaagggtgtctgcgtcgtcaccaaatcgtagcgtttgttaccagaggttgtgcactgtttacagaatcttccttttattcctcactcgggtttctctgtggctccaggccaaagtgccggtgagacccatggctgtgttggtgtggcccatggctgttggtgggacccgtggctgatggtgtggcctgtggctgtcggtgggactcgtggctgtcaatgggacctgtggctgtcggtgggacctacggtggtcggtgggaccctggttattgatgtggccctggctgccggcacggcccgtggctgttgacgcacctgtggttgttagtggggcctgaggtcatcggcgtggcccaaggccggcaggtcaacctcgcgcttgctggccagtccaccctgcctgccgtctgtgcttcctcctgcccagaacgcccgctccagcgatctctccactgtgctttcagaagtgcccttcctgctgcgcagttctcccatcctgggacggcggcagtattgaagctcgtgacaagtgccttcacacagacccctcgcaactgtccacgcgtgccgtggcaccaggcgctgcccacctgccggccccggccgcccctcctcgtgaaagtgcatttttgtaaatgtgtacatattaaaggaagcactctgtatatttgattgaataatgccacca

SEQ ID NO: 62949 - DNA, 2249 bp, Homo sapiens
gctgatacggtccggaattttgggatctggcttcgcggggcctgactgccgcataacatcgacgagtgccagtcctcgccctgtgcctacggggccacgtgtgtggatgagatcaacgggtatcgctgtagctgcccacccggccgagccggcccccggtgccaggaagtgatcgggttcgggagatcctgctggtcccggggcactccgttcccacacggaagctcctgggtggaagactgcaacagctgccgctgcctggatggccgccgtgactgcagcaaggtgtggtgcggatggaagccttgtctgctggccggccagcccgaggccctgagcgcccagtgcccactggggcaaaggtgcctggagaaggccccaggccagtgtctgcgaccaccctgtgaggcctggggggagtgcggcgcagaagagccaccgagcaccccctgcctgccacgctccggccacctggacaataactgtgcccgcctcaccttgcatttcaaccgtgaccacgtgccccagggcaccacggtgggcgccatttgctccgggatccgctccctgccagccacaagggctgtggcacgggaccgcctgctggtgttgctttgcgaccgggcgtcctcgggggccagtgccgtggaggtggccgtgtccttcagccctgccagggacctgcctgacagcagcctgatccagggcgcggcccacgccatcgtggccgccatcacccagcgggggaacagctcactgctcctggctgtcaccgaggtcaaggtggagacggttgttacgggcggctcttccacaggtctgctggtgcctgtgctgtgtggtgccttcagcgtgctgtggctggcgtgcgtggtcctgtgcgtgtggtggacacgcaagcgcaggaaagagcgggagaggagccggctgccgcgggaggagagcgccaacaaccagtgggccccgctcaaccccatccgcaaccccatcgagcggccggggggccacaaggacgtgctctaccagtgcaagaacttcacgccgccgccgcgcagggcggacgaggcgctgcccgggccggccggccacgcggccgtcagggaggatgaggaggacgaggatctgggccgcggtgaggaggactccctggaggcggagaagttcctctcacacaaattcaccaaagatcctggccgctcgccggggaggccggcccactgggcctcaggccccaaagtggacaaccgcgcggtcaggagcatcaatgaggcccgctacgccggcaaggagtaggggcggctgccagctgggccgggacccagggccctcggtgggagccatgccgtctgccggacccggaggccgaggccatgtgcatagtttctttattttgtgtaaaaaaaccaccaaaaacaaaaaccaaatgtttattttctacgtttctttaaccttgtataaattattcagtaactgtcaggctgaaaacaatggagtattctcggatagttgctatttttgtaaagtttccgtgcgtggcactcgctgtatgaaaggagagagcaaagggtgtctgcgtcgtcaccaaatcgtagcgtttgttaccagaggttgtgcactgtttacagaatcttccttttattcctcactcgggtttctctgtggctccaggccaaagtgccggtgagacccatggctgtgttggtgtggcccatggctgttggtgggacccgtggctgatggtgtggcctgtggctgtcggtgggactcgtggctgtcaatgggacctgtggctgtcggtgggacctacggtggtcggtgggaccctggttattgatgtggccctggctgccggcacggcccgtggctgttgacgcacctgtggttgttagtggggcctgaggtcatcggcgtggcccaaggccggcaggtcaacctcgcgcttgctggccagtccaccctgcctgccgtctgtgcttcctcctgcccagaacgcccgctccagcgatctctccactgtgctttcagaagtgcccttcctgctgcgcagttctcccatcctgggacggcggcagtattgaagctcgtgacaagtgccttcacacagacccctcgcaactgtccacgcgtgccgtggcaccaggcgctgcccacctgccggccccggccgcccctcctcgtgaaagtgcatttttgtaaatgtgtacatattaaaggaagcactctgtatatttgattgaataatgccacca

SEQ ID NO: 62950 - DNA, 4963 bp, Homo sapiens
ctcatgcatatgcaggtgcgcgggtgacgaatgggcgagcgagctgtcagtctcgttccgaacttgttggctgcggtgccgggagcgcgggcgcgcagagcccgaggccgggacccgctgccttcaccgccgccgccgtcgccgccgggtgggagccgggccgggcagccggagcgcggccgccagcgagccggagctgccgccgcccctgcacgcccgccgcccaggcccgcgcgccggacgctgcgctcgaccccgcccgcgccgccgccgccgccgcctctgccgctgccgctgcctctgcgggcgctcggagggcgggcgggcgctgggaggccggcgcggcggctgggagccgggcgcgggcggcggcggcggggccgggcgggcgggtcgcgggggcaatgcgggcgcagggccgggggcgccttccccggcggctgctgctgctgctggcgctctgggtgcaggcggcgcggcccatgggctatttcgagctgcagctgagcgcgctgcggaacgtgaacggggagctgctgagcggcgcctgctgtgacggcgacggccggacaacgcgcgcggggggctgcggccacgacgagtgcgacacgtacgtgcgcgtgtgccttaaggagtaccaggccaaggtgacgcccacggggccctgcagctacggccacggcgccacgcccgtgctgggcggcaactccttctacctgccgccggcgggcgctgcgggggaccgagcgcgggcgcgggcccgggccggcggcgaccaggacccgggcctcgtcgtcatccccttccagttcgcctggccgcgctcctttaccctcatcgtggaggcctgggactgggacaacgataccaccccgaatgaggagctgctgatcgagcgagtgtcgcatgccggcatgatcaacccggaggaccgctggaagagcctgcacttcagcggccacgtggcgcacctggagctgcagatccgcgtgcgctgcgacgagaactactacagcgccacttgcaacaagttctgccggccccgcaacgactttttcggccactacacctgcgaccagtacggcaacaaggcctgcatggacggctggatgggcaaggagtgcaaggaagctgtgtgtaaacaagggtgtaatttgctccacgggggatgcaccgtgcctggggagtgcaggtgcagctacggctggcaagggaggttctgcgatgagtgtgtcccctaccccggctgcgtgcatggcagttgtgtggagccctggcagtgcaactgtgagaccaactggggcggcctgctctgtgacaaagacctgaactactgtggcagccaccacccctgcaccaacggaggcacgtgcatcaacgccgagcctgaccagtaccgctgcacctgccctgacggctactcgggcaggaactgtgagaaggctgagcacgcctgcacctccaacccgtgtgccaacgggggctcttgccatgaggtgccgtccggcttcgaatgccactgcccatcgggctggagcgggcccacctgtgcccttgacatcgatgagtgtgcttcgaacccgtgtgcggccggtggcacctgtgtggaccaggtggacggctttgagtgcatctgccccgagcagtgggtgggggccacctgccagctggacgtcaacgactgtcgcgggcagtgtcagcatgggggcacctgcaaggacctggtgaacgggtaccagtgtgtgtgcccacggggcttcggaggccggcattgcgagctggaacgagacaagtgtgccagcagcccctgccacagcggcggcctctgcgaggacctggccgacggcttccactgccactgcccccagggcttctccgggcctctctgtgaggtggatgtcgacctttgtgagccaagcccctgccggaacggcgctcgctgctataacctggagggtgactattactgcgcctgccctgatgactttggtggcaagaactgctccgtgccccgcgagccgtgccctggcggggcctgcagagtgatcgatggctgcgggtcagacgcggggcctgggatgcctggcacagcagcctccggcgtgtgtggcccccatggacgctgcgtcagccagccagggggcaacttttcctgcatctgtgacagtggctttactggcacctactgccatgagaacattgacgactgcctgggccagccctgccgcaatgggggcacatgcatcgatgaggtggacgccttccgctgcttctgccccagcggctgggagggcgagctctgcgacaccaatcccaacgactgccttcccgatccctgccacagccgcggccgctgctacgacctggtcaatgacttctactgtgcgtgcgacgacggctggaagggcaagacctgccactcacgcgagttccagtgcgatgcctacacctgcagcaacggtggcacctgctacgacagcggcgacaccttccgctgcgcctgcccccccggctggaagggcagcacctgcgccgtcgccaagaacagcagctgcctgcccaacccctgtgtgaatggtggcacctgcgtgggcagcggggcctccttctcctgcatctgccgggacggctgggagggtcgtacttgcactcacaataccaacgactgcaaccctctgccttgctacaatggtggcatctgtgttgacggcgtcaactggttccgctgcgagtgtgcacctggcttcgcggggcctgactgccgcatcaacatcgacgagtgccagtcctcgccctgtgcctacggggccacgtgtgtggatgagatcaacgggtatcgctgtagctgcccacccggccgagccggcccccggtgccaggaagtgatcgggttcgggagatcctgctggtcccggggcactccgttcccacacggaagctcctgggtggaagactgcaacagctgccgctgcctggatggccgccgtgactgcagcaaggtgtggtgcggatggaagccttgtctgctggccggccagcccgaggccctgagcgcccagtgcccactggggcaaaggtgcctggagaaggccccaggccagtgtctgcgaccaccctgtgaggcctggggggagtgcggcgcagaagagccaccgagcaccccctgcctgccacgctccggccacctggacaataactgtgcccgcctcaccttgcatttcaaccgtgaccacgtgccccagggcaccacggtgggcgccatttgctccgggatccgctccctgccagccacaagggctgtggcacgggaccgcctgctggtgttgctttgcgaccgggcgtcctcgggggccagtgccgtggaggtggccgtgtccttcagccctgccagggacctgcctgacagcagcctgatccagggcgcggcccacgccatcgtggccgccatcacccagcgggggaacagctcactgctcctggctgtcaccgaggtcaaggtggagacggttgttacgggcggctcttccacaggtctgctggtgcctgtgctgtgtggtgccttcagcgtgctgtggctggcgtgcgtggtcctgtgcgtgtggtggacacgcaagcgcaggaaagagcgggagaggagccggctgccgcgggaggagagcgccaacaaccagtgggccccgctcaaccccatccgcaaccccatcgagcggccggggggccacaaggacgtgctctaccagtgcaagaacttcacgccgccgccgcgcagggcggacgaggcgctgcccgggccggccggccacgcggccgtcagggaggatgaggaggacgaggatctgggccgcggtgaggaggactccctggaggcggagaagttcctctcacacaaattcaccaaagatcctggccgctcgccggggaggccggcccactgggcctcaggccccaaagtggacaaccgcgcggtcaggagcatcaatgaggcccgctacgccggcaaggagtaggggcggctgccagctgggccgggacccagggccctcggtgggagccatgccgtctgccggacccggaggccgaggccatgtgcatagtttctttattttgtgtaaaaaaaccaccaaaaacaaaaaccaaatgtttattttctacgtttctttaaccttgtataaattattcagtaactgtcaggctgaaaacaatggagtattctcggatagttgctatttttgtaaagtttccgtgcgtggcactcgctgtatgaaaggagagagcaaagggtgtctgcgtcgtcaccaaatcgtagcgtttgttaccagaggttgtgcactgtttacagaatcttccttttattcctcactcgggtttctctgtggctccaggccaaagtgccggtgagacccatggctgtgttggtgtggcccatggctgttggtgggacccgtggctgatggtgtggcctgtggctgtcggtgggactcgtggctgtcaatgggacctgtggctgtcggtgggacctacggtggtcggtgggaccctggttattgatgtggccctggctgccggcacggcccgtggctgttgacgcacctgtggttgttagtggggcctgaggtcatcggcgtggcccaaggccggcaggtcaacctcgcgcttgctggccagtccaccctgcctgccgtctgtgcttcctcctgcccagaacgcccgctccagcgatctctccactgtgctttcagaagtgcccttcctgctgcgcagttctcccatcctgggacggcggcagtattgaagctcgtgacaagtgccttcacacagacccctcgcaactgtccacgcgtgccgtggcaccaggcgctgcccacctgccggccccggccgcccctcctcgtgaaagtgcatttttgtaaatgtgtacatattaaaggaagcactctgtatatttgattgaataatgccacca

SEQ ID NO: 62951 - DNA, 5095 bp, Homo sapiens
ctcatgcatatgcaggtgcgcgggtgacgaatgggcgagcgagctgtcagtctcgttccgaacttgttggctgcggtgccgggagcgcgggcgcgcagagcccgaggccgggacccgctgccttcaccgccgccgccgtcgccgccgggtgggagccgggccgggcagccggagcgcggccgccagcgagccggagctgccgccgcccctgcacgcccgccgcccaggcccgcgcgccggacgctgcgctcgaccccgcccgcgccgccgccgccgccgcctctgccgctgccgctgcctctgcgggcgctcggagggcgggcgggcgctgggaggccggcgcggcggctgggagccgggcgcgggcggcggcggcggggccgggcgggcgggtcgcgggggcaatgcgggcgcagggccgggggcgccttccccggcggctgctgctgctgctggcgctctgggtgcaggcggcgcggcccatgggctatttcgagctgcagctgagcgcgctgcggaacgtgaacggggagctgctgagcggcgcctgctgtgacggcgacggccggacaacgcgcgcggggggctgcggccacgacgagtgcgacacgtacgtgcgcgtgtgccttaaggagtaccaggccaaggtgacgcccacggggccctgcagctacggccacggcgccacgcccgtgctgggcggcaactccttctacctgccgccggcgggcgctgcgggggaccgagcgcgggcgcgggcccgggccggcggcgaccaggacccgggcctcgtcgtcatccccttccagttcgcctggccgcgctcctttaccctcatcgtggaggcctgggactgggacaacgataccaccccgaatgaggagctgctgatcgagcgagtgtcgcatgccggcatgatcaacccggaggaccgctggaagagcctgcacttcagcggccacgtggcgcacctggagctgcagatccgcgtgcgctgcgacgagaactactacagcgccacttgcaacaagttctgccggccccgcaacgactttttcggccactacacctgcgaccagtacggcaacaaggcctgcatggacggctggatgggcaaggagtgcaaggaagctgtgtgtaaacaagggtgtaatttgctccacgggggatgcaccgtgcctggggagtgcaggtgcagctacggctggcaagggaggttctgcgatgagtgtgtcccctaccccggctgcgtgcatggcagttgtgtggagccctggcagtgcaactgtgagaccaactggggcggcctgctctgtgacaaagacctgaactactgtggcagccaccacccctgcaccaacggaggcacgtgcatcaacgccgagcctgaccagtaccgctgcacctgccctgacggctactcgggcaggaactgtgagaaggctgagcacgcctgcacctccaacccgtgtgccaacgggggctcttgccatgaggtgccgtccggcttcgaatgccactgcccatcgggctggagcgggcccacctgtgcccttgacatcgatgagtgtgcttcgaacccgtgtgcggccggtggcacctgtgtggaccaggtggacggctttgagtgcatctgccccgagcagtgggtgggggccacctgccagctggacgccaatgagtgtgaagggaagccatgccttaacgctttttcttgcaaaaacctgattggcggctattactgtgattgcatcccgggctggaagggcatcaactgccatatcaacgtcaacgactgtcgcgggcagtgtcagcatgggggcacctgcaaggacctggtgaacgggtaccagtgtgtgtgcccacggggcttcggaggccggcattgcgagctggaacgagacaagtgtgccagcagcccctgccacagcggcggcctctgcgaggacctggccgacggcttccactgccactgcccccagggcttctccgggcctctctgtgaggcaccccccaccctgcaggtggatgtcgacctttgtgagccaagcccctgccggaacggcgctcgctgctataacctggagggtgactattactgcgcctgccctgatgactttggtggcaagaactgctccgtgccccgcgagccgtgccctggcggggcctgcagagtgatcgatggctgcgggtcagacgcggggcctgggatgcctggcacagcagcctccggcgtgtgtggcccccatggacgctgcgtcagccagccagggggcaacttttcctgcatctgtgacagtggctttactggcacctactgccatgagaacattgacgactgcctgggccagccctgccgcaatgggggcacatgcatcgatgaggtggacgccttccgctgcttctgccccagcggctgggagggcgagctctgcgacaccaatcccaacgactgccttcccgatccctgccacagccgcggccgctgctacgacctggtcaatgacttctactgtgcgtgcgacgacggctggaagggcaagacctgccactcacgcgagttccagtgcgatgcctacacctgcagcaacggtggcacctgctacgacagcggcgacaccttccgctgcgcctgcccccccggctggaagggcagcacctgcgccgtcgccaagaacagcagctgcctgcccaacccctgtgtgaatggtggcacctgcgtgggcagcggggcctccttctcctgcatctgccgggacggctgggagggtcgtacttgcactcacaataccaacgactgcaaccctctgccttgctacaatggtggcatctgtgttgacggcgtcaactggttccgctgcgagtgtgcacctggcttcgcggggcctgactgccgcatcaacatcgacgagtgccagtcctcgccctgtgcctacggggccacgtgtgtggatgagatcaacgggtatcgctgtagctgcccacccggccgagccggcccccggtgccaggaagtgatcgggttcgggagatcctgctggtcccggggcactccgttcccacacggaagctcctgggtggaagactgcaacagctgccgctgcctggatggccgccgtgactgcagcaaggtgtggtgcggatggaagccttgtctgctggccggccagcccgaggccctgagcgcccagtgcccactggggcaaaggtgcctggagaaggccccaggccagtgtctgcgaccaccctgtgaggcctggggggagtgcggcgcagaagagccaccgagcaccccctgcctgccacgctccggccacctggacaataactgtgcccgcctcaccttgcatttcaaccgtgaccacgtgccccagggcaccacggtgggcgccatttgctccgggatccgctccctgccagccacaagggctgtggcacgggaccgcctgctggtgttgctttgcgaccgggcgtcctcgggggccagtgccgtggaggtggccgtgtccttcagccctgccagggacctgcctgacagcagcctgatccagggcgcggcccacgccatcgtggccgccatcacccagcgggggaacagctcactgctcctggctgtcaccgaggtcaaggtggagacggttgttacgggcggctcttccacaggtctgctggtgcctgtgctgtgtggtgccttcagcgtgctgtggctggcgtgcgtggtcctgtgcgtgtggtggacacgcaagcgcaggaaagagcgggagaggagccggctgccgcgggaggagagcgccaacaaccagtgggccccgctcaaccccatccgcaaccccatcgagcggccggggggccacaaggacgtgctctaccagtgcaagaacttcacgccgccgccgcgcagggcggacgaggcgctgcccgggccggccggccacgcggccgtcagggaggatgaggaggacgaggatctgggccgcggtgaggaggactccctggaggcggagaagttcctctcacacaaattcaccaaagatcctggccgctcgccggggaggccggcccactgggcctcaggccccaaagtggacaaccgcgcggtcaggagcatcaatgaggcccgctacgccggcaaggagtaggggcggctgccagctgggccgggacccagggccctcggtgggagccatgccgtctgccggacccggaggccgaggccatgtgcatagtttctttattttgtgtaaaaaaaccaccaaaaacaaaaaccaaatgtttattttctacgtttctttaaccttgtataaattattcagtaactgtcaggctgaaaacaatggagtattctcggatagttgctatttttgtaaagtttccgtgcgtggcactcgctgtatgaaaggagagagcaaagggtgtctgcgtcgtcaccaaatcgtagcgtttgttaccagaggttgtgcactgtttacagaatcttccttttattcctcactcgggtttctctgtggctccaggccaaagtgccggtgagacccatggctgtgttggtgtggcccatggctgttggtgggacccgtggctgatggtgtggcctgtggctgtcggtgggactcgtggctgtcaatgggacctgtggctgtcggtgggacctacggtggtcggtgggaccctggttattgatgtggccctggctgccggcacggcccgtggctgttgacgcacctgtggttgttagtggggcctgaggtcatcggcgtggcccaaggccggcaggtcaacctcgcgcttgctggccagtccaccctgcctgccgtctgtgcttcctcctgcccagaacgcccgctccagcgatctctccactgtgctttcagaagtgcccttcctgctgcgcagttctcccatcctgggacggcggcagtattgaagctcgtgacaagtgccttcacacagacccctcgcaactgtccacgcgtgccgtggcaccaggcgctgcccacctgccggccccggccgcccctcctcgtgaaagtgcatttttgtaaatgtgtacatattaaaggaagcactctgtatatttgattgaataatgccacca

SEQ ID NO: 62952 - DNA, 3321 bp, Homo sapiens
ctcatgcatatgcaggtgcgcgggtgacgaatgggcgagcgagctgtcagtctcgttccgaacttgttggctgcggtgccgggagcgcgggcgcgcagagcccgaggccgggacccgctgccttcaccgccgccgccgtcgccgccgggtgggagccgggccgggcagccggagcgcggccgccagcgagccggagctgccgccgcccctgcacgcccgccgcccaggcccgcgcgccggacgctgcgctcgaccccgcccgcgccgccgccgccgccgcctctgccgctgccgctgcctctgcgggcgctcggagggcgggcgggcgctgggaggccggcgcggcggctgggagccgggcgcgggcggcggcggcggggccgggcgggcgggtcgcgggggcaatgcgggcgcagggccgggggcgccttccccggcggctgctgctgctgctggcgctctgggtgcaggcggcgcggcccatgggctatttcgagctgcagctgagcgcgctgcggaacgtgaacggggagctgctgagcggcgcctgctgtgacggcgacggccggacaacgcgcgcggggggctgcggccacgacgagtgcgacacgtacgtgcgcgtgtgccttaaggagtaccaggccaaggtgacgcccacggggccctgcagctacggccacggcgccacgcccgtgctgggcggcaactccttctacctgccgccggcgggcgctgcgggggaccgagcgcgggcgcgggcccgggccggcggcgaccaggacccgggcctcgtcgtcatccccttccagttcgcctggccgcgctcctttaccctcatcgtggaggcctgggactgggacaacgataccaccccgaatgaggagctgctgatcgagcgagtgtcgcatgccggcatgatcaacccggaggaccgctggaagagcctgcacttcagcggccacgtggcgcacctggagctgcagatccgcgtgcgctgcgacgagaactactacagcgccacttgcaacaagttctgccggccccgcaacgactttttcggccactacacctgcgaccagtacggcaacaaggcctgcatggacggctggatgggcaaggagtgcaaggaagctgtgtgtaaacaagggtgtaatttgctccacgggggatgcaccgtgcctggggagtgcaggtgcagctacggctggcaagggaggttctgcgatgagtgtgtcccctaccccggctgcgtgcatggcagttgtgtggagccctggcagtgcaactgtgagaccaactggggcggcctgctctgtgacaaagacctgaactactgtggcagccaccacccctgcaccaacggaggcacgtgcatcaacgccgagcctgaccagtaccgctgcacctgccctgacggctactcgggcaggaactgtgagaaggctgagcacgcctgcacctccaacccgtgtgccaacgggggctcttgccatgaggtgccgtccggcttcgaatgccactgcccatcgggctggagcgggcccacctgtgcccttgacatcgatgagtgtgcttcgaacccgtgtgcggccggtggcacctgtgtggaccaggtggacggctttgagtgcatctgccccgagcagtgggtgggggccacctgccagctggacgccaatgagtgtgaagggaagccatgccttaacgctttttcttgcaaaaacctgattggcggctattactgtgattgcatcccgggctggaagggcatcaactgccatatcaacgtcaacgactgtcgcgggcagtgtcagcatgggggcacctgcaaggacctggtgaacgggtaccagtgtgtgtgcccacggggcttcggaggccggcattgcgagctggaacgagacaagtgtgccagcagcccctgccacagcggcggcctctgcgaggacctggccgacggcttccactgccactgcccccagggcttctccgggcctctctgtgaggtggatgtcgacctttgtgagccaagcccctgccggaacggcgctcgctgctataacctggagggtgactattactgcgcctgccctgatgactttggtggcaagaactgctccgtgccccgcgagccgtgccctggcggggcctgcagagtgatcgatggctgcgggtcagacgcggggcctgggatgcctggcacagcagcctccggcgtgtgtggcccccatggacgctgcgtcagccagccagggggcaacttttcctgcatctgtgacagtggctttactggcacctactgccatgagaacattgacgactgcctgggccagccctgccgcaatgggggcacatgcatcgatgaggtggacgccttccgctgcttctgccccagcggctgggagggcgagctctgcgacaccaatcccaacgactgccttcccgatccctgccacagccgcggccgctgctacgacctggtcaatgacttctactgtgcgtgcgacgacggctggaagggcaagacctgccactcacgcgagttccagtgcgatgcctacacctgcagcaacggtggcacctgctacgacagcggcgacaccttccgctgcgcctgcccccccggctggaagggcagcacctgcgccgtcgccaagaacagcagctgcctgcccaacccctgtgtgaatggtggcacctgcgtgggcagcggggcctccttctcctgcatctgccgggacggctgggagggtcgtacttgcactcacaataccaacgactgcaaccctctgccttggtgagtggcaccctgggggccacagcaggggtgggtgggacttggcatacaacggggggccacctgatgcccaccctctgctctgcagctacaatggtggcatctgtgttgacggcgtcaactggttccgctgcgagtgtgcacctggcttcgcggggcctgactgccgcatcagtgagtggccagacagccccagccctgggagcccctcagcccagccgcggtgtcaggagtctggggacatcaacgtccacgtcccttgaagggcagtgtggccacaactacttcctgcctctcttctgagcctcagtttccccacatgtctgtgccctgtggggttcctgctgtataccctgccaagtgattaagtggggagccccagcctgggggaccagtccggggcccagggagctgtgggggttggagcgtgcagcctgacgtgggctcctctgtggccgcagggctgttgtccctgggtgttggcccagctgtctgtccagcaccccttggctggtccgacgcag

SEQ ID NO: 62953 - DNA, 1996 bp, Homo sapiens
tgcgcctgaccctcctgtgcgtgcctgcccaggtgtggtgcggatggaagccttgtctgctggccggccagcccgaggccctgagcgcccagtgcccactggggcaaaggtgcctggagaaggccccaggccagtgtctgcgaccaccctgtgaggcctggggggagtgcggcgcagaagagccaccgagcaccccctgcctgccacgctccggccacctggacaataactgtgcccgcctcaccttgcatttcaaccgtgaccacgtgccccagggcaccacggtgggcgccatttgctccgggatccgctccctgccagccacaagggctgtggcacgggaccgcctgctggtgttgctttgcgaccgggcgtcctcgggggccagtgccgtggaggtggccgtgtccttcagccctgccagggacctgcctgacagcagcctgatccagggcgcggcccacgccatcgtggccgccatcacccagcgggggaacagctcactgctcctggctgtcaccgaggtcaaggtggagacggttgttacgggcggctcttccacaggtctgctggtgcctgtgctgtgtggtgccttcagcgtgctgtggctggcgtgcgtggtcctgtgcgtgtggtggacacgcaagcgcaggaaagagcgggagaggagccggctgccgcgggaggagagcgccaacaaccagtgggccccgctcaaccccatccgcaaccccatcgagcggccggggggccacaaggacgtgctctaccagtgcaagaacttcacgccgccgccgcgcagggcggacgaggcgctgcccgggccggccggccacgcggccgtcagggaggatgaggaggacgaggatctgggccgcggtgaggaggactccctggaggcggagaagttcctctcacacaaattcaccaaagatcctggccgctcgccggggaggccggcccactgggcctcaggccccaaagtggacaaccgcgcggtcaggagcatcaatgaggcccgctacgccggcaaggagtaggggcggctgccagctgggccgggacccagggccctcggtgggagccatgccgtctgccggacccggaggccgaggccatgtgcatagtttctttattttgtgtaaaaaaaccaccaaaaacaaaaaccaaatgtttattttctacgtttctttaaccttgtataaattattcagtaactgtcaggctgaaaacaatggagtattctcggatagttgctatttttgtaaagtttccgtgcgtggcactcgctgtatgaaaggagagagcaaagggtgtctgcgtcgtcaccaaatcgtagcgtttgttaccagaggttgtgcactgtttacagaatcttccttttattcctcactcgggtttctctgtggctccaggccaaagtgccggtgagacccatggctgtgttggtgtggcccatggctgttggtgggacccgtggctgatggtgtggcctgtggctgtcggtgggactcgtggctgtcaatgggacctgtggctgtcggtgggacctacggtggtcggtgggaccctggttattgatgtggccctggctgccggcacggcccgtggctgttgacgcacctgtggttgttagtggggcctgaggtcatcggcgtggcccaaggccggcaggtcaacctcgcgcttgctggccagtccaccctgcctgccgtctgtgcttcctcctgcccagaacgcccgctccagcgatctctccactgtgctttcagaagtgcccttcctgctgcgcagttctcccatcctgggacggcggcagtattgaagctcgtgacaagtgccttcacacagacccctcgcaactgtccacgcgtgccgtggcaccaggcgctgcccacctgccggccccggccgcccctcctcgtgaaagtgcatttttgtaaatgtgtacatattaaaggaagcactctgtatatttgattgaataatgccacca

SEQ ID NO: 62954 - DNA, 296 bp, Homo sapiens
gtctataaatagtcatttcttaatgatcacattttaggaagatgatgctgttctttcttcttaagtatttatttttatcagtcaagtgataggaagttcaatttcaagtacaagacatttggatcaagaagtgactattatttatttatttgagatggagtcttgctctgttgcccaagctggagtgcagtggtgtgatctcagctcactgcaacttcctcctcctgggttcaagcaattccgctgcctcagcctcccgagtagctggaattacaggcacccaccggcccagtgaa

SEQ ID NO: 62955 - DNA, 362 bp, Homo sapiens
catatcacaactcaaatttctattttgtgcttttgcctcatgtcttctgaatgagacttttgcagaaggtgcaacttcaggaatctgtgattttcaaaattgcttcatgttattctgttgcagtgaggcagtttgggaaccagtgccctagactatcttatccagtaaggtagggacgctgctaattcgtagagtacttttttgcaaatttggaaaaacatgccttttctggaaagatgcagtcttattgatgtatggcctggcagctagaatgaagactgaatttcagctttctttatattccctcatgtgggagctgtagttcattgtttcatgtacattacataaagcaaaacattaaa

SEQ ID NO: 62956 - DNA, 458 bp, Homo sapiens
taaaatacaagagctttatataataaaaagtaaatgtcacatgtaaatagtttcactgatagagtcacaagcaaaagaagacagaactgttaaacattacaatgtactttcataaccaagaagtgagcacacttgatctaatagatacgattccataaacattgccttaatcaactatggatttcagtgtttgtcttgcctgtggtcaagacattgaaaatatgcttatcattttgacttcgaatattcataaaaattcgatgcccaatcattttttgatgttttaatttagataaaattatgatactataacaatatctgaagaacaactccaaattgggttaaaagtgtgaataaagaggattataatgtcaatgttactctaaatccataattacacatttcattgaattcgccatttcttatatatttctgtgtcttctctctccacaagattt

SEQ ID NO: 62957 - DNA, 407 bp, Homo sapiens
actctggaagcagttctgggctggttgggagggaattttgcagtcccacatacctggaaggtggtctacaacagggaacgtgtgagatctgtccccttggtcttacccatggaggaaggagaagacaagaagtatggtacagaatccttatgattgggcataaaccagctctgatcctctaaggtgtggtctttgccttaaagatcccaaatagctgctggagttccagcctcacatgcactaacagaatggagaaagcaaagaatggcatgatcccacctttaaagaacacttcccagaattttctaaaaatctttctttatattatcattgactagaacatagtcatatgtcgacacctaactatgtctaaaaaatgtagtctttcaatcacacccatggcaaaa

SEQ ID NO: 62958 - DNA, 235 bp, Homo sapiens
atgaaatagagctgtttttagcactgaaccttagaaagggaacaaacaaggtgcaaccccatgtgctttggaacggttgcctgacggtggtacggagagtggagctcaagcagagcaaagaagttcagttgagctgaggatgcacaaattggagttctgggctgctgaagtggttggaacttgctaggcagggtatcagagaaggaggagccaaagtgtacgtgtatgttctccc

SEQ ID NO: 62959 - DNA, 358 bp, Homo sapiens
tgaactgaagagaatcatatatctgtagcttgacttcaacaagagcactgctccggttctaagagattctctttaaagagtaaggagaaacccagtgagttggtgccatggaaggaggatgtacacatcatcacttggagacagtccagggagagacagagctgggctgatcctagttatctgtaaaacagaaatgattatcatggcctcttcctagggcagcaggaatgaggaaatgagggataaatgaaaaggacttaagtgggccaggtgcatagttagtgctcagaagcatcaggtattaaaaataataactactggatggtaggccacaacattattatgttttcagggtgca

SEQ ID NO: 62960 - DNA, 199 bp, Homo sapiens
  misc_feature (3)..(3): n is a, c, g, or t
ttntaatggtcttattttaagctctttggaaaattacagagatcatctctgtaattttccaaagagctaaaaataagaccatcagaaaattatttccctttactggctgatttctagctctctgtttcatataacttgtgtgtgaaaagcacttttgtaactctgaccagttttcattacatcattgtctctcagattg

SEQ ID NO: 62961 - DNA, 309 bp, Homo sapiens
ttcaaatatttatgtatgtttgaacattttcataataaaatgttgaaaaactaatgagaatggcataaacaacatttaagcaatatattttgaaatttaattcaaatggtcaaattcctggaaaacacaaactcccttcactaacagaattgatagaaaatctgagtagttcaccattgttaaagaaatggaatgtgccatttaaaaccctccaattgaaaatactacatatagttacaatagggaattttcccaagcacttaaacaataaacaatgccctcttatacaaacctttcccagtaatagaa

SEQ ID NO: 62962 - DNA, 776 bp, Homo sapiens
cataatatcctcatcttggaaaactttttccagtagtgctgcttttagattttcccactactgcagttgatggttcttaaatatgtttggaactcttatattatttaggtcagtttccaaattacacaaattgtaaccattgtagtcagacctcacttgaatgaaaacaatattttacaaactctgagggtagattcgagttaggatttggattaaaacattatcttaaaacctctgagggtagattcgagttaggagtttcaaaacttctttgaacaatatcataattaggatgtagatttacagagctactagctaaagggaaggacaccagtcattgggatgtataagtttggatctgttgcaaaattaaaatgctgccttttgagcatgcctaataatgcacatacaatagaagagccagaatttttagaaaaatgactgacttgatatacaaccttttgtatatcatagaaggaaaatattagttgagtattttgtttatttacctgtttgtatatataaaacctggggcccaatatacaatagattctttttcactatgcttttcacccacagtgtctcaccaggtactctgtttctagccatctataatttcatagatgtttttctttaaaagggatgtattctaggctgggcgaggtgggtcttgcctgtaatcctagcactttgggaggccaagatgggaggattgcttgaggccagtagttggagatcagcctggtcaacatcatgagatcccatctctgttaaaa

SEQ ID NO: 62963 - DNA, 332 bp, Homo sapiens
aaaaaaaaaaaaaagagatccttagagttcttttcagacaatcgtctcttgaatagatgattacaggagtaagcagcttgcagaaggcgagctagcagtctccttggtgagcactgctttgcgagagtcaagaggttcaggcgctcagttctaggtctgcctccctccccaaggccctgccactatttaagatgtctgtttcctcacatctacataggacaggtacacttgagactccacagataagaaatctgggcactttcaggcaacacccacaatgactgagagtgctatcagtcattgttacaaaagatgttccagtattggccatg

SEQ ID NO: 62964 - DNA, 778 bp, Homo sapiens
tagtagccacattaaacaagataaaaacagctgaaatttttaacaatacagtacatttagcctagcaggtgcaaaatattaacatttcaacatgtaatcagtaaaaaacattgctgagatattttactcgcttttttggtacagagtgttccaaatccggcgtctgttaccttcgcagcacatctgggttcagccgcatgtggcgaattggagagcagggctttagggggttctctttgaggcctctcctaaagtggggtccagccctgttttttttttaggtggggaaattgagaagggacggtgagctcaggttgctccagcagagccaaggcttaaagccagaaccactacaaagtttagagtttgctggagcaaacctctttttccccagtgtgaccccagctgcaccattgagcccttaatggggcgtccatcctttgtcactggagtgaagccttatagcaagcagagagtgaggccacagactcttgagatattctaggccattgcttcgaggtcgtatgtgagatatgaacgtaagaccatttgaacccccaaagtctgggattttaaccctcaagggcaatttgatactgagaggttaagggcacagacttctgaatcatttcctggctgtgttgccttgagtacattcaggagtccctctaagcctcagcttcctcacctggagaacctggagaggttgggaggatcccaggagatgatgccagtaaaaggcagatcacagaccctggcaggttctcagaaaaaaaaa

SEQ ID NO: 62965 - DNA, 219 bp, Homo sapiens
tgagccaccgcgcccggcctaggaagtgtttaaagagtcagtcctagaggcaggaaatgtgccttctgcccaaattgtatgcgccagaactcagccacatgcctattggtagatgaatcattaaacagtatatctgttcctttatgttttaaaaaatatttagtaaaggaaacaataggccattaagtggagaagaaaacatgatacaaagctaaacac

SEQ ID NO: 62966 - DNA, 312 bp, Homo sapiens
gctggagtgcagtggcacaatctcagctcattgcaacctccgcctcctgggttcaagtgattctcctgcctcagcctccggagtcactgagactacaggcgtgcaccaccaatgctcagctaatttttaaatctttagtggagacggggtttcaccatgttggccagggtggtctcaatctcttgacctcatgatccacccaccttggcctcccaaagttctgggattacaggcatgagccactgcacccagctataaattttaactttcaaaggacattcacctcaagtaatttaatagactagacttatt

SEQ ID NO: 62967 - DNA, 745 bp, Homo sapiens
attggtactgaggtatgtgcgtgttttccaaagaagtaaatgtcaaggccacactgttggggtcagatttagccaaaagcttacctaggtaaggttgatgtaatgggaaaggtaatggattgggttcagtaatactgatttttgttcctgactctgagaagcaagccgttttgtctttctgaagcttcagtttcctcactgtatctctaaagtcaccgtagtttcttcctagttctaggtcttgcctattccccatcgctccagactgattgtcttcctttctccttagcacctgtgagaatatgaacttctcttggaggaatgaatgcaaccagtgtaaggcccctaaaccagatggcccaggagggggaccaggtggctctcacatggggggtaactacggggatgatcgtcgtggtggcagaggaggctatgatcgaggcggctaccggggccgcggcggggaccgtggaggcttccgagggggccggggtggtggggacagaggtggctttggccctggcaagatggattccaggggtgagcacagacaggatcgcagggagaggccgtattaattagcctggctccccaggttctggaacagctttttgtcctgtacccagtgttaccctcgttattttgtaaccttccaattcctgatcacccaagggtttttttgtgtcggactatgtaattgtaactatacctctggttcccattaaaagtgaccattttagttaaa

SEQ ID NO: 62968 - DNA, 349 bp, Homo sapiens
acagcaactattttcaagtgtacagttctgtagcattaagtacattcacagtgttgctcagccaccaccaccatctgtcccccgaactctttttcagctcgcaagacagaggtggctttggccctggcaagatggattccaggggtgagcacagacaggatcgcagggagaggccgtattaattagcctggctccccaggttctggaacagctttttgtcctgtacccagtgttaccctcgttattttgtaaccttccaattcctgatcacccaagggtttttttgtgtcggactatgtaattgtaactatacctctggttcccattaaaagtgaccattttagttaaa

SEQ ID NO: 62969 - DNA, 705 bp, Homo sapiens
ggtgactctcaggatcttggtcgctcggaccaaggatcacgtcatgactccgaacaggataattcagacaacaacaccatctttgtgcaaggcctgggtgagaatgttacaattgagtctgtggctgattacttcaagcagattggtattattaagacaaacaagaaaacgggacagcccatgattaatttgtacacagacagggaaactggcaagctgaagggagaggcaacggtctcttttgatgacccaccttcagctaaagcagctattgactggtttgatggtaaagaattctccggaaatcctatcaaggtctcatttgctactcgtccgagcggaccggtccgctcggaccatgcagaacctcaacgaccgcctggcctcctacctggacaaggtgcgtgctctggaggaggccaacgccgacctggaagtgaagatccgtgactggtaccagaggcagcggcctgctgagatcaaagactacagtccctacttcaagaccattgaggacctgaggaacaagattctcacagccacagtggacaatgccaacgtccttctgcagattgacaatgcccgtctggccgcggatgacttccgcaccaagtatgagacagagttgaacctgcgcatgagtgtggaggccgacatcaatggcctgcgcagggtgctggacgaactggacctggtccgagcgga

SEQ ID NO: 62970 - DNA, 815 bp, Homo sapiens
gctagtacgaggctgggtgtgaatcggccgtggtggctatgaacccagaggtcgtggaggtggccgtggaggcagaggtggcatgggcggaagtgaccgtggtggcttcaataaatttggtggccctcgggaccaaggatcacgtcatgactccgaacaggataattcagacaacaacaccatctttgtgcaaggcctgggtgagaatgttacaattgagtctgtggctgattacttcaagcagattggtattattaagacaaacaagaaaacgggacagcccatgattaatttgtacacagacagggaaactggcaagctgaagggagaggcaacggtctcttttgatgacccaccttcagctaaagcagctattgactggtttgatggtaaagaattctccggaaatcctatcaaggtctcatttgctactcgccgggcagactttaatcggggtggtggcaatggtcgtggaggccgagggcgaggaggacccatgggccgtggaggctatggaggtggtggcagtggtggtggtggccgaggaggatttcccagtggaggtggtggcggtggaggacagcagcgagctggtgactggaagtgtcctaatcccacctgtgagaatatgaacttctcttggaggaatgaatgcaaccagtgtaaggcccctaaaccagatggcccaggagggggaccaggtggctctcacatgggggggtactacgcggatgatcgccgtggtgcagaggaagtatgacgaggcgggaacggggccggggggacggggagcccaaggccggtggggcccagtg

SEQ ID NO: 62971 - DNA, 1148 bp, Homo sapiens
  misc_feature (795)..(795): n is a, c, g, or t
aaacatagctaggtagaggccggggtaatcggactatggggcctaccccacccagcccgggcagggctattcccagcagagcagtcagccctacggacagcagagttacagtggttatagccagtccacggacacttcaggctatggccagagcagctattcttcttatggccagagccagaacacaggctatggaactcagtcaactccccagggatatggctcgactggcggctatggcagtagccagagctcccaatcgtcttacgggcagcagtcctcctatcctggctatggccagcagccagctcccagcagcacctcgggaagttacggtagcagttctcagagcagcagctatgggcagccccagagtgggagctacagccagcagcctagctatggtggacagcagcaaagctatggacagcagcaaagctataatccccctcagggctatggacagcagaaccagtacaacagcagcagtggtggtggaggtggaggtggaggtggaggtaactatggccaagatcaatcctccatgagtagtggtggtggcagtggtggcggttatggcaatcaagaccagagtggtggaggtggcagcggtggctatggacagcaggaccgtggaggccgcggcaggggtggcagtggtggcggcggcggcggcggcggtggtggttacaaccgcagcagtggtggctatgaacccagaggtcgtggaggtggccgtggaggcagaggtggcatgggcggaagtgaccgtggtggcttcaataaatttggtgncccgcagaccccaccgacacctacggccacaagcggtaccgcacaaaagggcaggagggccactcgccacatcaaggccccacaaagctcagcctgccacagtggagcacgaggtggtgcgggacctgccgccaagccagcaggagagggctacgcggtgccagtgatccagcggcacgagcacagcacagcagagcaacaccaacaacaacacagcaacacttccacacgtcctagcgccactgccaagcacacctcgatcccaagcacagacatggaccgcgacatcaagggacagggagcagagcagctgccggctgtgtgcccatggggaggccagcccaaacccccaa

SEQ ID NO: 62972 - DNA, 295 bp, Homo sapiens
tgtttatcgatgccaccagcatggtggctcaggccatgggtgtatggtggcagtggtggtggtggccgaggaggatttcccagtggaggtggtggcggtggaggacagcagcgagctggtgactggaagtgtcctaatcccacctgtgagaatatgaacttctcttggaggaatgaatgcaaccagtgtaaggcccctaaaccagatggcccaggagggggaccaggtggctctcacatggggggtaactacggggatgatcgtcgtgcatcgataacaccgtacgacattcgta

SEQ ID NO: 62973 - DNA, 1856 bp, Homo sapiens
accgccggtaccggttcggaattcccgggcgtgctcagtcctccaggcgtcggtgctcagcggtgttggaacttcgttgcttgcttgcctgtgcgcgcgtgcgcggacatggcctcaaacgattatacccaacaagcaacccaaagctatggggcctaccccacccagcccgggcagggctattcccagcagagcagtcagccctacggacagcagagttacagtggttatagccagtccacggacacttcaggctatggccagagcagctattcttcttatggccagagccagaacacaggctatggaactcagtcaactccccagggatatggctcgactggcggctatggcagtagccagagctcccaatcgtcttacgggcagcagtcctcctatcctggctatggccagcagccagctcccagcagcacctcgggaagttacggtagcagttctcagagcagcagctatgggcagccccagagtgggagctacagccagcagcctagctatggtggacagcagcaaagctatggacagcagcaaagctataatccccctcagggctatggacagcagaaccagtacaacagcagcagtggtggtggaggtggaggtggaggtggaggtaactatggccaagatcaatcctccatgagtagtggtggtggcagtggtggcggttatggcaatcaagaccagagtggtggaggtggcagcggtggctatggacagcaggaccgtggaggccgcggcaggggtggcagtggtggcggcggcggcggcggcggtggtggttacaaccgcagcagtggtggctatgaacccagaggtcgtggaggtggccgtggaggcagaggtggcatgggcggaagtgaccgtggtggcttcaataaatttggtggccctcgggaccaaggatcacgtcatgactccgaacaggataattcagacaacaacaccatctttgtgcaaggcctgggtgagaatgttacaattgagtctgtggctgattacttcaagcagattggtattattaagacaaacaagaaaacgggacagcccatgattaatttgtacacagacagggaaactggcaagctgaagggagaggcaacggtctcttttgatgacccaccttcagctaaagcagctattgactggtttgatggtaaagaattctccggaaatcctatcaaggtctcatttgctactcgccgggcagactttaatcggggtggtggcaatggtcgtggaggccgagggcgaggaggacccatgggccgtggaggctatggaggtggtggcagtggtggtggtggccgaggaggatttcccagtggaggtggtggcggtggaggacagcagcgagctggtgactggaagtgtcctaatcccacctgtgagaatatgaacttctcttggaggaatgaatgcaaccagtgtaaggcccctaaaccagatggcccaggagggggaccaggtggctctcacatggggggtaactacggggatgatcgtcgtggtggcagaggaggctatgatcgaggcggctaccggggccgcggcggggaccgtggaggcttccgagggggccggggtggtggggacagaggtggctttggccctggcaagatggattccaggggtgagcacagacaggatcgcagggagaggccgtattaattagcctggctccccaggttctggaacagctttttgtcctgtacccagtgttaccctcgttattttgtaaccttccaattcctgatcacccaagggtttttttgtgtcggactatgtaattgtaactatacctctggttcccattaaaagtgaccattttagttaaa

SEQ ID NO: 62974 - DNA, 2139 bp, Homo sapiens
accgccggtaccggttcggaattcccgggcgtgctcagtcctccaggcgtcggtgctcagcggtgttggaacttcgttgcttgcttgcctgtgcgcgcgtgcgcggacatggcctcaaacgattatacccaacaagcaacccaaagctatggggcctaccccacccagcccgggcagggctattcccagcagagcagtcagccctacggacagcagagttacagtggttatagccagtccacggacacttcaggctatggccagagcagctattcttcttatggccagagccagaacacaggctatggaactcagtcaactccccagggatatggctcgactggcggctatggcagtagccagagctcccaatcgtcttacgggcagcagtcctcctatcctggctatggccagcagccagctcccagcagcacctcgggaagttacggtagcagttctcagagcagcagctatgggcagccccagagtgggagctacagccagcagcctagctatggtggacagcagcaaagctatggacagcagcaaagctataatccccctcagggctatggacagcagaaccagtacaacagcagcagtggtggtggaggtggaggtggaggtggaggtaactatggccaagatcaatcctccatgagtagtggtggtggcagtggtggcggttatggcaatcaagaccagagtggtggaggtggcagcggtggctatggacagcaggaccgtggaggccgcggcaggggtggcagtggtggcggcggcggcggcggcggtggtggttacaaccgcagcagtggtggctatgaacccagaggtcgtggaggtggccgtggaggcagaggtggcatgggcggaagtgaccgtggtggcttcaataaatttggtggccctcgggaccaaggatcacgtcatgactccgaacaggataattcagacaacaacaccatctttgtgcaaggcctgggtgagaatgttacaattgagtctgtggctgattacttcaagcagattggtattattaagacaaacaagaaaacgggacagcccatgattaatttgtacacagacagggaaactggcaagctgaagggagaggcaacggtctcttttgatgacccaccttcagctaaagcagctattgactggtttgatggtaaagaattctccggaaatcctatcaaggtctcatttgctactcgccgggcagactttaatcggggtggtggcaatggtcgtggaggccgagggcgaggaggacccatgggccgtggaggctatggaggtggtggcagtggtggtggtggccgaggaggatttcccagtggaggtggtggcggtggaggacagcagcgagctggtgactggaagtgtcctaatcccacctgtgagaatatgaacttctcttggaggaatgaatgcaaccagtgtaaggcccctaaaccagatggcccaggagggggaccaggtggctctcacatggggggtaactacggggatgatcgtcgtggtggcagaggaggctatgatcgaggcggctaccggggccgcggcggggaccgtggaggcttccgagggggccggggtggtggggacagaggtggctttggccctggcaagatggattccaggggtgagcacagacaggatcgcagggagaggccgtattaattagcctggctccccaggttctggaacagctttttgtcctgtacccagtgttaccctcgttattttgtaaccttccaattcctgatcacccaagggtttttttgtgtcggactatgtaattgtaactatacctctggttcccattaaaagtgaccattttagttaaaaaaaaaaaggggaccgacaaaaatcctcaggggcagcaaaagacccaagatactgaacaaagagaccacaaagagaccgccaaacagcaagcgcagacgccgacaaacacgcgacagggcacacaacagggacatgtaaaagcaacacgacgcaggaaagaagcacaacaagaagacgcaaaaaaagaaacacacagagtatgcaagacagaaaaacacgaaccaaacacagcacagagacggactagagaacggacaacacccccaggaagatgcacgacca

SEQ ID NO: 62975 - DNA, 2512 bp, Homo sapiens
accgccggtaccggttcggaattcccgggcgtgctcagtcctccaggcgtcggtgctcagcggtgttggaacttcgttgcttgcttgcctgtgcgcgcgtgcgcggacatggcctcaaacgattatacccaacaagcaacccaaagctatggggcctaccccacccagcccgggcagggctattcccagcagagcagtcagccctacggacagcagagttacagtggttatagccagtccacggacacttcaggctatggccagagcagctattcttcttatggccagagccagaacacaggctatggaactcagtcaactccccagggatatggctcgactggcggctatggcagtagccagagctcccaatcgtcttacgggcagcagtcctcctatcctggctatggccagcagccagctcccagcagcacctcgggaagttacggtagcagttctcagagcagcagctatgggcagccccagagtgggagctacagccagcagcctagctatggtggacagcagcaaagctatggacagcagcaaagctataatccccctcagggctatggacagcagaaccagtacaacagcagcagtggtggtggaggtggaggtggaggtggaggtaactatggccaagatcaatcctccatgagtagtggtggtggcagtggtggcggttatggcaatcaagaccagagtggtggaggtggcagcggtggctatggacagcaggaccgtggaggccgcggcaggggtggcagtggtggcggcggcggcggcggcggtggtggttacaaccgcagcagtggtggctatgaacccagaggtcgtggaggtggccgtggaggcagaggtggcatgggcggaagtgaccgtggtggcttcaataaatttggtggccctcgggaccaaggatcacgtcatgactccgaacaggataattcagacaacaacaccatctttgtgcaaggcctgggtgagaatgttacaattgagtctgtggctgattacttcaagcagattggtattattaagacaaacaagaaaacgggacagcccatgattaatttgtacacagacagggaaactggcaagctgaagggagaggcaacggtctcttttgatgacccaccttcagctaaagcagctattgactggtttgatggtaaagaattctccggaaatcctatcaaggtctcatttgctactcgccgggcagactttaatcggggtggtggcaatggtcgtggaggccgagggcgaggaggacccatgggccgtggaggctatggaggtggtggcagtggtggtggtggccgaggaggatttcccagtggaggtggtggcggtggaggacagcagcgagctggtgactggaagtgtcctaatcccacctgtgagaatatgaacttctcttggaggaatgaatgcaaccagtgtaaggcccctaaaccagatggcccaggagggggaccaggtggctctcacatggggggtaactacggggatgatcgtcgtggtggcagaggaggctatgatcgaggcggctaccggggccgcggcggggaccgtggaggcttccgagggggccggggtggtggggacagaggtggctttggccctggcaagatggattccaggggtgagcacagacaggatcgcagggagaggccgtattaattagcctggctccccaggttctggaacagctttttgtcctgtacccagtgttaccctcgttattttgtaaccttccaattcctgatcacccaagggtttttttgtgtcggactatgtaattgtaactatacctctggttcccattaaaagtgaccattttagttaaaattttgttcctcttcccccttttcactttcctggaagatcgatgtcccgatcaggaaggtagagagttttcctgttcagattaccctgcccagcaggaactggaatacagtgttcggggagaaggccaaatgatatccttgagagcagagattaaacttttctgtcatggggaaagttggtgtataaatgagaaatgaagaacatgggatgtcatgagtgttggcctaaatttgcccagctatggggaatttttcctttaccacatttatttgcatactggtcttagtttatttgcagcagtttatccctttttaagaactctttgatcttttggcccttttaatggtgaggctcaaacaaactacatttaaatggggcagtattcagatttgaccatggtggagagcgcttagccactctgggtctttcacaggaaggagagtaactgagtgctgcaggagtttgtggagtggagtcaggatctaggaggtgagtgactcccttcctagctgccctggtgaacagcgcttgggtagatacctgctataaggagactggtctggctgggttactttcacatcctgcctgtactcagagggcttgaggtcattgacattatgagattttaggcttgatccctttttgattggagggt

SEQ ID NO: 62976 - DNA, 4966 bp, Homo sapiens
accgccggtaccggttcggaattcccgggcgtgctcagtcctccaggcgtcggtgctcagcggtgttggaacttcgttgcttgcttgcctgtgcgcgcgtgcgcggacatggcctcaaacgattatacccaacaagcaacccaaagctatggggcctaccccacccagcccgggcagggctattcccagcagagcagtcagccctacggacagcagagttacagtggttatagccagtccacggacacttcaggctatggccagagcagctattcttcttatggccagagccagaacacaggctatggaactcagtcaactccccagggatatggctcgactggcggctatggcagtagccagagctcccaatcgtcttacgggcagcagtcctcctatcctggctatggccagcagccagctcccagcagcacctcgggaagttacggtagcagttctcagagcagcagctatgggcagccccagagtgggagctacagccagcagcctagctatggtggacagcagcaaagctatggacagcagcaaagctataatccccctcagggctatggacagcagaaccagtacaacagcagcagtggtggtggaggtggaggtggaggtggaggtaactatggccaagatcaatcctccatgagtagtggtggtggcagtggtggcggttatggcaatcaagaccagagtggtggaggtggcagcggtggctatggacagcaggaccgtggaggccgcggcaggggtggcagtggtggcggcggcggcggcggcggtggtggttacaaccgcagcagtggtggctatgaacccagaggtcgtggaggtggccgtggaggcagaggtggcatggggtaggtgtctcatgagccagggagtatctttggtggggagtgtggaggattgcatgaatctccctgaagccagtccctagtgcatggtttagtattcttgttgtctagggatctgtgagggctttgatttgggggcagtgactttctttttacatccccattttatttttgtgagaacttgggagcctgaactcccatccataccactgaatagagattttgagtaatgatacttgtttccaaaaaaaaagaaaccatacatagatacgtatggattggagtcattaatatcctaggcaagaaacatggaagtgaagacttctttctctgcaagggaaaccgatgatcccactcctgggaaatagtagggaaacttggtatgtgtattcccatgtgtcctctagggagttggtaatggttaacctgacttcagcttccaggaattggctactcttcccgttttctatagtcatttgaatccacgagcttgatttgcactaatttgaccgacattgattttgtgtgtgacttggtttatggggccagctgactgaagtaagcagaccttttgggcaaaaatatgctttgacagtggtctcccacctatttgttccactgtctgccttcccctggttacttaaaattcatcagcttgtccaactggaccttctttccttcctgctgaagttgatttgaagtaaaaccttagatttgatgttaaaacagttgtcaaatctgttggtaaataagatttgaaggaccctactctgtctcccttgaaaaaggggaggaatgtcagtgttactgtttttggaaaaagtagatttttaaaccgagtttggaaatggtaagtatgcagaggtgggtgggggcaatctcaaaaacgtgcaaaaatgaggaaaacaaaaatgaggaaatgtgtgcgtgtgtttaatgcaaaactttaaaaagaaaaacaactgttatgtgactgttaacttgctctgcattttatgtgccacaggtatgaaaggtgacattgcaaaatactccgctcttctcgcagtgtagaaggggtgaccccgggggttgggggagatcaaaaacagctcagtagttaggacagagcttagctaagtttgtcttgctttaaggggaagttgcctttggttttgactttttatggaatggggttgggtctgcttgctgctttcaaagcaaaaaccacaaaaatgtgttcaaggctaccccagcctggtgtgaaatgtcttctgggtaaattggggtagggtttttaaaccaactacttggttgtcaaccacttgcgacaagaggaaaaaaaaacatctgctccatcggaagaacgaccaaggaaaatgggttattttttttccagaggaaatagataacgtaaccttttaaagcaaaatctttataaactgtgtctgagaaattgcacacgtgtgtgtgacatgctcaaaggtcagacaaggggtggtcaggaagggatgtattttagtagccacttgtatctttttccaaaaacacctacccatgtttggggaatgttaaacaaaatcaaaaaacaaccttttgtagccgttggaagcttcatgtcctttcttctaacttgtcttctccagcggaagtgaccgtggtggcttcaataaatttggtggtaagtgaacagagtttccaaaattcccaactcccagcaatgctttgtctgattgttcatttgcagatgtcttagcgtgttaatttaaatgtcaaaggttttgaggtgtccagaaccacctccagaaaggggtagggtagaatgccacctgttgcctggtgtgtgctaacctggagcaggtaggggtaagactcaatagtcatcttttaccaaatgggtttgccccaggttaataagaggggtctagtaggccttggactgggccgttgccacacctggcacttagtgaccatcatcatgagaaactggagagtgcgtgctggaacacgtggtgccatcttggctttaggatccttttgatcgttgtgtccaaggcttgtgtgtgtgtgagtgtgtgggagacaactccgaatgtttaattctggaagagggatgtaacattgccctgaggatggtgaagttggtatacatttataaagtacggaatggtgtcaatgaatgcaattctatgtatatggacttaactgagatgggcaaatagaaactagctctgggaaggaacatgtgcactacttcaagaaagattggaagcatgtgtggctcatgggaaataaccaggtcttaaacagcacaaactgaattcgtggaccaggaaggtcttaaacagcacaaactgaattcatggaaaaatgacaaatttgagaagtctcccagtaagctggaacttttctggtttggttaacaaaaggtttcttgatttgtttcaagatttaaagccaaaggtgtgggttcatgacttaggtgtcattgcgtgtgggtacaatatttatatatggcgaattcagataaacattggtcaaagatggtctctggaaaaacaaaatagaggctgcattacggaaataagatttctggtctgttccctgggacatgcttaaaaaatacaatagctattatgtatggtttttattttcatgtggtttcggggaaacaacacggttttaaggatggtttctaaagatgaaattaaaaattgttccacaagggttaagtgtctggtggtaaagttgggagaaactggatggatgcacatcgcatggctggtggcgagcccatctctcttctctcgggtgagagaaccgggccaagctgagttggtttgttcactttaatgggtctccgtttcccctgccacctgtgctgaggacatttcccagcctgagctgggggaggcagcattttctgaagtgtggagttgtctctgtggagactcaagttacagatcttaaggggcctgcctagaattttctcctctgggcaggcgacccaggaaagggtttggagtgaggctgtgagcacttacttgatattttacaagtttggatttggtgttaatttttttccttgtccgttttttcctgttgactaacggctcatcttttccttgtttttgttttttttttgttctttttttccatgtcactaaaggccctcgggaccaaggatcacgtcatgactccgaacaggataattcagacaacaacaccatctttgtgcaaggcctgggtgagaatgttacaattgagtctgtggctgattacttcaagcagattggtattattaagacaaacaagaaaacgggacagcccatgattaatttgtacacagacagggaaactggcaagctgaagggagaggcaacggtctcttttgatgacccaccttcagctaaagcagctattgactggtttgatggtaaagaattctccggaaatcctatcaaggtctcatttgctactcgccgggcagactttaatcggggtggtggcaatggtcgtggaggccgagggcgaggaggacccatgggccgtggaggctatggaggtggtggcagtggtggtggtggccgaggaggatttcccagtggaggtggtggcggtggaggacagcagcgagctggtgactggaagtgtcctaatcccacctgtgagaatatgaacttctcttggaggaatgaatgcaaccagtgtaaggcccctaaaccagatggcccaggagggggaccaggtggctctcacatggggggtaactacggggatgatcgtcgtggtggcagaggaggctatgatcgaggcggctaccggggccgcggcggggaccgtggaggcttccgagggggccggggtggtggggacagaggtggctttggccctggcaagatggattccaggggtgagcacagacaggatcgcagggagaggccgtattaattagcctggctccccaggttctggaacagctttttgtcctgtacccagtgttaccctcgttattttgtaaccttccaattcctgatcacccaagggtttttttgtgtcggactatgtaattgtaactatacctctggttcccattaaaagtgaccattttagttaaa

SEQ ID NO: 62977 - DNA, 5731 bp, Homo sapiens
accgccggtaccggttcggaattcccgggcgtgctcagtcctccaggcgtcggtgctcagcggtgttggaacttcgttgcttgcttgcctgtgcgcgcgtgcgcggacatggcctcaaacgattatacccaacaagcaacccaaagctatggggcctaccccacccagcccgggcagggctattcccagcagagcagtcagccctacggacagcagagttacagtggttatagccagtccacggacacttcaggctatggccagagcagctattcttcttatggccagagccagaacacaggctatggaactcagtcaactccccagggatatggctcgactggcggctatggcagtagccagagctcccaatcgtcttacgggcagcagtcctcctatcctggctatggccagcagccagctcccagcagcacctcgggaagttacggtagcagttctcagagcagcagctatgggcagccccagagtgggagctacagccagcagcctagctatggtggacagcagcaaagctatggacagcagcaaagctataatccccctcagggctatggacagcagaaccagtacaacagcagcagtggtggtggaggtggaggtggaggtggaggtaactatggccaagatcaatcctccatgagtagtggtggtggcagtggtggcggttatggcaatcaagaccagagtggtggaggtggcagcggtggctatggacagcaggaccgtggaggccgcggcaggggtggcagtggtggcggcggcggcggcggcggtggtggttacaaccgcagcagtggtggctatgaacccagaggtcgtggaggtggccgtggaggcagaggtggcatggggtaggtgtctcatgagccagggagtatctttggtggggagtgtggaggattgcatgaatctccctgaagccagtccctagtgcatggtttagtattcttgttgtctagggatctgtgagggctttgatttgggggcagtgactttctttttacatccccattttatttttgtgagaacttgggagcctgaactcccatccataccactgaatagagattttgagtaatgatacttgtttccaaaaaaaaagaaaccatacatagatacgtatggattggagtcattaatatcctaggcaagaaacatggaagtgaagacttctttctctgcaagggaaaccgatgatcccactcctgggaaatagtagggaaacttggtatgtgtattcccatgtgtcctctagggagttggtaatggttaacctgacttcagcttccaggaattggctactcttcccgttttctatagtcatttgaatccacgagcttgatttgcactaatttgaccgacattgattttgtgtgtgacttggtttatggggccagctgactgaagtaagcagaccttttgggcaaaaatatgctttgacagtggtctcccacctatttgttccactgtctgccttcccctggttacttaaaattcatcagcttgtccaactggaccttctttccttcctgctgaagttgatttgaagtaaaaccttagatttgatgttaaaacagttgtcaaatctgttggtaaataagatttgaaggaccctactctgtctcccttgaaaaaggggaggaatgtcagtgttactgtttttggaaaaagtagatttttaaaccgagtttggaaatggtaagtatgcagaggtgggtgggggcaatctcaaaaacgtgcaaaaatgaggaaaacaaaaatgaggaaatgtgtgcgtgtgtttaatgcaaaactttaaaaagaaaaacaactgttatgtgactgttaacttgctctgcattttatgtgccacaggtatgaaaggtgacattgcaaaatactccgctcttctcgcagtgtagaaggggtgaccccgggggttgggggagatcaaaaacagctcagtagttaggacagagcttagctaagtttgtcttgctttaaggggaagttgcctttggttttgactttttatggaatggggttgggtctgcttgctgctttcaaagcaaaaaccacaaaaatgtgttcaaggctaccccagcctggtgtgaaatgtcttctgggtaaattggggtagggtttttaaaccaactacttggttgtcaaccacttgcgacaagaggaaaaaaaaacatctgctccatcggaagaacgaccaaggaaaatgggttattttttttccagaggaaatagataacgtaaccttttaaagcaaaatctttataaactgtgtctgagaaattgcacacgtgtgtgtgacatgctcaaaggtcagacaaggggtggtcaggaagggatgtattttagtagccacttgtatctttttccaaaaacacctacccatgtttggggaatgttaaacaaaatcaaaaaacaaccttttgtagccgttggaagcttcatgtcctttcttctaacttgtcttctccagcggaagtgaccgtggtggcttcaataaatttggtggtaagtgaacagagtttccaaaattcccaactcccagcaatgctttgtctgattgttcatttgcagatgtcttagcgtgttaatttaaatgtcaaaggttttgaggtgtccagaaccacctccagaaaggggtagggtagaatgccacctgttgcctggtgtgtgctaacctggagcaggtaggggtaagactcaatagtcatcttttaccaaatgggtttgccccaggttaataagaggggtctagtaggccttggactgggccgttgccacacctggcacttagtgaccatcatcatgagaaactggagagtgcgtgctggaacacgtggtgccatcttggctttaggatccttttgatcgttgtgtccaaggcttgtgtgtgtgtgagtgtgtgggagacaactccgaatgtttaattctggaagagggatgtaacattgccctgaggatggtgaagttggtatacatttataaagtacggaatggtgtcaatgaatgcaattctatgtatatggacttaactgagatgggcaaatagaaactagctctgggaaggaacatgtgcactacttcaagaaagattggaagcatgtgtggctcatgggaaataaccaggtcttaaacagcacaaactgaattcgtggaccaggaaggtcttaaacagcacaaactgaattcatggaaaaatgacaaatttgagaagtctcccagtaagctggaacttttctggtttggttaacaaaaggtttcttgatttgtttcaagatttaaagccaaaggtgtgggttcatgacttaggtgtcattgcgtgtgggtacaatatttatatatggcgaattcagataaacattggtcaaagatggtctctggaaaaacaaaatagaggctgcattacggaaataagatttctggtctgttccctgggacatgcttaaaaaatacaatagctattatgtatggtttttattttcatgtggtttcggggaaacaacacggttttaaggatggtttctaaagatgaaattaaaaattgttccacaagggttaagtgtctggtggtaaagttgggagaaactggatggatgcacatcgcatggctggtggcgagcccatctctcttctctcgggtgagagaaccgggccaagctgagttggtttgttcactttaatgggtctccgtttcccctgccacctgtgctgaggacatttcccagcctgagctgggggaggcagcattttctgaagtgtggagttgtctctgtggagactcaagttacagatcttaaggggcctgcctagaattttctcctctgggcaggcgacccaggaaagggtttggagtgaggctgtgagcacttacttgatattttacaagtttggatttggtgttaatttttttccttgtccgttttttcctgttgactaacggctcatcttttccttgtttttgttttttttttgttctttttttccatgtcactaaaggccctcgggaccaaggatcacgtcatgactccggtgagttcacacgtggtggcatgaaaagagtggctaaagtggtatcaagactgcctggatgttctttgaaactattataaaaaggaaactgaaaaaaatggggatagagaaggaagggagttaggtgtgtccttagttagcagtgagaagtatttgttacgaagtatttctcagaaatacctggcttgtgggttccacccccagtgatttaggtctgagaggaccctgaaaatctacctttctaacaagtccccagtgatgctgatgcgtctggaccacactcagatggtttacagcagtggttctttcaaaatgtggatcatgtccaagttggtgaacaaaactagtgaaagacctgaccacatgaagtaaagcattgaactcctgtttaggttgtattgatgtttgtgtactagatttgaatgtaaaatgggtttcttatttaattcggggaccttcaactgaaagttgataaatactgatggacttttctgtgtggtcttgttgggcatttcactcctgagccctggtttccatactgtatactgggtgttaacatgtttcaaaggataattgtcaaactgaatctgaaatttatcagcatggctggcatatagggactcaaaagggatgtggatttctttttagttgtcttccataaaccaaatgataccagttgcttgatggatactaggtgctttaggttttttcctgtgttttttattttaccttttcacatttgcattttctctgttcaacaagcagaacaggataattcagacaacaacaccatctttgtgcaaggcctgggtgagaatgttacaattgagtctgtggctgattacttcaagcagattggtattattaagacaaacaagaaaacgggacagcccatgattaatttgtacacagacagggaaactggcaagctgaagggagaggcaacggtctcttttgatgacccaccttcagctaaagcagctattgactggtttgatggtaaagaattctccggaaatcctatcaaggtctcatttgctactcgccgggcagactttaatcggggtggtggcaatggtcgtggaggccgagggcgaggaggacccatgggccgtggaggctatggaggtggtggcagtggtggtggtggccgaggaggatttcccagtggaggtggtggcggtggaggacagcagcgagctggtgactggaagtgtcctaatcccacctgtgagaatatgaacttctcttggaggaatgaatgcaaccagtgtaaggcccctaaaccagatggcccaggagggggaccaggtggctctcacatggggggtaactacggggatgatcgtcgtggtggcagaggaggctatgatcgaggcggctaccggggccgcggcggggaccgtggaggcttccgagggggccggggtggtggggacagaggtggctttggccctggcaagatggattccaggggtgagcacagacaggatcgcagggagaggccgtattaattagcctggctccccaggttctggaacagctttttgtcctgtacccagtgttaccctcgttattttgtaaccttccaattcctgatcacccaagggtttttttgtgtcggactatgtaattgtaactatacctctggttcccattaaaagtgaccattttagttaaa

SEQ ID NO: 62978 - DNA, 3177 bp, Homo sapiens
  misc_feature (1878)..(1878): n is a, c, g, or t
  misc_feature (2177)..(2177): n is a, c, g, or t
  misc_feature (2321)..(2321): n is a, c, g, or t
accgccggtaccggttcggaattcccgggcgtgctcagtcctccaggcgtcggtgctcagcggtgttggaacttcgttgcttgcttgcctgtgcgcgcgtgcgcggacatggcctcaaacgattatacccaacaagcaacccaaagctatggggcctaccccacccagcccgggcagggctattcccagcagagcagtcagccctacggacagcagagttacagtggttatagccagtccacggacacttcaggctatggccagagcagctattcttcttatggccagagccagaacacaggctatggaactcagtcaactccccagggatatggctcgactggcggctatggcagtagccagagctcccaatcgtcttacgggcagcagtcctcctatcctggctatggccagcagccagctcccagcagcacctcgggaagttacggtagcagttctcagagcagcagctatgggcagccccagagtgggagctacagccagcagcctagctatggtggacagcagcaaagctatggacagcagcaaagctataatccccctcagggctatggacagcagaaccagtacaacagcagcagtggtggtggaggtggaggtggaggtggaggtaactatggccaagatcaatcctccatgagtagtggtggtggcagtggtggcggttatggcaatcaagaccagagtggtggaggtggcagcggtggctatggacagcaggaccgtggaggccgcggcaggggtggcagtggtggcggcggcggcggcggcggtggtggttacaaccgcagcagtggtggctatgaacccagaggtcgtggaggtggccgtggaggcagaggtggcatgggcggaagtgaccgtggtggcttcaataaatttggtggccctcgggaccaaggatcacgtcatgactccgaacaggataattcagacaacaacaccatctttgtgcaaggcctgggtgagaatgttacaattgagtctgtggctgattacttcaagcagattggtattattaagacaaacaagaaaacgggacagcccatgattaatttgtacacagacagggaaactggcaagctgaagggagaggcaacggtctcttttgatgacccaccttcagctaaagcagctattgactggtttgatggtaaagaattctccggaaatcctatcaaggtctcatttgctactcgccgggcagactttaatcggggtggtggcaatggtcgtggaggccgagggcgaggaggacccatgggccgtggaggctatggaggtggtggcagtggtggtggtggccgaggaggatttcccagtggaggtggtggcggtggaggacagcagcgagctggtgactggaagtgtcctaatcccacctgtgagaatatgaacttctcttggaggaatgaatgcaaccagtgtaaggcccctaaaccagatggcccaggagggggaccaggtggctctcacatggggggtaactacggggatgatcgtcgtggtggcagaggaggctatgatcgaggcggctaccggggccgcggcggggaccgtggaggcttccgagggggccggggtggtggggacagaggtggctttggccctggcaagatggattccaggggtgagcacagacaggatcgcagggagaggccgtattaattagcctggctccccaggttctggaacagctttttgtcctgtacccagtgttaccctcgttattttgtaaccttccaattcctgatcacccaagggtttttttgtgtcggactatgtaattgtaactatacctctggttcccattaaaagtgaccattttagttaaaaaaaaaaaaaaaaaaaaaaaanaaaaaaaaaaaaaaaaaaaaaaaaaaagaaaaaaaagaaaaaaaaaaaaaaagaaaacaaaagcacaatattatagtcgctcctcggtattcatcctgcatgggttgctcactgagtttgcactgcgttgcctgtaactgtgcgcgcgtgcgcggacatggctcaaacgattattacccaacaagcaaccaaagctatggggctacccacccagccgggcaggctattcccagcagagcagtcagccctacggacagcagagttacagtggttatagccagtccacggacacttcaggntatggccagagcagctattcttcttatggccagagccagaacacaggctatggaactcagtcaactccccagggatatggctcgactggcggctatggcagtagccagagctcccaatcgtcttacgggcagcagtcctcctancctggctatggccagcagccagctcccagcagcacctcgggaagttacggtagcagttctcagagcagcagctatgggcagccccagagtgggagctacagccagcagcctagctatggtggacagcagcaaagctatggacagcagcaaagctataatccccctcagggctatggacagcagaaccagtacaacagcagcagtggtggtggaggtggaggtggaggtggaggtaactatggccaagatcaatcctccatgagtagtggtggtggcagtggtggcggttatggcaatcaagaccagagtggtggaggtggcagcggtggctatggacagcaggaccgtggaggccgcggcaggggtggcagtggtggcggcggatgaggccgcggtggtcgggtacaaccggcagcagtggtggctatgaaccccagaggtccgtggcaggtggaccgtggaggcagaagggggcctgggccggaatgaccgcgggggctccactaaacctgtggtgggccccgtgggccaggggcaccgctataagcacgcaacaggggcaaatcacagaacaccacaagccaacccctgggtggccagggcccagggtggccaacagtgtgtacacaagaagagagtcgcgggcggagagaccacccaaccagaacagtcggggggtcttactaggacaacaaccaacaaaaagggaaggggaccagcacaatattattcacccgacaacgagggaacgcgagcagccagccaacaagcgaagcacagagccactcatctgtagtaacccacaccacataaacactagcgggctgtgggtcgagaaaactgagaccacagctac

SEQ ID NO: 62979 - DNA, 2617 bp, Homo sapiens
  misc_feature (1878)..(1878): n is a, c, g, or t
accgccggtaccggttcggaattcccgggcgtgctcagtcctccaggcgtcggtgctcagcggtgttggaacttcgttgcttgcttgcctgtgcgcgcgtgcgcggacatggcctcaaacgattatacccaacaagcaacccaaagctatggggcctaccccacccagcccgggcagggctattcccagcagagcagtcagccctacggacagcagagttacagtggttatagccagtccacggacacttcaggctatggccagagcagctattcttcttatggccagagccagaacacaggctatggaactcagtcaactccccagggatatggctcgactggcggctatggcagtagccagagctcccaatcgtcttacgggcagcagtcctcctatcctggctatggccagcagccagctcccagcagcacctcgggaagttacggtagcagttctcagagcagcagctatgggcagccccagagtgggagctacagccagcagcctagctatggtggacagcagcaaagctatggacagcagcaaagctataatccccctcagggctatggacagcagaaccagtacaacagcagcagtggtggtggaggtggaggtggaggtggaggtaactatggccaagatcaatcctccatgagtagtggtggtggcagtggtggcggttatggcaatcaagaccagagtggtggaggtggcagcggtggctatggacagcaggaccgtggaggccgcggcaggggtggcagtggtggcggcggcggcggcggcggtggtggttacaaccgcagcagtggtggctatgaacccagaggtcgtggaggtggccgtggaggcagaggtggcatgggcggaagtgaccgtggtggcttcaataaatttggtggccctcgggaccaaggatcacgtcatgactccgaacaggataattcagacaacaacaccatctttgtgcaaggcctgggtgagaatgttacaattgagtctgtggctgattacttcaagcagattggtattattaagacaaacaagaaaacgggacagcccatgattaatttgtacacagacagggaaactggcaagctgaagggagaggcaacggtctcttttgatgacccaccttcagctaaagcagctattgactggtttgatggtaaagaattctccggaaatcctatcaaggtctcatttgctactcgccgggcagactttaatcggggtggtggcaatggtcgtggaggccgagggcgaggaggacccatgggccgtggaggctatggaggtggtggcagtggtggtggtggccgaggaggatttcccagtggaggtggtggcggtggaggacagcagcgagctggtgactggaagtgtcctaatcccacctgtgagaatatgaacttctcttggaggaatgaatgcaaccagtgtaaggcccctaaaccagatggcccaggagggggaccaggtggctctcacatggggggtaactacggggatgatcgtcgtggtggcagaggaggctatgatcgaggcggctaccggggccgcggcggggaccgtggaggcttccgagggggccggggtggtggggacagaggtggctttggccctggcaagatggattccaggggtgagcacagacaggatcgcagggagaggccgtattaattagcctggctccccaggttctggaacagctttttgtcctgtacccagtgttaccctcgttattttgtaaccttccaattcctgatcacccaagggtttttttgtgtcggactatgtaattgtaactatacctctggttcccattaaaagtgaccattttagttaaaaaaaaaaaaaaaaaaaaaaaanaaaaaaaaaaaaaaaaaaaaaaaaaaagaaaaaaaagaaaaaaaaaaaaaaagaaaaaaaaagaaggagggcgcgcagcggccgctacgaaaaaagattaaaaaacacacgatgggggggggacgcagccaccacgagagtagagagaaaggaccgaaagcggctatcggaaaaaacagacggggagacaaaagggcggggaggtaccacaacacaaaaacagcgcgagaggagaacacacatagtatagcagaaaacaaatagagtagagatatgtgagagaaaatataaggggatatatacaaaaagggtgttttttgttgttgtttttattaaaataacaccgcgcggggggagagtaagaaacaataaggtgagataaagaagagagagagaggaggacgggggagaggagggaagggcagagagggagagaggaggagagagaggaagaagaggagggggggagaggcagggagcgagacagaggcgagcggagggagggagggaagaggaagggggcgagcgggagggagagagaaggtagaagagaagtgaagtgcggaggcaggcgagcaacgaaggaggagacgagggaggggcggaggaggcgaaagtgggcgcagaagccagaaggaggaaggcgagaaggcaaggggatgaagaagggggagaggggggaggaagggagaggagaagacagagaggagagggagtgaagagagaagaaggaaggaaa

SEQ ID NO: 62980 - DNA, 2149 bp, Homo sapiens
  misc_feature (1878)..(1878): n is a, c, g, or t
accgccggtaccggttcggaattcccgggcgtgctcagtcctccaggcgtcggtgctcagcggtgttggaacttcgttgcttgcttgcctgtgcgcgcgtgcgcggacatggcctcaaacgattatacccaacaagcaacccaaagctatggggcctaccccacccagcccgggcagggctattcccagcagagcagtcagccctacggacagcagagttacagtggttatagccagtccacggacacttcaggctatggccagagcagctattcttcttatggccagagccagaacacaggctatggaactcagtcaactccccagggatatggctcgactggcggctatggcagtagccagagctcccaatcgtcttacgggcagcagtcctcctatcctggctatggccagcagccagctcccagcagcacctcgggaagttacggtagcagttctcagagcagcagctatgggcagccccagagtgggagctacagccagcagcctagctatggtggacagcagcaaagctatggacagcagcaaagctataatccccctcagggctatggacagcagaaccagtacaacagcagcagtggtggtggaggtggaggtggaggtggaggtaactatggccaagatcaatcctccatgagtagtggtggtggcagtggtggcggttatggcaatcaagaccagagtggtggaggtggcagcggtggctatggacagcaggaccgtggaggccgcggcaggggtggcagtggtggcggcggcggcggcggcggtggtggttacaaccgcagcagtggtggctatgaacccagaggtcgtggaggtggccgtggaggcagaggtggcatgggcggaagtgaccgtggtggcttcaataaatttggtggccctcgggaccaaggatcacgtcatgactccgaacaggataattcagacaacaacaccatctttgtgcaaggcctgggtgagaatgttacaattgagtctgtggctgattacttcaagcagattggtattattaagacaaacaagaaaacgggacagcccatgattaatttgtacacagacagggaaactggcaagctgaagggagaggcaacggtctcttttgatgacccaccttcagctaaagcagctattgactggtttgatggtaaagaattctccggaaatcctatcaaggtctcatttgctactcgccgggcagactttaatcggggtggtggcaatggtcgtggaggccgagggcgaggaggacccatgggccgtggaggctatggaggtggtggcagtggtggtggtggccgaggaggatttcccagtggaggtggtggcggtggaggacagcagcgagctggtgactggaagtgtcctaatcccacctgtgagaatatgaacttctcttggaggaatgaatgcaaccagtgtaaggcccctaaaccagatggcccaggagggggaccaggtggctctcacatggggggtaactacggggatgatcgtcgtggtggcagaggaggctatgatcgaggcggctaccggggccgcggcggggaccgtggaggcttccgagggggccggggtggtggggacagaggtggctttggccctggcaagatggattccaggggtgagcacagacaggatcgcagggagaggccgtattaattagcctggctccccaggttctggaacagctttttgtcctgtacccagtgttaccctcgttattttgtaaccttccaattcctgatcacccaagggtttttttgtgtcggactatgtaattgtaactatacctctggttcccattaaaagtgaccattttagttaaaaaaaaaaaaaaaaaaaaaaaanaaaaaaaaaaaaaaaaaaaaaaaaaaagaaaaaaaagaaaaaaaaaaaaaaagggggaggggggaccaaaaaacccggggggggggaccagaaacccaaatacccctttctcgggggggggccccccccccccttggcccttaaaagagatttattgacccccctcatatgggggttttttaaaaattcagcggggtgaaaaaactttgattttccccaaatttttcctctttggacaaataccctttttttctttcgttgtaaaaaaaaa

SEQ ID NO: 62981 - DNA, 3478 bp, Homo sapiens
accgccggtaccggttcggaattcccgggcgtgctcagtcctccaggcgtcggtgctcagcggtgttggaacttcgttgcttgcttgcctgtgcgcgcgtgcgcggacatggcctcaaacgattatacccaacaagcaacccaaagctatggggcctaccccacccagcccgggcagggctattcccagcagagcagtcagccctacggacagcagagttacagtggttatagccagtccacggacacttcaggctatggccagagcagctattcttcttatggccagagccagaacacaggctatggaactcagtcaactccccagggatatggctcgactggcggctatggcagtagccagagctcccaatcgtcttacgggcagcagtcctcctatcctggctatggccagcagccagctcccagcagcacctcgggaagttacggtagcagttctcagagcagcagctatgggcagccccagagtgggagctacagccagcagcctagctatggtggacagcagcaaagctatggacagcagcaaagctataatccccctcagggctatggacagcagaaccagtacaacagcagcagtggtggtggaggtggaggtggaggtggaggtaactatggccaagatcaatcctccatgagtagtggtggtggcagtggtggcggttatggcaatcaagaccagagtggtggaggtggcagcggtggctatggacagcaggaccgtggaggccgcggcaggggtggcagtggtggcggcggcggcggcggcggtggtggttacaaccgcagcagtggtggctatgaacccagaggtcgtggaggtggccgtggaggcagaggtggcatggggtaggtgtctcatgagccagggagtatctttggtggggagtgtggaggattgcatgaatctccctgaagccagtccctagtgcatggtttagtattcttgttgtctagggatctgtgagggctttgatttgggggcagtgactttctttttacatccccattttatttttgtgagaacttgggagcctgaactcccatccataccactgaatagagattttgagtaatgatacttgtttccaaaaaaaaagaaaccatacatagatacgtatggattggagtcattaatatcctaggcaagaaacatggaagtgaagacttctttctctgcaagggaaaccgatgatcccactcctgggaaatagtagggaaacttggtatgtgtattcccatgtgtcctctagggagttggtaatggttaacctgacttcagcttccaggaattggctactcttcccgttttctatagtcatttgaatccacgagcttgatttgcactaatttgaccgacattgattttgtgtgtgacttggtttatggggccagctgactgaagtaagcagaccttttgggcaaaaatatgctttgacagtggtctcccacctatttgttccactgtctgccttcccctggttacttaaaattcatcagcttgtccaactggaccttctttccttcctgctgaagttgatttgaagtaaaaccttagatttgatgttaaaacagttgtcaaatctgttggtaaataagatttgaaggaccctactctgtctcccttgaaaaaggggaggaatgtcagtgttactgtttttggaaaaagtagatttttaaaccgagtttggaaatggtaagtatgcagaggtgggtgggggcaatctcaaaaacgtgcaaaaatgaggaaaacaaaaatgaggaaatgtgtgcgtgtgtttaatgcaaaactttaaaaagaaaaacaactgttatgtgactgttaacttgctctgcattttatgtgccacaggtatgaaaggtgacattgcaaaatactccgctcttctcgcagtgtagaaggggtgaccccgggggttgggggagatcaaaaacagctcagtagttaggacagagcttagctaagtttgtcttgctttaaggggaagttgcctttggttttgactttttatggaatggggttgggtctgcttgctgctttcaaagcaaaaaccacaaaaatgtgttcaaggctaccccagcctggtgtgaaatgtcttctgggtaaattggggtagggtttttaaaccaactacttggttgtcaaccacttgcgacaagaggaaaaaaaaacatctgctccatcggaagaacgaccaaggaaaatgggttattttttttccagaggaaatagataacgtaaccttttaaagcaaaatctttataaactgtgtctgagaaattgcacacgtgtgtgtgacatgctcaaaggtcagacaaggggtggtcaggaagggatgtattttagtagccacttgtatctttttccaaaaacacctacccatgtttggggaatgttaaacaaaatcaaaaaacaaccttttgtagccgttggaagcttcatgtcctttcttctaacttgtcttctccagcggaagtgaccgtggtggcttcaataaatttggtggccctcgggaccaaggatcacgtcatgactccgaacaggataattcagacaacaacaccatctttgtgcaaggcctgggtgagaatgttacaattgagtctgtggctgattacttcaagcagattggtattattaagacaaacaagaaaacgggacagcccatgattaatttgtacacagacagggaaactggcaagctgaagggagaggcaacggtctcttttgatgacccaccttcagctaaagcagctattgactggtttgatggtaaagaattctccggaaatcctatcaaggtctcatttgctactcgccgggcagactttaatcggggtggtggcaatggtcgtggaggccgagggcgaggaggacccatgggccgtggaggctatggaggtggtggcagtggtggtggtggccgaggaggatttcccagtggaggtggtggcggtggaggacagcagcgagctggtgactggaagtgtcctaatcccacctgtgagaatatgaacttctcttggaggaatgaatgcaaccagtgtaaggcccctaaaccagatggcccaggagggggaccaggtggctctcacatggggggtaactacggggatgatcgtcgtggtggcagaggaggctatgatcgaggcggctaccggggccgcggcggggaccgtggaggcttccgagggggccggggtggtggggacagaggtggctttggccctggcaagatggattccaggggtgagcacagacaggatcgcagggagaggccgtattaattagcctggctccccaggttctggaacagctttttgtcctgtacccagtgttaccctcgttattttgtaaccttccaattcctgatcacccaagggtttttttgtgtcggactatgtaattgtaactatacctctggttcccattaaaagtgaccattttagttaaa

SEQ ID NO: 62982 - DNA, 6168 bp, Homo sapiens
accgccggtaccggttcggaattcccgggcgtgctcagtcctccaggcgtcggtgctcagcggtgttggaacttcgttgcttgcttgcctgtgcgcgcgtgcgcggacatggcctcaaacgattatacccaacaagcaacccaaagctatggggcctaccccacccagcccgggcagggctattcccagcagagcagtcagccctacggacagcagagttacagtggttatagccagtccacggacacttcaggctatggccagagcagctattcttcttatggccagagccagaacacaggctatggaactcagtcaactccccagggatatggctcgactggcggctatggcagtagccagagctcccaatcgtcttacgggcagcagtcctcctatcctggctatggccagcagccagctcccagcagcacctcgggaagttacggtagcagttctcagagcagcagctatgggcagccccagagtgggagctacagccagcagcctagctatggtggacagcagcaaagctatggacagcagcaaagctataatccccctcagggctatggacagcagaaccagtacaacagcagcagtggtggtggaggtggaggtggaggtggaggtaactatggccaagatcaatcctccatgagtagtggtggtggcagtggtggcggttatggcaatcaagaccagagtggtggaggtggcagcggtggctatggacagcaggaccgtggaggccgcggcaggggtggcagtggtggcggcggcggcggcggcggtggtggttacaaccgcagcagtggtggctatgaacccagaggtcgtggaggtggccgtggaggcagaggtggcatggggtaggtgtctcatgagccagggagtatctttggtggggagtgtggaggattgcatgaatctccctgaagccagtccctagtgcatggtttagtattcttgttgtctagggatctgtgagggctttgatttgggggcagtgactttctttttacatccccattttatttttgtgagaacttgggagcctgaactcccatccataccactgaatagagattttgagtaatgatacttgtttccaaaaaaaaagaaaccatacatagatacgtatggattggagtcattaatatcctaggcaagaaacatggaagtgaagacttctttctctgcaagggaaaccgatgatcccactcctgggaaatagtagggaaacttggtatgtgtattcccatgtgtcctctagggagttggtaatggttaacctgacttcagcttccaggaattggctactcttcccgttttctatagtcatttgaatccacgagcttgatttgcactaatttgaccgacattgattttgtgtgtgacttggtttatggggccagctgactgaagtaagcagaccttttgggcaaaaatatgctttgacagtggtctcccacctatttgttccactgtctgccttcccctggttacttaaaattcatcagcttgtccaactggaccttctttccttcctgctgaagttgatttgaagtaaaaccttagatttgatgttaaaacagttgtcaaatctgttggtaaataagatttgaaggaccctactctgtctcccttgaaaaaggggaggaatgtcagtgttactgtttttggaaaaagtagatttttaaaccgagtttggaaatggtaagtatgcagaggtgggtgggggcaatctcaaaaacgtgcaaaaatgaggaaaacaaaaatgaggaaatgtgtgcgtgtgtttaatgcaaaactttaaaaagaaaaacaactgttatgtgactgttaacttgctctgcattttatgtgccacaggtatgaaaggtgacattgcaaaatactccgctcttctcgcagtgtagaaggggtgaccccgggggttgggggagatcaaaaacagctcagtagttaggacagagcttagctaagtttgtcttgctttaaggggaagttgcctttggttttgactttttatggaatggggttgggtctgcttgctgctttcaaagcaaaaaccacaaaaatgtgttcaaggctaccccagcctggtgtgaaatgtcttctgggtaaattggggtagggtttttaaaccaactacttggttgtcaaccacttgcgacaagaggaaaaaaaaacatctgctccatcggaagaacgaccaaggaaaatgggttattttttttccagaggaaatagataacgtaaccttttaaagcaaaatctttataaactgtgtctgagaaattgcacacgtgtgtgtgacatgctcaaaggtcagacaaggggtggtcaggaagggatgtattttagtagccacttgtatctttttccaaaaacacctacccatgtttggggaatgttaaacaaaatcaaaaaacaaccttttgtagccgttggaagcttcatgtcctttcttctaacttgtcttctccagcggaagtgaccgtggtggcttcaataaatttggtggtaagtgaacagagtttccaaaattcccaactcccagcaatgctttgtctgattgttcatttgcagatgtcttagcgtgttaatttaaatgtcaaaggttttgaggtgtccagaaccacctccagaaaggggtagggtagaatgccacctgttgcctggtgtgtgctaacctggagcaggtaggggtaagactcaatagtcatcttttaccaaatgggtttgccccaggttaataagaggggtctagtaggccttggactgggccgttgccacacctggcacttagtgaccatcatcatgagaaactggagagtgcgtgctggaacacgtggtgccatcttggctttaggatccttttgatcgttgtgtccaaggcttgtgtgtgtgtgagtgtgtgggagacaactccgaatgtttaattctggaagagggatgtaacattgccctgaggatggtgaagttggtatacatttataaagtacggaatggtgtcaatgaatgcaattctatgtatatggacttaactgagatgggcaaatagaaactagctctgggaaggaacatgtgcactacttcaagaaagattggaagcatgtgtggctcatgggaaataaccaggtcttaaacagcacaaactgaattcgtggaccaggaaggtcttaaacagcacaaactgaattcatggaaaaatgacaaatttgagaagtctcccagtaagctggaacttttctggtttggttaacaaaaggtttcttgatttgtttcaagatttaaagccaaaggtgtgggttcatgacttaggtgtcattgcgtgtgggtacaatatttatatatggcgaattcagataaacattggtcaaagatggtctctggaaaaacaaaatagaggctgcattacggaaataagatttctggtctgttccctgggacatgcttaaaaaatacaatagctattatgtatggtttttattttcatgtggtttcggggaaacaacacggttttaaggatggtttctaaagatgaaattaaaaattgttccacaagggttaagtgtctggtggtaaagttgggagaaactggatggatgcacatcgcatggctggtggcgagcccatctctcttctctcgggtgagagaaccgggccaagctgagttggtttgttcactttaatgggtctccgtttcccctgccacctgtgctgaggacatttcccagcctgagctgggggaggcagcattttctgaagtgtggagttgtctctgtggagactcaagttacagatcttaaggggcctgcctagaattttctcctctgggcaggcgacccaggaaagggtttggagtgaggctgtgagcacttacttgatattttacaagtttggatttggtgttaatttttttccttgtccgttttttcctgttgactaacggctcatcttttccttgtttttgttttttttttgttctttttttccatgtcactaaaggccctcgggaccaaggatcacgtcatgactccggtgagttcacacgtggtggcatgaaaagagtggctaaagtggtatcaagactgcctggatgttctttgaaactattataaaaaggaaactgaaaaaaatggggatagagaaggaagggagttaggtgtgtccttagttagcagtgagaagtatttgttacgaagtatttctcagaaatacctggcttgtgggttccacccccagtgatttaggtctgagaggaccctgaaaatctacctttctaacaagtccccagtgatgctgatgcgtctggaccacactcagatggtttacagcagtggttctttcaaaatgtggatcatgtccaagttggtgaacaaaactagtgaaagacctgaccacatgaagtaaagcattgaactcctgtttaggttgtattgatgtttgtgtactagatttgaatgtaaaatgggtttcttatttaattcggggaccttcaactgaaagttgataaatactgatggacttttctgtgtggtcttgttgggcatttcactcctgagccctggtttccatactgtatactgggtgttaacatgtttcaaaggataattgtcaaactgaatctgaaatttatcagcatggctggcatatagggactcaaaagggatgtggatttctttttagttgtcttccataaaccaaatgataccagttgcttgatggatactaggtgctttaggttttttcctgtgttttttattttaccttttcacatttgcattttctctgttcaacaagcagaacaggataattcagacaacaacaccatctttgtgcaaggcctgggtgagaatgttacaattgagtctgtggctgattacttcaagcagattggtattattaaggtacttgtggagaggagtgggagctttctgtcagtgttgtaggcttgtggatttcacacattagtaaaagcaagtctttaatggttgccagcagtaaaaacaagtcttagtggttgttgccagcttaatttgttgaggaaagagccttagttactgttttctaaaagagaagttctatcttaacacaaaaagtataacttatcagagtaccctaaactcttgagatttgtactctatagtaacttttagttttatctttcaatattggagtgagagacagttttctttaatggaggtttacatgtgaggtaggaagaagtaactgggaagaggggagctgaagtttgggaattataaacctcatgttctagaggaagaagatggaaagggagtactgtagcctttaaaattgatgtctaattttgctttcttcagacacaaacaagaaaacgggacagcccatgattaatttgtacacagacagggaaactggcaagctgaagggagaggcaacggtctcttttgatgacccaccttcagctaaagcagctattgactggtttgatggtaaagaattctccggaaatcctatcaaggtctcatttgctactcgccgggcagactttaatcggggtggtggcaatggtcgtggaggccgagggcgaggaggacccatgggccgtggaggctatggaggtggtggcagtggtggtggtggccgaggaggatttcccagtggaggtggtggcggtggaggacagcagcgagctggtgactggaagtgtcctaatcccacctgtgagaatatgaacttctcttggaggaatgaatgcaaccagtgtaaggcccctaaaccagatggcccaggagggggaccaggtggctctcacatggggggtaactacggggatgatcgtcgtggtggcagaggaggctatgatcgaggcggctaccggggccgcggcggggaccgtggaggcttccgagggggccggggtggtggggacagaggtggctttggccctggcaagatggattccaggggtgagcacagacaggatcgcagggagaggccgtattaattagcctggctccccaggttctggaacagctttttgtcctgtacccagtgttaccctcgttattttgtaaccttccaattcctgatcacccaagggtttttttgtgtcggactatgtaattgtaactatacctctggttcccattaaaagtgaccattttagttaaa

SEQ ID NO: 62983 - DNA, 1839 bp, Homo sapiens
accgccggtaccggttcggaattcccgggcgtgctcagtcctccaggcgtcggtgctcagcggtgttggaacttcgttgcttgcttgcctgtgcgcgcgtgcgcggacatggcctcaaacgattatacccaacaagcaacccaaagctatggggcctaccccacccagcccgggcagggctattcccagcagagcagtcagccctacggacagcagagttacagtggttatagccagtccacggacacttcaggctatggccagagcagctattcttcttatggccagagccagaacacaggctatggaactcagtcaactccccagggatatggctcgactggcggctatggcagtagccagagctcccaatcgtcttacgggcagcagtcctcctatcctggctatggccagcagccagctcccagcagcacctcgggaagttacggtagcagttctcagagcagcagctatgggcagccccagagtgggagctacagccagcagcctagctatggtggacagcagcaaagctatggacagcagcaaagctataatccccctcagggctatggacagcagaaccagtacaacagcagcagtggtggtggaggtggaggtggaggtggaggtaactatggccaagatcaatcctccatgagtagtggtggtggcagtggtggcggttatggcaatcaagaccagagtggtggaggtggcagcggtggctatggacagcaggaccgtggaggccgcggcaggggtggcagtggtggcggcggcggcggcggcggtggtggttacaaccgcagcagtggtggctatgaacccagaggtcgtggaggtggccgtggaggcagaggtggcatgggcggaagtgaccgtggtggcttcaataaatttggtggccctcgggaccaaggatcacgtcatgactccgaacaggataattcagacaacaacaccatctttgtgcaaggcctgggtgagaatgttacaattgagtctgtggctgattacttcaagcagattggtattattaagacaaacaagaaaacgggacagcccatgattaatttgtacacagacagggaaactggcaagctgaagggagaggcaacggtctcttttgatgacccaccttcagctaaagcagctattgactggtttgatggtaaagaattctccggaaatcctatcaaggtctcatttgctactcgccgggcagactttaatcggggtggtggcaatggtcgtggaggccgagggcgaggaggacccatgggccgtggaggctatggaggtggtggcagtggtggtggtggccgaggaggatttcccagtggaggtggtggcggtggaggacagcagcgagctggtgactggaagtgtcctaatcccacctgtgagaatatgaacttctcttggaggaatgaatgcaaccacagatggcccaggagggggaccaggtggctctcacatggggggtaactacggggatgatcgtcgtggtggcagaggaggctatgatcgaggcggctaccggggccgcggcggggaccgtggaggcttccgagggggccggggtggtggggacagaggtggctttggccctggcaagatggattccaggggtgagcacagacaggatcgcagggagaggccgtattaattagcctggctccccaggttctggaacagctttttgtcctgtacccagtgttaccctcgttattttgtaaccttccaattcctgatcacccaagggtttttttgtgtcggactatgtaattgtaactatacctctggttcccattaaaagtgaccattttagttaaa

SEQ ID NO: 62984 - DNA, 1552 bp, Homo sapiens
accgccggtaccggttcggaattcccgggcgtgctcagtcctccaggcgtcggtgctcagcggtgttggaacttcgttgcttgcttgcctgtgcgcgcgtgcgcggacatggcctcaaacgattatacccaacaagcaacccaaagctatggggcctaccccacccagcccgggcagggctattcccagcagagcagtcagccctacggacagcagagttacagtggttatagccagtccacggacacttcaggctatggccagagcagctattcttcttatggccagagccagaacacaggctatggaactcagtcaactccccagggatatggctcgactggcggctatggcagtagccagagctcccaatcgtcttacgggcagcagtcctcctatcctggctatggccagcagccagctcccagcagcacctcgggaagttacggtagcagttctcagagcagcagctatgggcagccccagagtgggagctacagccagcagcctagctatggtggacagcagcaaagctatggacagcagcaaagctataatccccctcagggctatggacagcagaaccagtacaacagcagcagtggtggtggaggtggaggtggaggtggaggtaactatggccaagatcaatcctccatgagtagtggtggtggcagtggtggcggttatggcaatcaagaccagagtggtggaggtggcagcggtggctatggacagcaggaccgtggaggccgcggcaggggtggcagtggtggcggcggcggcggcggcggtggtggttacaaccgcagcagtggtggctatgaacccagaggtcgtggaggtggccgtggaggcagaggtggcatgggcggaagtgaccgtggtggcttcaataaatttggtggccctcgggaccaaggatcacgtcatgactccgaacaggataattcagacaacaacaccatctttgtgcaaggcctgggtgagaatgttacaattgagtctgtggctgattacttcaagcagattggtattattaagacaaacaagaaaacgggacagcccatgattaatttgtacacagacagggaaactggcaagctgaagggagaggcaacggtctcttttgatgacccaccttcagctaaagcagctattgactggtttgatggtaaagaattctccggaaatcctatcaaggtctcatttgctactcgccgggcagactttaatcggggtggtggcaatggtcgtggaggccgagggcgaggaggacccatgggccgtggaggctatggaggtggtggcagtggtggtggtggccgaggaggatttcccagtggaggtggtggcggtggaggacagcagcgagctggtgactggaagtgtcctaatcccacctgtgagaatatgaacttctcttggaggaatgaatgcaaccagtgtaaggcccctaaaccagatggcccaggagggggaccaggtggctctcacatggggggtaactacggggatgatcgtcctgttgctgtgtggagggtcccaggtt

SEQ ID NO: 62985 - DNA, 1584 bp, Homo sapiens
accgccggtaccggttcggaattcccgggcgtgctcagtcctccaggcgtcggtgctcagcggtgttggaacttcgttgcttgcttgcctgtgcgcgcgtgcgcggacatggcctcaaacgattatacccaacaagcaacccaaagctatggggcctaccccacccagcccgggcagggctattcccagcagagcagtcagccctacggacagcagagttacagtggttatagccagtccacggacacttcaggctatggccagagcagctattcttcttatggccagagccagaacacaggctatggaactcagtcaactccccagggatatggctcgactggcggctatggcagtagccagagctcccaatcgtcttacgggcagcagtcctcctatcctggctatggccagcagccagctcccagcagcacctcgggaagttacggtagcagttctcagagcagcagctatgggcagccccagagtgggagctacagccagcagcctagctatggtggacagcagcaaagctatggacagcagcaaagctataatccccctcagggctatggacagcagaaccagtacaacagcagcagtggtggtggaggtggaggtggaggtggaggtaactatggccaagatcaatcctccatgagtagtggtggtggcagtggtggcggttatggcaatcaagaccagagtggtggaggtggcagcggtggctatggacagcaggaccgtggaggccgcggcaggggtggcagtggtggcggcggcggcggcggcggtggtggttacaaccgcagcagtggtggctatgaacccagaggtcgtggaggtggccgtggaggcagaggtggcatgggcggaagtgaccgtggtggcttcaataaatttggtggccctcgggaccaaggatcacgtcatgactccgaacaggataattcagacaacaacaccatctttgtgcaaggcctgggtgagaatgttacaattgagtctgtggctgattacttcaagcagattggtattattaagacaaacaagaaaacgggacagcccatgattaatttgtacacagacagggaaactggcaagctgaagggagaggcaacggtctcttttgatgacccaccttcagctaaagcagctattgactggtttgatggtaaagaattctccggaaatcctatcaaggtctcatttgctactcgccgggcagactttaatcggggtggtggcaatggtcgtggaggccgagggcgaggaggacccatgggccgtggaggctatggaggtggtggcagtggtggtggtggccgaggaggatttcccagtggaggtggtggcggtggaggacagcagcgagctggtgactggaagtgtcctaatcccacctgtgagaatatgaacttctcttggaggaatgaatgcaaccagtgtaaggcccctaaaccagatggcccaggagggggaccaggtggctctcacatggggggtaactacggggatgatcgtcgtggtgggtcagaacataaggtgggtgagaacataagggtgggtcagacataatgagga

SEQ ID NO: 62986 - DNA, 5912 bp, Homo sapiens
accgccggtaccggttcggaattcccgggcgtgctcagtcctccaggcgtcggtgctcagcggtgttggaacttcgttgcttgcttgcctgtgcgcgcgtgcgcggacatggcctcaaacgattatacccaacaagcaacccaaagctatggggcctaccccacccagcccgggcagggctattcccagcagagcagtcagccctacggacagcagagttacagtggttatagccagtccacggacacttcaggctatggccagagcagctattcttcttatggccagagccagaacacaggctatggaactcagtcaactccccagggatatggctcgactggcggctatggcagtagccagagctcccaatcgtcttacgggcagcagtcctcctatcctggctatggccagcagccagctcccagcagcacctcgggaagttacggtagcagttctcagagcagcagctatgggcagccccagagtgggagctacagccagcagcctagctatggtggacagcagcaaagctatggacagcagcaaagctataatccccctcagggctatggacagcagaaccagtacaacagcagcagtggtggtggaggtggaggtggaggtggaggtaactatggccaagatcaatcctccatgagtagtggtggtggcagtggtggcggttatggcaatcaagaccagagtggtggaggtggcagcggtggctatggacagcaggaccgtggaggccgcggcaggggtggcagtggtggcggcggcggcggcggcggtggtggttacaaccgcagcagtggtggctatgaacccagaggtcgtggaggtggccgtggaggcagaggtggcatggggtaggtgtctcatgagccagggagtatctttggtggggagtgtggaggattgcatgaatctccctgaagccagtccctagtgcatggtttagtattcttgttgtctagggatctgtgagggctttgatttgggggcagtgactttctttttacatccccattttatttttgtgagaacttgggagcctgaactcccatccataccactgaatagagattttgagtaatgatacttgtttccaaaaaaaaagaaaccatacatagatacgtatggattggagtcattaatatcctaggcaagaaacatggaagtgaagacttctttctctgcaagggaaaccgatgatcccactcctgggaaatagtagggaaacttggtatgtgtattcccatgtgtcctctagggagttggtaatggttaacctgacttcagcttccaggaattggctactcttcccgttttctatagtcatttgaatccacgagcttgatttgcactaatttgaccgacattgattttgtgtgtgacttggtttatggggccagctgactgaagtaagcagaccttttgggcaaaaatatgctttgacagtggtctcccacctatttgttccactgtctgccttcccctggttacttaaaattcatcagcttgtccaactggaccttctttccttcctgctgaagttgatttgaagtaaaaccttagatttgatgttaaaacagttgtcaaatctgttggtaaataagatttgaaggaccctactctgtctcccttgaaaaaggggaggaatgtcagtgttactgtttttggaaaaagtagatttttaaaccgagtttggaaatggtaagtatgcagaggtgggtgggggcaatctcaaaaacgtgcaaaaatgaggaaaacaaaaatgaggaaatgtgtgcgtgtgtttaatgcaaaactttaaaaagaaaaacaactgttatgtgactgttaacttgctctgcattttatgtgccacaggtatgaaaggtgacattgcaaaatactccgctcttctcgcagtgtagaaggggtgaccccgggggttgggggagatcaaaaacagctcagtagttaggacagagcttagctaagtttgtcttgctttaaggggaagttgcctttggttttgactttttatggaatggggttgggtctgcttgctgctttcaaagcaaaaaccacaaaaatgtgttcaaggctaccccagcctggtgtgaaatgtcttctgggtaaattggggtagggtttttaaaccaactacttggttgtcaaccacttgcgacaagaggaaaaaaaaacatctgctccatcggaagaacgaccaaggaaaatgggttattttttttccagaggaaatagataacgtaaccttttaaagcaaaatctttataaactgtgtctgagaaattgcacacgtgtgtgtgacatgctcaaaggtcagacaaggggtggtcaggaagggatgtattttagtagccacttgtatctttttccaaaaacacctacccatgtttggggaatgttaaacaaaatcaaaaaacaaccttttgtagccgttggaagcttcatgtcctttcttctaacttgtcttctccagcggaagtgaccgtggtggcttcaataaatttggtggtaagtgaacagagtttccaaaattcccaactcccagcaatgctttgtctgattgttcatttgcagatgtcttagcgtgttaatttaaatgtcaaaggttttgaggtgtccagaaccacctccagaaaggggtagggtagaatgccacctgttgcctggtgtgtgctaacctggagcaggtaggggtaagactcaatagtcatcttttaccaaatgggtttgccccaggttaataagaggggtctagtaggccttggactgggccgttgccacacctggcacttagtgaccatcatcatgagaaactggagagtgcgtgctggaacacgtggtgccatcttggctttaggatccttttgatcgttgtgtccaaggcttgtgtgtgtgtgagtgtgtgggagacaactccgaatgtttaattctggaagagggatgtaacattgccctgaggatggtgaagttggtatacatttataaagtacggaatggtgtcaatgaatgcaattctatgtatatggacttaactgagatgggcaaatagaaactagctctgggaaggaacatgtgcactacttcaagaaagattggaagcatgtgtggctcatgggaaataaccaggtcttaaacagcacaaactgaattcgtggaccaggaaggtcttaaacagcacaaactgaattcatggaaaaatgacaaatttgagaagtctcccagtaagctggaacttttctggtttggttaacaaaaggtttcttgatttgtttcaagatttaaagccaaaggtgtgggttcatgacttaggtgtcattgcgtgtgggtacaatatttatatatggcgaattcagataaacattggtcaaagatggtctctggaaaaacaaaatagaggctgcattacggaaataagatttctggtctgttccctgggacatgcttaaaaaatacaatagctattatgtatggtttttattttcatgtggtttcggggaaacaacacggttttaaggatggtttctaaagatgaaattaaaaattgttccacaagggttaagtgtctggtggtaaagttgggagaaactggatggatgcacatcgcatggctggtggcgagcccatctctcttctctcgggtgagagaaccgggccaagctgagttggtttgttcactttaatgggtctccgtttcccctgccacctgtgctgaggacatttcccagcctgagctgggggaggcagcattttctgaagtgtggagttgtctctgtggagactcaagttacagatcttaaggggcctgcctagaattttctcctctgggcaggcgacccaggaaagggtttggagtgaggctgtgagcacttacttgatattttacaagtttggatttggtgttaatttttttccttgtccgttttttcctgttgactaacggctcatcttttccttgtttttgttttttttttgttctttttttccatgtcactaaaggccctcgggaccaaggatcacgtcatgactccggtgagttcacacgtggtggcatgaaaagagtggctaaagtggtatcaagactgcctggatgttctttgaaactattataaaaaggaaactgaaaaaaatggggatagagaaggaagggagttaggtgtgtccttagttagcagtgagaagtatttgttacgaagtatttctcagaaatacctggcttgtgggttccacccccagtgatttaggtctgagaggaccctgaaaatctacctttctaacaagtccccagtgatgctgatgcgtctggaccacactcagatggtttacagcagtggttctttcaaaatgtggatcatgtccaagttggtgaacaaaactagtgaaagacctgaccacatgaagtaaagcattgaactcctgtttaggttgtattgatgtttgtgtactagatttgaatgtaaaatgggtttcttatttaattcggggaccttcaactgaaagttgataaatactgatggacttttctgtgtggtcttgttgggcatttcactcctgagccctggtttccatactgtatactgggtgttaacatgtttcaaaggataattgtcaaactgaatctgaaatttatcagcatggctggcatatagggactcaaaagggatgtggatttctttttagttgtcttccataaaccaaatgataccagttgcttgatggatactaggtgctttaggttttttcctgtgttttttattttaccttttcacatttgcattttctctgttcaacaagcagaacaggataattcagacaacaacaccatctttgtgcaaggcctgggtgagaatgttacaattgagtctgtggctgattacttcaagcagattggtattattaaggtacttgtggagaggagtgggagctttctgtcagtgttgtaggcttgtggatttcacacattagtaaaagcaagtctttaatggttgccagcagtaaaaacaagtcttagtggttgttgccagcttaatttgttgaggaaagagccttagttactgttttctaaaagagaagttctatcttaacacaaaaagtataacttatcagagtaccctaaactcttgagatttgtactctatagtaacttttagttttatctttcaatattggagtgagagacagttttctttaatggaggtttacatgtgaggtaggaagaagtaactgggaagaggggagctgaagtttgggaattataaacctcatgttctagaggaagaagatggaaagggagtactgtagcctttaaaattgatgtctaattttgctttcttcagacacaaacaagaaaacgggacagcccatgattaatttgtacacagacagggaaactggcaagctgaagggagaggcaacggtctcttttgatgacccaccttcagctaaagcagctattgactggtttgatggtaaagaattctccggaaatcctatcaaggtctcatttgctactcgccgggcagactttaatcggggtggtggcaatggtcgtggaggccgagggcgaggagcagaggaggctatgatcgaggcggctaccggggccgcggcggggaccgtggaggcttccgagggggccggggtggtggggacagaggtggctttggccctggcaagatggattccaggggtgagcacagacaggatcgcagggagaggccgtattaattagcctggctccccaggttctggaacagctttttgtcctgtacccagtgttaccctcgttattttgtaaccttccaattcctgatcacccaagggtttttttgtgtcggactatgtaattgtaactatacctctggttcccattaaaagtgaccattttagttaaa

SEQ ID NO: 62987 - DNA, 4362 bp, Homo sapiens
accgccggtaccggttcggaattcccgggcgtgctcagtcctccaggcgtcggtgctcagcggtgttggaacttcgttgcttgcttgcctgtgcgcgcgtgcgcggacatggcctcaaacgattatacccaacaagcaacccaaagctatggggcctaccccacccagcccgggcagggctattcccagcagagcagtcagccctacggacagcagagttacagtggttatagccagtccacggacacttcaggctatggccagagcagctattcttcttatggccagagccagaacacaggctatggaactcagtcaactccccagggatatggctcgactggcggctatggcagtagccagagctcccaatcgtcttacgggcagcagtcctcctatcctggctatggccagcagccagctcccagcagcacctcgggaagttacggtagcagttctcagagcagcagctatgggcagccccagagtgggagctacagccagcagcctagctatggtggacagcagcaaagctatggacagcagcaaagctataatccccctcagggctatggacagcagaaccagtacaacagcagcagtggtggtggaggtggaggtggaggtggaggtaactatggccaagatcaatcctccatgagtagtggtggtggcagtggtggcggttatggcaatcaagaccagagtggtggaggtggcagcggtggctatggacagcaggaccgtggaggccgcggcaggggtggcagtggtggcggcggcggcggcggcggtggtggttacaaccgcagcagtggtggctatgaacccagaggtcgtggaggtggccgtggaggcagaggtggcatggggtaggtgtctcatgagccagggagtatctttggtggggagtgtggaggattgcatgaatctccctgaagccagtccctagtgcatggtttagtattcttgttgtctagggatctgtgagggctttgatttgggggcagtgactttctttttacatccccattttatttttgtgagaacttgggagcctgaactcccatccataccactgaatagagattttgagtaatgatacttgtttccaaaaaaaaagaaaccatacatagatacgtatggattggagtcattaatatcctaggcaagaaacatggaagtgaagacttctttctctgcaagggaaaccgatgatcccactcctgggaaatagtagggaaacttggtatgtgtattcccatgtgtcctctagggagttggtaatggttaacctgacttcagcttccaggaattggctactcttcccgttttctatagtcatttgaatccacgagcttgatttgcactaatttgaccgacattgattttgtgtgtgacttggtttatggggccagctgactgaagtaagcagaccttttgggcaaaaatatgctttgacagtggtctcccacctatttgttccactgtctgccttcccctggttacttaaaattcatcagcttgtccaactggaccttctttccttcctgctgaagttgatttgaagtaaaaccttagatttgatgttaaaacagttgtcaaatctgttggtaaataagatttgaaggaccctactctgtctcccttgaaaaaggggaggaatgtcagtgttactgtttttggaaaaagtagatttttaaaccgagtttggaaatggtaagtatgcagaggtgggtgggggcaatctcaaaaacgtgcaaaaatgaggaaaacaaaaatgaggaaatgtgtgcgtgtgtttaatgcaaaactttaaaaagaaaaacaactgttatgtgactgttaacttgctctgcattttatgtgccacaggtatgaaaggtgacattgcaaaatactccgctcttctcgcagtgtagaaggggtgaccccgggggttgggggagatcaaaaacagctcagtagttaggacagagcttagctaagtttgtcttgctttaaggggaagttgcctttggttttgactttttatggaatggggttgggtctgcttgctgctttcaaagcaaaaaccacaaaaatgtgttcaaggctaccccagcctggtgtgaaatgtcttctgggtaaattggggtagggtttttaaaccaactacttggttgtcaaccacttgcgacaagaggaaaaaaaaacatctgctccatcggaagaacgaccaaggaaaatgggttattttttttccagaggaaatagataacgtaaccttttaaagcaaaatctttataaactgtgtctgagaaattgcacacgtgtgtgtgacatgctcaaaggtcagacaaggggtggtcaggaagggatgtattttagtagccacttgtatctttttccaaaaacacctacccatgtttggggaatgttaaacaaaatcaaaaaacaaccttttgtagccgttggaagcttcatgtcctttcttctaacttgtcttctccagcggaagtgaccgtggtggcttcaataaatttggtggtaagtgaacagagtttccaaaattcccaactcccagcaatgctttgtctgattgttcatttgcagatgtcttagcgtgttaatttaaatgtcaaaggttttgaggtgtccagaaccacctccagaaaggggtagggtagaatgccacctgttgcctggtgtgtgctaacctggagcaggtaggggtaagactcaatagtcatcttttaccaaatgggtttgccccaggttaataagaggggtctagtaggccttggactgggccgttgccacacctggcacttagtgaccatcatcatgagaaactggagagtgcgtgctggaacacgtggtgccatcttggctttaggatccttttgatcgttgtgtccaaggcttgtgtgtgtgtgagtgtgtgggagacaactccgaatgtttaattctggaagagggatgtaacattgccctgaggatggtgaagttggtatacatttataaagtacggaatggtgtcaatgaatgcaattctatgtatatggacttaactgagatgggcaaatagaaactagctctgggaaggaacatgtgcactacttcaagaaagattggaagcatgtgtggctcatgggaaataaccaggtcttaaacagcacaaactgaattcgtggaccaggaaggtcttaaacagcacaaactgaattcatggaaaaatgacaaatttgagaagtctcccagtaagctggaacttttctggtttggttaacaaaaggtttcttgatttgtttcaagatttaaagccaaaggtgtgggttcatgacttaggtgtcattgcgtgtgggtacaatatttatatatggcgaattcagataaacattggtcaaagatggtctctggaaaaacaaaatagaggctgcattacggaaataagatttctggtctgttccctgggacatgcttaaaaaatacaatagctattatgtatggtttttattttcatgtggtttcggggaaacaacacggttttaaggatggtttctaaagatgaaattaaaaattgttccacaagggttaagtgtctggtggtaaagttgggagaaactggatggatgcacatcgcatggctggtggcgagcccatctctcttctctcgggtgagagaaccgggccaagctgagttggtttgttcactttaatgggtctccgtttcccctgccacctgtgctgaggacatttcccagcctgagctgggggaggcagcattttctgaagtgtggagttgtctctgtggagactcaagttacagatcttaaggggcctgcctagaattttctcctctgggcaggcgacccaggaaagggtttggagtgaggctgtgagcacttacttgatattttacaagtttggatttggtgttaatttttttccttgtccgttttttcctgttgactaacggctcatcttttccttgtttttgttttttttttgttctttttttccatgtcactaaaggccctcgggaccaaggatcacgtcatgactccgaacaggataattcagacaacaacaccatctttgtgcaaggcctgggtgagaatgttacaattgagtctgtggctgattacttcaagcagattggtattattaagacaaacaagaaaacgggacagcccatgattaatttgtacacagacagggaaactggcaagctgaagggagaggcaacggtctcttttgatgacccaccttcagctaaagcagctattgactggtttgatgcgtaaagaattctccgcgaaagtcactatcaagacgcaggtgcaggtgtccgagccgaccgaatcctcgggacagcag

SEQ ID NO: 62988 - DNA, 1961 bp, Homo sapiens
accgccggtaccggttcggaattcccgggcgtgctcagtcctccaggcgtcggtgctcagcggtgttggaacttcgttgcttgcttgcctgtgcgcgcgtgcgcggacatggcctcaaacgattatacccaacaagcaacccaaagctatggggcctaccccacccagcccgggcagggctattcccagcagagcagtcagccctacggacagcagagttacagtggttatagccagtccacggacacttcaggctatggccagagcagctattcttcttatggccagagccagaacacaggctatggaactcagtcaactccccagggatatggctcgactggcggctatggcagtagccagagctcccaatcgtcttacgggcagcagtcctcctatcctggctatggccagcagccagctcccagcagcacctcgggaagttacggtagcagttctcagagcagcagctatgggcagccccagagtgggagctacagccagcagcctagctatggtggacagcagcaaagctatggacagcagcaaagctataatccccctcagggctatggacagcagaaccagtacaacagcagcagtggtggtggaggtggaggtggaggtggaggtaactatggccaagatcaatcctccatgagtagtggtggtggcagtggtggcggttatggcaatcaagaccagagtggtggaggtggcagcggtggctatggacagcaggaccgtggaggccgcggcaggggtggcagtggtggcggcggcggcggcggcggtggtggttacaaccgcagcagtggtggctatgaacccagaggtcgtggaggtggccgtggaggcagaggtggcatggggtaggtgtctcatgagccagggagtatctttggtggggagtgtggaggattgcatgaatctccctgaagccagtccctagtgcatggtttagtattcttgttgtctagggatctgtgagggctttgatttgggggcagtgactttctttttacatccccattttatttttgtgagaacttgggagcctgaactcccatccataccactgaatagagattttgagtaatgatacttgtttccaaaaaaaaagaaaccatacatagatacgtatggattggagtcattaatatcctaggcaagaaacatggaagtgaagacttctttctctgcaagggaaaccgatgatcccactcctgggaaatagtagggaaacttgcggaagtgaccgtggtggcttcaataaatttggtggccctcgggaccaaggatcacgtcatgactccgaacaggataattcagacaacaacaccatctttgtgcaaggcctgggtgagaatgttacaattgagtctgtggctgattacttcaagcagattggtattattaagacaaacaagaaaacgggacagcccatgattaatttgtacacagacagggaaactggcaagctgaagggagaggcaacggtctcttttgatgacccaccttcagctaaagcagctattgactggtttgatggtaaagaattctccggaaatcctatcaaggtctcatttgctactcgccgggcagactttaatcggggtggtggcaatggtcgtggaggccgagggcgaggaggacccatgggccgtggaggctatggaggtggtggcagtggtggtggtggccgaggaggatttcccagtggaggtggtggcggtggaggacagcagcgagctggtgactggaagtgtcctaatcccacctgtgagaatatgaacttctcttggaggaatgaatgcaaccagtgtaaggcccctaaaccagatggcccaggagggggaccaggtggctctcacatggggggtaactacggggatgatcgtcgtggtgggtcagaacataaggtgggtgagaacataagggtgggtcagacataatgagga

SEQ ID NO: 62989 - DNA, 1711 bp, Homo sapiens
accgccggtaccggttcggaattcccgggcgtgctcagtcctccaggcgtcggtgctcagcggtgttggaacttcgttgcttgcttgcctgtgcgcgcgtgcgcggacatggcctcaaacgattatacccaacaagcaacccaaagctatggggcctaccccacccagcccgggcagggctattcccagcagagcagtcagccctacggacagcagagttacagtggttatagccagtccacggacacttcaggctatggccagagcagctattcttcttatggccagagccagaacacaggctatggaactcagtcaactccccagggatatggctcgactggcggctatggcagtagccagagctcccaatcgtcttacgggcagcagtcctcctatcctggctatggccagcagccagctcccagcagcacctcgggaagttacggtagcagttctcagagcagcagctatgggcagccccagagtgggagctacagccagcagcctagctatggtggacagcagcaaagctatggacagcagcaaagctataatccccctcagggctatggacagcagaaccagtacaacagcagcagtggtggtggaggtggaggtggaggtggaggtaactatggccaagatcaatcctccatgagtagtggtggtggcagtggtggcggttatggcaatcaagaccagagtggtggaggtggcagcggtggctatggacagcaggaccgtggaggccgcggcaggggtggcagtggtggcggcggcggcggcggcggtggtggttacaaccgcagcagtggtggctatgaacccagaggtcgtggaggtggccgtggaggcagaggtggcatggggtaggtgtctcatgagccagggagtatctttggtggggagtgtggaggattgcatgaatctccctgaagccagtccctagtgcatggtttagtattcttgttgtctagggatctgtgagggctttgatttgggggcagtgactttctttttacatccccattttatttttgtgagaacttgggagcctgaactcccatccataccactgaatagagattttgagtaatgatacttgtttccaaaaaaaaagaaaccatacatagatacgtatggattggagtcattaatatcctaggcaagaaacatggaagtgaagacttctttctctgcaagggaaaccgatgatcccactcctgggaaatagtagggaaacttggtatgtgtattcccatgtgtcctctagggagttggtaatggttaacctgacttcagcttccaggaattggctactcttcccgttttctatagtcatttgaatccacgagcttgatttgcactaatttgaccgacattgattttgtgtgtgacttggtttatggggccagctgactgaagtaagcagaccttttgggcaaaaatatgctttgacagtggtctcccacctatttgttccactgtctgccttcccctggttacttaaaattcatcagcttgtccaactggaccttctttccttcctgctgaagttgatttgaagtaaaaccttagatttgatgttaaaacagttgtcaaatctgttggtaaataagatttgaaggaccctactctgtctcccttgaaaaaggggaggaatgtcagtgttactgtgtcaataaactgatttaaagttgaaaaaaaa

SEQ ID NO: 62990 - DNA, 1261 bp, Homo sapiens
  misc_feature (908)..(908): n is a, c, g, or t
accgccggtaccggttcggaattcccgggcgtgctcagtcctccaggcgtcggtgctcagcggtgttggaacttcgttgcttgcttgcctgtgcgcgcgtgcgcggacatggcctcaaacgattatacccaacaagcaacccaaagctatggggcctaccccacccagcccgggcagggctattcccagcagagcagtcagccctacggacagcagagttacagtggttatagccagtccacggacacttcaggctatggccagagcagctattcttcttatggccagagccagaacacaggctatggaactcagtcaactccccagggatatggctcgactggcggctatggcagtagccagagctcccaatcgtcttacgggcagcagtcctcctatcctggctatggccagcagccagctcccagcagcacctcgggaagttacggtagcagttctcagagcagcagctatgggcagccccagagtgggagctacagccagcagcctagctatggtggacagcagcaaagctatggacagcagcaaagctataatccccctcagggctatggacagcagaaccagtacaacagcagcagtggtggtggaggtggaggtggaggtggaggtaactatggccaagatcaatcctccatgagtagtggtggtggcagtggtggcggttatggcaatcaagaccagagtggtggaggtggcagcggtggctatggacagcaggaccgtggaggccgcggcaggggtggcagtggtggcggcggcggcggcggcggtggtggttacaaccgcagcagtggtggctatgaacccagaggtcgtggaggtggccgtggaggcagaggtggcatgggcggaagtgaccgtggtggcttcaataaatttggtgncccgcagaccccaccgacacctacggccacaagcggtaccgcacaaaagggcaggagggccactcgccacatcaaggccccacaaagctcagcctgccacagtggagcacgaggtggtgcgggacctgccgccaagccagcaggagagggctacgcggtgccagtgatccagcggcacgagcacagcacagcagagcaacaccaacaacaacacagcaacacttccacacgtcctagcgccactgccaagcacacctcgatcccaagcacagacatggaccgcgacatcaagggacagggagcagagcagctgccggctgtgtgcccatggggaggccagcccaaacccccaa

SEQ ID NO: 62991 - DNA, 1441 bp, Homo sapiens
  misc_feature (668)..(668): n is a, c, g, or t
accgccggtaccggttcggaattcccgggcgtgctcagtcctccaggcgtcggtgctcagcggtgttggaacttcgttgcttgcttgcctgtgcgcgcgtgcgcggacatggcctcaaacgattatacccaacaagcaacccaaagctatggggcctaccccacccagcccgggcagggctattcccagcagagcagtcagccctacggacagcagagttacagtggttatagccagtccacggacacttcaggctatggccagagcagctattcttcttatggccagagccagaacacaggctatggaactcagtcaactccccagggatatggctcgactggcggctatggcagtagccagagctcccaatcgtcttacgggcagcagtcctcctatcctggctatggccagcagccagctcccagcagcacctcgggaagttacggtagcagttctcagagcagcagctatgggcagccccagagtgggagctacagccagcagcctagctatggtggacagcagcaaagctatggacagcagcaaagctataatccccctcagggctatggacagcagaaccagtacaacagcagcagtggtggtggaggtggaggtggaggtggagtgttcaagaaggaagtgtatcttcatacatcaccacncctgaaagcagatgtgcttttccagactgatccaactgcagagatggcagctgagtcattgcctttctccttcgggacactgtccagctgggagctggaagcctggtatgaggacctgcaagaggtcctgtcttcagatgaaaatgggggtacctatgtttcacctcctggaaatgaagaggaagaatcaaaaatcttcaccactcttgaccctgcttctctggcttggctgactgaggaggagccagaaccagcagaggtcacaagcacctcccagagccctcactctccagattccagtcagagctccctggctcaggaggaagaggaggaagaccaagggagaaccaggaaacggaaacagagtggtcattccccagcccgggctggaaagcagcgcatgaaggagaaagaacaggagaatgaaaggaaagtggcacagctagctgaagagaatgaacggctcaagcaggaaatcgagcgcctgaccagggaagtagaggcgactcgccgagctctgattgaccgaatggtgaatctgcaccaagcatgaacaattgggagcatcagtcccccacttgggccacactacccacctttcccagaagtggctactgactaccctctcactagtgccaatgatgtgaccctcaatcccacatacgcagggggaaggcttggagtagacaaaaggaaaggtctcagcttgtatatagagattgtacatttatttattactgtccctatctattaaagtgactttctatgaaaaa

SEQ ID NO: 62992 - DNA, 735 bp, Homo sapiens
accgccggtaccggttcggaattcccgggcgtgctcagtcctccaggcgtcggtgctcagcggtgttggaacttcgttgcttgcttgcctgtgcgcgcgtgcgcggacatggcctcaaacgattatacccaacaagcaacccaaagctatggggcctaccccacccagcccgggcagggctattcccagcagagcagtcagccctacggacagcagagttacagtggttatagccagtccacggacacttcaggctatggccagagcagctattcttcttatggccagagccagaacacaggctatggaactcagtcaactccccagggatatggctcgactggcggctatggcagtagccagagctcccaatcgtcttacgggcagcagtcctcctatcctggctatggccagcagccagctcccagcagcacctcgggaagttacggtagcagttctcagagcagcagctatgggcagccccagagtgggagctacagccagcagcctagctatggtggacagcagcaaagctatggacagcagcaaagctataatccccctcagggctatggacagcagaaccagtacaacagcagcagtggtggtggaggtggaggtggaggtggaggtaactatggccaagatcaatcctccacaccaggccctctctccagttttatcccctgcctaatgctgcgagaagcacagaataaactttttgtcactctcaaa

SEQ ID NO: 62993 - DNA, 765 bp, Homo sapiens
accgccggtaccggttcggaattcccgggcgtgctcagtcctccaggcgtcggtgctcagcggtgttggaacttcgttgcttgcttgcctgtgcgcgcgtgcgcggacatggcctcaaacgattatacccaacaagcaacccaaagctatggggcctaccccacccagcccgggcagggctattcccagcagagcagtcagccctacggacagcagagttacagtggttatagccagtccacggacacttcaggctatggccagagcagctattcttcttatggccagagccagaacagtgagtctttctcagcgggtcacctcttcctactctttctgaatattgcttttctttttcttgttttttggagacggagtctggtcctgttgcccaggctggagtgcagtggtgctgtctcagctcactgcaacatcagcctaccgggttcaaacgattctcctgcctcagctactgaggaggctgaggcgggaggatcccttgaattcaggagtttggggctgcagtgagctatgatggtgcctgtgaacagccactgcattccagcctgggcagtgtgttgaggccccatctcaaaaacataaaaaaaaaaacaaaaaacaaaaatgtttattggtttgtgattctgtttccatttattttctttggcttttaatttttttgactcttcttattttccatcagcatgaaagagagcatattttctaaaggaagaaccagttttaggccaattctgaaatggagaa

SEQ ID NO: 62994 - DNA, 505 bp, Homo sapiens
atatagggcagcaagccttaggaaacaagccatagtttgagggttctttatgagtcttccaacacttactttagactgcggttacaggtagtctcatttttgcttatgtgtcagcagattataaaccatttgagaaaggcacgcttctcttgtattttcggattaatgtgtcttgcatttaaagtctgttgatgattttttgtttctctaggtaaagaattctccggaaatcctatcaaggtctcatttgctactcgccgggcagactttaatcggggtggtggcaatggtcgtggaggccgagggcgaggagggtgaggagctacctgctagtggtgcagaggggtaatggggagagtgcagaagatggtaaaggcttgcatggaatgggttagatttaccaaacttggagagggagcagacccatacttggtctatctgcattaggacccatgggccgtggaggctatggaggtggtggcagtggtggtggtggccgaggagg

SEQ ID NO: 62995 - DNA, 648 bp, Homo sapiens
  misc_feature (114)..(114): n is a, c, g, or t
cagtcttgctcccatcagcgtgtgacataagagattacgtctgcaggtacccagccaagaagccaacagcgtggctttcagttcactgatgggagaagactgcgcgcatctgcntccaacaggataattcagacaacaacaccatctttgtgcaaggcctgggtgagaatgttacaattgagtctgtggctgattacttcaagcagattggtattattaagacaaacaagaaaacgggacagcccatgattaatttgtacacagacagggaaactggcaagctgaagggagaagatgcgccagtcttctcccatcagtgttgtgtatggctatcattggtgttgaggttagtttgattagtcatggtggggtggtgattagtcggttgttgatgagatattgggaggtggggatcaatagagggggagatagaatgatcagtactgcggcgggtaggcctaggatggtgggggcaatgaatgaagcgaacagattttcgttcatttcggttcctgatgggcgcaagatgcgcctcttcgtcccatcaggtccacatgagagtacttcttccgtgactgtacaatcaccccaaatcctctctacttggttgtccacatcctcatcgttactgatgggagaagatggaca

SEQ ID NO: 62996 - DNA, 2255 bp, Homo sapiens
accgccggtaccggttcggaattcccgggcgtgctcagtcctccaggcgtcggtgctcagcggtgttggaacttcgttgcttgcttgcctgtgcgcgcgtgcgcggacatggcctcaaacgattatacccaacaagcaacccaaagctatggggcctaccccacccagcccgggcagggctattcccagcagagcagtcagccctacggacagcagagttacagtggttatagccagtccacggacacttcaggctatggccagagcagctattcttcttatggccagagccagaacacaggctatggaactcagtcaactccccagggatatggctcgactggcggctatggcagtagccagagctcccaatcgtcttacgggcagcagtcctcctatcctggctatggccagcagccagctcccagcagcacctcgggaagttacggtagcagttctcagagcagcagctatgggcagccccagagtgggagctacagccagcagcctagctatggtggacagcagcaaagctatggacagcagcaaagctataatccccctcagggctatggacagcagaaccagtacaacagcagcagtggtggtggaggtggaggtggaggtggaggtaactatggccaagatcaatcctccatgagtagtggtggtggcagtggtggcggttatggcaatcaagaccagagtggtggaggtggcagcggtggctatggacagcaggaccgtggaggccgcggcaggggtggcagtggtggcggcggcggcggcggcggtggtggttacaaccgcagcagtggtggctatgaacccagaggtcgtggaggtggccgtggaggcagaggtggcatgggcggaagtgaccgtggtggcttcaataaatttggtggccctcgggaccaaggatcacgtcatgactccgaacaggataattcagacaacaacaccatctttgtgcaaggcctgggtgagaatgttacaattgagtctgtggctgattacttcaagcagattggtattattaagacaaacaagaaaacgggacagcccatgattaatttgtacacagacagggaaactggcaagctgaagggagaggcaacggtctcttttgatgacccaccttcagctaaagcagctattgactggtttgatggtaaagaattctccggaaatcctatcaaggtctcatttgctactcgccgggcagactttaatcggggtggtggcaatggtcgtggaggccgagggcgaggaggacccatgggccgtggaggctatggaggtggtggcagtggtggtggtggccgaggaggatttcccagtggaggtggtggcggtggaggacagcagcgagctggtgactggaagtgtcctaatcccacctgtgagaatatgaacttctcttggaggaatgaatgcaaccagtgtaaggcccctaaaccagatggcccaggagggggaccaggtggctctcacatggggggtaactacggggatgatcgtcgtggtggcagaggaggctatgatcgaggcggctaccggggccgcggcggggaccgtggaggcttccgagggggccggggtggtggggacagaggtggctttggccctggcaagatggattccaggggtgagcacagacaggatcgcagggagaggccgtattaattagcctggctccccaggttctggaacagctttttgtcctgtacccagtgttaccctcgttattttgtaaccttccaattcctgatcacccaagggtttttttgtgtcggactatgtaattgtaactatacctctggttcccattaaaagtgaccattttagttaaaaaaaaaaaaaaaaaaaaaattcggagggcatctaatggccggggtggcgggaaaaaggagggcactgagaactggcgccatgggccataagctggttccctggacccaggtttctcttggttaccaaagggggcgagaatctggccggggtcctcccctatattagggagagtcggaattcaaattgcgagaaagagccaggcgtttacccggtgcgtttaatagactccgcgcggaccaaaacgtcgcaccgacaggacaccgcacacagaacgaccggccgccggaacgctgccaccacgggccagcacagacgacgaacgccggggggcacacacaacacccccacatttatgtaaaccaaacacaaaacggcactgtggggagcgacgcggagaa

SEQ ID NO: 62997 - DNA, 1813 bp, Homo sapiens
accgccggtaccggttcggaattcccgggcgtgctcagtcctccaggcgtcggtgctcagcggtgttggaacttcgttgcttgcttgcctgtgcgcgcgtgcgcggacatggcctcaaacgattatacccaacaagcaacccaaagctatggggcctaccccacccagcccgggcagggctattcccagcagagcagtcagccctacggacagcagagttacagtggttatagccagtccacggacacttcaggctatggccagagcagctattcttcttatggccagagccagaacacaggctatggaactcagtcaactccccagggatatggctcgactggcggctatggcagtagccagagctcccaatcgtcttacgggcagcagtcctcctatcttacggtagcagttctcagagcagcagctatgggcagccccagagtgggagctacagccagcagcctagctatggtggacagcagcaaagctatggacagcagcaaagctataatccccctcagggctatggacagcagaaccagtacaacagcagcagtggtggtggaggtggaggtggaggtggaggtaactatggccaagatcaatcctccatgagtagtggtggtggcagtggtggcggttatggcaatcaagaccagagtggtggaggtggcagcggtggctatggacagcaggaccgtggaggccgcggcaggggtggcagtggtggcggcggcggcggcggcggtggtggttacaaccgcagcagtggtggctatgaacccagaggtcgtggaggtggccgtggaggcagaggtggcatgggcggaagtgaccgtggtggcttcaataaatttggtggccctcgggaccaaggatcacgtcatgactccgaacaggataattcagacaacaacaccatctttgtgcaaggcctgggtgagaatgttacaattgagtctgtggctgattacttcaagcagattggtattattaagacaaacaagaaaacgggacagcccatgattaatttgtacacagacagggaaactggcaagctgaagggagaggcaacggtctcttttgatgacccaccttcagctaaagcagctattgactggtttgatggtaaagaattctccggaaatcctatcaaggtctcatttgctactcgccgggcagactttaatcggggtggtggcaatggtcgtggaggccgagggcgaggaggacccatgggccgtggaggctatggaggtggtggcagtggtggtggtggccgaggaggatttcccagtggaggtggtggcggtggaggacagcagcgagctggtgactggaagtgtcctaatcccacctgtgagaatatgaacttctcttggaggaatgaatgcaaccagtgtaaggcccctaaaccagatggcccaggagggggaccaggtggctctcacatggggggtaactacggggatgatcgtcgtggtggcagaggaggctatgatcgaggcggctaccggggccgcggcggggaccgtggaggcttccgagggggccggggtggtggggacagaggtggctttggccctggcaagatggattccaggggtgagcacagacaggatcgcagggagaggccgtattaattagcctggctccccaggttctggaacagctttttgtcctgtacccagtgttaccctcgttattttgtaaccttccaattcctgatcacccaagggtttttttgtgtcggactatgtaattgtaactatacctctggttcccattaaaagtgaccattttagttaaa

SEQ ID NO: 62998 - DNA, 2145 bp, Homo sapiens
accgccggtaccggttcggaattcccgggcgtgctcagtcctccaggcgtcggtgctcagcggtgttggaacttcgttgcttgcttgcctgtgcgcgcgtgcgcggacatggcctcaaacgattatacccaacaagcaacccaaagctatggggcctaccccacccagcccgggcagggctattcccagcagagcagtcagccctacggacagcagagttacagtggttatagccagtccacggacacttcaggctatggccagagcagctattcttcttatggccagagccagaacacaggctatggaactcagtcaactccccagggatatggctcgactggcggctatggcagtagccagagctcccaatcgtcttacgggcagcagtcctcctatcctggctatggccagcagccagctcccagcagcacctcgggaagttacggtagcagttctcagagcagcagctatgggcagccccagagtgggagctacagccagcagcctagctatggtggacagcagcaaagctatggacagcagcaaagctataatccccctcagggctatggacagcagaaccagtacaacagcagcagtggtggtggaggtggaggtggaggtggaggtaactatggccaagatcaatcctccatgagtagtggtggtggcagtggtggcggttatggcaatcaagaccagagtggtggaggtggcagcggtggctatggacagcaggaccgtggaggccgcggcaggggtggcagtggtggcggcggcggcggcggcggtggtggttacaaccgcagcagtggtggctatgaacccagaggtcgtggaggtggccgtggaggcagaggtggcatgggcggaagtgaccgtggtggcttcaataaatttggtggccctcgggaccaaggatcacgtcatgactccgaacaggataattcagacaacaacaccatctttgtgcaaggcctgggtgagaatgttacaattgagtctgtggctgattacttcaagcagattggtattattaagacaaacaagaaaacgggacagcccatgattaatttgtacacagacagggaaactggcaagctgaagggagaggcaacggtctcttttgatgacccaccttcagctaaagcagctattgactggtttgatggtaaagaattctccggaaatcctatcaaggtctcatttgctactcgccgggcagactttaatcggggtggtggcaatggtcgtggaggccgagggcgaggaggacccatgggccgtggaggctatggaggtggtggcagtggtggtggtggccgaggaggatttcccagtggaggtggtggcggtggaggacagcagcgagctggtgactggaagtgtcctaatcccacctgtgagaatatgaacttctcttggaggaatgaatgcaaccagtgtaaggcccctaaaccagatggcccaggagggggaccaggtggctctcacatggggggtaactacggggatgatcgtcgtggtggcagaggaggctatgatcgaggcggctaccggggccgcggcggggaccgtggaggcttccgagggggccggggtggtggggacagaggtggctttggccctggcaagatggattccaggtaagacatttaaatcagaataaaaaagtagagcagttgaacagaggccataggataacagggttttgttgagaaagtggtttcattttgagggctaggtggaaagacctgaggttgtaaccagtagtggagagggaaggaaaattaactcagggggagtgaatctgtagacccacttgagataagatactcgctgggttaggtaggaggggcagataggatatctaggcttggagaggctggtaactcaaatataatggatacttaatttttttttttttttttgcaggggtgagcacagacaggatcgcagggagaggccgtattaattagcctggctccccaggttctggaacagctttttgtcctgtacccagtgttaccctcgttattttgtaaccttccaattcctgatcacccaagggtttttttgtgtcggactatgtaattgtaactatacctctggttcccattaaaagtgaccattttagttaaa

SEQ ID NO: 62999 - DNA, 1821 bp, Homo sapiens
accgccggtaccggttcggaattcccgggcgtgctcagtcctccaggcgtcggtgctcagcggtgttggaacttcgttgcttgcttgcctgtgcgcgcgtgcgcggacatggcctcaaacgattatacccaacaagcaacccaaagctatggggcctaccccacccagcccgggcagggctattcccagcagagcagtcagccctacggacagcagagttacagtggttatagccagtccacggacacttcaggctatggccagagcagctattcttcttatggccagagccagaacacaggctatggaactcagtcaactccccagggatatggctcgactggcggctatggcagtagccagagctcccaatcgtcttacgggcagcagtcctcctatcctggctatggccagcagccagctcccagcagcacctcgggaagttacggtagcagttctcagagcagcagctatgggcagccccagagtgggagctacagccagcagcctagctatggtggacagcagcaaagctatggacagcagcaaagctataatccccctcagggctatggacagcagaaccagtacaacagcagcagtggtggtggaggtggaggtggaggtggaggtaactatggccaagatcaatcctccatgagtagtggtggtggcagtggtggcggttatggcaatcaagaccagagtggtggaggtggcagcggtggctatggacagcaggaccgtggaggccgcggcaggggtggcagtggtggcggcggcggcggcggcggtggtggttacaaccgcagcagtggtggctatgaacccagaggtcgtggaggtggccgtggaggcagaggtggcatggggccctcgggaccaaggatcacgtcatgactccgaacaggataattcagacaacaacaccatctttgtgcaaggcctgggtgagaatgttacaattgagtctgtggctgattacttcaagcagattggtattattaagacaaacaagaaaacgggacagcccatgattaatttgtacacagacagggaaactggcaagctgaagggagaggcaacggtctcttttgatgacccaccttcagctaaagcagctattgactggtttgatggtaaagaattctccggaaatcctatcaaggtctcatttgctactcgccgggcagactttaatcggggtggtggcaatggtcgtggaggccgagggcgaggaggacccatgggccgtggaggctatggaggtggtggcagtggtggtggtggccgaggaggatttcccagtggaggtggtggcggtggaggacagcagcgagctggtgactggaagtgtcctaatcccacctgtgagaatatgaacttctcttggaggaatgaatgcaaccagtgtaaggcccctaaaccagatggcccaggagggggaccaggtggctctcacatggggggtaactacggggatgatcgtcgtggtggcagaggaggctatgatcgaggcggctaccggggccgcggcggggaccgtggaggcttccgagggggccggggtggtggggacagaggtggctttggccctggcaagatggattccaggggtgagcacagacaggatcgcagggagaggccgtattaattagcctggctccccaggttctggaacagctttttgtcctgtacccagtgttaccctcgttattttgtaaccttccaattcctgatcacccaagggtttttttgtgtcggactatgtaattgtaactatacctctggttcccattaaaagtgaccattttagttaaa

SEQ ID NO: 63000 - DNA, 1785 bp, Homo sapiens
accgccggtaccggttcggaattcccgggcgtgctcagtcctccaggcgtcggtgctcagcggtgttggaacttcgttgcttgcttgcctgtgcgcgcgtgcgcggacatggcctcaaacgattatacccaacaagcaacccaaagctatggggcctaccccacccagcccgggcagggctattcccagcagagcagtcagccctacggacagcagagttacagtggttatagccagtccacggacacttcaggctatggccagagcagctattcttcttatggccagagccagaacacaggctatggaactcagtcaactccccagggatatggctcgactggcggctatggcagtagccagagctcccaatcgtcttacgggcagcagtcctcctatcctggctatggccagcagccagctcccagcagcacctcgggaagttacggtagcagttctcagagcagcagctatgggcagccccagagtgggagctacagccagcagcctagctatggtggacagcagcaaagctatggacagcagcaaagctataatccccctcagggctatggacagcagaaccagtacaacagcagcagtggtggtggaggtggaggtggaggtggaggtaactatggccaagatcaatcctccatgagtagtggtggtggcagtggtggcggttatggcaatcaagaccagagtggtggaggtggcagcggtggctatggacagcaggaccgtggaggccgcggcaggggtggcagtggtggcggcggcggcggcggcggtggtggttacaaccgcagcagtggtggctatgaacccagaggtcgtggaggtggccgtggaggcagaggtggcatgggcggaagtgaccgtggtggcttcaataaatttggtggccctcgggaccaaggatcacgtcatgactccgaacaggataattcagacaacaacaccatctttgtgcaaggcctgggtgagaatgttacaattgagtctgtggctgattacttcaagcagattggtattattaagacaaacaagaaaacgggacagcccatgattaatttgtacacagacagggaaactggcaagctgaagggagaggcaacggtctcttttgatgacccaccttcagctaaagcagctattgactggtttgatggtaaagaattctccggaaatcctatcaaggtctcatttgctactcgccgggcagactttaatcggggtggtggcaatggtcgtggaggccgagggcgaggaggacccatgggccgtggaggctatggaggtggtggcagtggtggtggtggccgaggaggatttcccagtggaggtggtggcggtggaggacagcagcgagctggtgactggaagtgtcctaatcccacctgtgagaatatgaacttctcttggaggaatgaatgcaaccagtgtaaggcccctaaaccagatggcccaggagggggaccaggtggctctcacatggggggtaactacggggatgatcgtcgtggtgggtggtggggacagaggtggctttggccctggcaagatggattccaggggtgagcacagacaggatcgcagggagaggccgtattaattagcctggctccccaggttctggaacagctttttgtcctgtacccagtgttaccctcgttattttgtaaccttccaattcctgatcacccaagggtttttttgtgtcggactatgtaattgtaactatacctctggttcccattaaaagtgaccattttagttaaa

SEQ ID NO: 63001 - DNA, 1777 bp, Homo sapiens
  misc_feature (1548)..(1548): n is a, c, g, or t
accgccggtaccggttcggaattcccgggcgtgctcagtcctccaggcgtcggtgctcagcggtgttggaacttcgttgcttgcttgcctgtgcgcgcgtgcgcggacatggcctcaaacgattatacccaacaagcaacccaaagctatggggcctaccccacccagcccgggcagggctattcccagcagagcagtcagccctacggacagcagagttacagtggttatagccagtccacggacacttcaggctatggccagagcagctattcttcttatggccagagccagaacacaggctatggaactcagtcaactccccagggatatggctcgactggcggctatggcagtagccagagctcccaatcgtcttacgggcagcagtcctcctatcctggctatggccagcagccagctcccagcagcacctcgggaagttacggtagcagttctcagagcagcagctatgggcagccccagagtgggagctacagccagcagcctagctatggtggacagcagcaaagctatggacagcagcaaagctataatccccctcagggctatggacagcagaaccagtacaacagcagcagtggtggtggaggtggaggtggaggtggaggtaactatggccaagatcaatcctccatgagtagtggtggtggcagtggtggcggttatggcaatcaagaccagagtggtggaggtggcagcggtggctatggacagcaggaccgtggaggccgcggcaggggtggcagtggtggcggcggcggcggcggcggtggtggttacaaccgcagcagtggtggctatgaacccagaggtcgtggaggtggccgtggaggcagaggtggcatgggcggaagtgaccgtggtggcttcaataaatttggtggccctcgggaccaaggatcacgtcatgactccgaacaggataattcagacaacaacaccatctttgtgcaaggcctgggtgagaatgttacaattgagtctgtggctgattacttcaagcagattggtattattaagacaaacaagaaaacgggacagcccatgattaatttgtacacagacagggaaactggcaagctgaagggagaggcaacggtctcttttgatgacccaccttcagctaaagcagctattgactggtttgatggtaaagaattctccggaaatcctatcaaggtctcatttgctactcgccgggcagactttaatcggggtggtggcaatggtcgtggaggccgagggcgaggaggacccatgggccgtggaggctatggaggtggtggcagtggtggtggtggccgaggaggatttcccagtggaggtggtggcggtggaggacagcagcgagctggtgactggaagtgtcctaatcccacctgtgagaatatgaacttctcttggaggaatgaatgcaaccagtgtaaggcccctaaaccagatggcccaggagggggaccaggtggctctcacatggggggtaactacggggatgatcgtcgggggagaggaggtatgatcgangcggtacggggcggggggacgcgagctccgaggggcgggggggggaccgaggggctcgccggcagatgttccggggagccgacgacggggaagggaataaaaccggcccggtgggaagctggcgaccagtcccgtttgaccaccgcccgggttggggagaggaaaccgccaaggggaaaaaaaaagcagggaacgggcaacgagataaggagaagggtcacaaatagcg

SEQ ID NO: 63002 - DNA, 2316 bp, Homo sapiens
accgccggtaccggttcggaattcccgggcgtgctcagtcctccaggcgtcggtgctcagcggtgttggaacttcgttgcttgcttgcctgtgcgcgcgtgcgcggacatggcctcaaacgattatacccaacaagcaacccaaagctatggggcctaccccacccagcccgggcagggctattcccagcagagcagtcagccctacggacagcagagttacagtggttatagccagtccacggacacttcaggctatggccagagcagctattcttcttatggccagagccagaacacaggctatggaactcagtcaactccccagggatatggctcgactggcggctatggcagtagccagagctcccaatcgtcttacgggcagcagtcctcctatcctggctatggccagcagccagctcccagcagcacctcgggaagttacggtagcagttctcagagcagcagctatgggcagccccagagtgggagctacagccagcagcctagctatggtggacagcagcaaagctatggacagcagcaaagctataatccccctcagggctatggacagcagaaccagtacaacagcagcagtggtggtggaggtggaggtggaggtggaggtaactatggccaagatcaatcctccatgagtagtggtggtggcagtggtggcggttatggcaatcaagaccagagtggtggaggtggcagcggtggctatggacagcaggaccgtggaggccgcggcaggggtggcagtggtggcggcggcggcggcggcggtggtggttacaaccgcagcagtggtggctatgaacccagaggtcgtggaggtggccgtggaggcagaggtggcatgggcggaagtgaccgtggtggcttcaataaatttggtggccctcgggaccaaggatcacgtcatgactccgaacaggataattcagacaacaacaccatctttgtgcaaggcctgggtgagaatgttacaattgagtctgtggctgattacttcaagcagattggtattattaagacaaacaagaaaacgggacagcccatgattaatttgtacacagacagggaaactggcaagctgaagggagaggcaacggtctcttttgatgacccaccttcagctaaagcagctattgactggtttgatggtaaagaattctccggaaatcctatcaaggtctcatttgctactcgccgggcagactttaatcggggtggtggcaatggtcgtggaggccgagggcgaggaggacccatgggccgtggaggctatggaggtggtggcagtggtggtggtggccgaggaggatttcccagtggaggtggtggcggtggaggacagcagcgagctggtgactggaagtgtcctaatccactgtgagaatatgaacttctcttggaggaatgaatgcaaccagtgtaaggcccctaatcccacctgtgagaatatgaacttctcttggaggaatgaatgcaaccagtgtaaggcccctaaaccagatggcccaggagggggaccaggtggctctcacatggggggtaactacggggatgatcgtcgtggtggcagaggaggctatgatcgaggcggctaccggggccgcggcggggaccgtggaggcttccgagggggccggggtggtggggacagaggtggctttggccctggcaagatggattccaggggtgagcacagacaggatcgcagggagaggccgtattaattagcctggctccccaggttctggaacagctttttgtcctgtacccagtgttaccctcgttattttgtaaccttccaattcctgatcacccaagggtttttttgtgtcggactatgtaattgtaactatacctctggttcccattaaaagtgaccattttagttaaaaaaaaaaaaaaaaaaaaaattcggagggcatctaatggccggggtggcgggaaaaaggagggcactgagaactggcgccatgggccataagctggttccctggacccaggtttctcttggttaccaaagggggcgagaatctggccggggtcctcccctatattagggagagtcggaattcaaattgcgagaaagagccaggcgtttacccggtgcgtttaatagactccgcgcggaccaaaacgtcgcaccgacaggacaccgcacacagaacgaccggccgccggaacgctgccaccacgggccagcacagacgacgaacgccggggggcacacacaacacccccacatttatgtaaaccaaacacaaaacggcactgtggggagcgacgcggagaa

SEQ ID NO: 63003 - DNA, 5101 bp, Homo sapiens
accgccggtaccggttcggaattcccgggcgtgctcagtcctccaggcgtcggtgctcagcggtgttggaacttcgttgcttgcttgcctgtgcgcgcgtgcgcggacatggcctcaaacgattatacccaacaagcaacccaaagctatggggcctaccccacccagcccgggcagggctattcccagcagagcagtcagccctacggacagcagagttacagtggttatagccagtccacggacacttcaggctatggccagagcagctattcttcttatggccagagccagaacacaggctatggaactcagtcaactccccagggatatggctcgactggcggctatggcagtagccagagctcccaatcgtcttacgggcagcagtcctcctatcctggctatggccagcagccagctcccagcagcacctcgggaagttacggtagcagttctcagagcagcagctatgggcagccccagagtgggagctacagccagcagcctagctatggtggacagcagcaaagctatggacagcagcaaagctataatccccctcagggctatggacagcagaaccagtacaacagcagcagtggtggtggaggtggaggtggaggtggaggtaactatggccaagatcaatcctccatgagtagtggtggtggcagtggtggcggttatggcaatcaagaccagagtggtggaggtggcagcggtggctatggacagcaggaccgtggaggccgcggcaggggtggcagtggtggcggcggcggcggcggcggtggtggttacaaccgcagcagtggtggctatgaacccagaggtcgtggaggtggccgtggaggcagaggtggcatggggtaggtgtctcatgagccagggagtatctttggtggggagtgtggaggattgcatgaatctccctgaagccagtccctagtgcatggtttagtattcttgttgtctagggatctgtgagggctttgatttgggggcagtgactttctttttacatccccattttatttttgtgagaacttgggagcctgaactcccatccataccactgaatagagattttgagtaatgatacttgtttccaaaaaaaaagaaaccatacatagatacgtatggattggagtcattaatatcctaggcaagaaacatggaagtgaagacttctttctctgcaagggaaaccgatgatcccactcctgggaaatagtagggaaacttggtatgtgtattcccatgtgtcctctagggagttggtaatggttaacctgacttcagcttccaggaattggctactcttcccgttttctatagtcatttgaatccacgagcttgatttgcactaatttgaccgacattgattttgtgtgtgacttggtttatggggccagctgactgaagtaagcagaccttttgggcaaaaatatgctttgacagtggtctcccacctatttgttccactgtctgccttcccctggttacttaaaattcatcagcttgtccaactggaccttctttccttcctgctgaagttgatttgaagtaaaaccttagatttgatgttaaaacagttgtcaaatctgttggtaaataagatttgaaggaccctactctgtctcccttgaaaaaggggaggaatgtcagtgttactgtttttggaaaaagtagatttttaaaccgagtttggaaatggtaagtatgcagaggtgggtgggggcaatctcaaaaacgtgcaaaaatgaggaaaacaaaaatgaggaaatgtgtgcgtgtgtttaatgcaaaactttaaaaagaaaaacaactgttatgtgactgttaacttgctctgcattttatgtgccacaggtatgaaaggtgacattgcaaaatactccgctcttctcgcagtgtagaaggggtgaccccgggggttgggggagatcaaaaacagctcagtagttaggacagagcttagctaagtttgtcttgctttaaggggaagttgcctttggttttgactttttatggaatggggttgggtctgcttgctgctttcaaagcaaaaaccacaaaaatgtgttcaaggctaccccagcctggtgtgaaatgtcttctgggtaaattggggtagggtttttaaaccaactacttggttgtcaaccacttgcgacaagaggaaaaaaaaacatctgctccatcggaagaacgaccaaggaaaatgggttattttttttccagaggaaatagataacgtaaccttttaaagcaaaatctttataaactgtgtctgagaaattgcacacgtgtgtgtgacatgctcaaaggtcagacaaggggtggtcaggaagggatgtattttagtagccacttgtatctttttccaaaaacacctacccatgtttggggaatgttaaacaaaatcaaaaaacaaccttttgtagccgttggaagcttcatgtcctttcttctaacttgtcttctccagcggaagtgaccgtggtggcttcaataaatttggtggtaagtgaacagagtttccaaaattcccaactcccagcaatgctttgtctgattgttcatttgcagatgtcttagcgtgttaatttaaatgtcaaaggttttgaggtgtccagaaccacctccagaaaggggtagggtagaatgccacctgttgcctggtgtgtgctaacctggagcaggtaggggtaagactcaatagtcatcttttaccaaatgggtttgccccaggttaataagaggggtctagtaggccttggactgggccgttgccacacctggcacttagtgaccatcatcatgagaaactggagagtgcgtgctggaacacgtggtgccatcttggctttaggatccttttgatcgttgtgtccaaggcttgtgtgtgtgtgagtgtgtgggagacaactccgaatgtttaattctggaagagggatgtaacattgccctgaggatggtgaagttggtatacatttataaagtacggaatggtgtcaatgaatgcaattctatgtatatggacttaactgagatgggcaaatagaaactagctctgggaaggaacatgtgcactacttcaagaaagattggaagcatgtgtggctcatgggaaataaccaggtcttaaacagcacaaactgaattcgtggaccaggaaggtcttaaacagcacaaactgaattcatggaaaaatgacaaatttgagaagtctcccagtaagctggaacttttctggtttggttaacaaaaggtttcttgatttgtttcaagatttaaagccaaaggtgtgggttcatgacttaggtgtcattgcgtgtgggtacaatatttatatatggcgaattcagataaacattggtcaaagatggtctctggaaaaacaaaatagaggctgcattacggaaataagatttctggtctgttccctgggacatgcttaaaaaatacaatagctattatgtatggtttttattttcatgtggtttcggggaaacaacacggttttaaggatggtttctaaagatgaaattaaaaattgttccacaagggttaagtgtctggtggtaaagttgggagaaactggatggatgcacatcgcatggctggtggcgagcccatctctcttctctcgggtgagagaaccgggccaagctgagttggtttgttcactttaatgggtctccgtttcccctgccacctgtgctgaggacatttcccagcctgagctgggggaggcagcattttctgaagtgtggagttgtctctgtggagactcaagttacagatcttaaggggcctgcctagaattttctcctctgggcaggcgacccaggaaagggtttggagtgaggctgtgagcacttacttgatattttacaagtttggatttggtgttaatttttttccttgtccgttttttcctgttgactaacggctcatcttttccttgtttttgttttttttttgttctttttttccatgtcactaaaggccctcgggaccaaggatcacgtcatgactccggtgagttcacacgtggtggcatgaaaagagtggctaaagtggtatcaagactgcctggatgttctttgaaactattataaaaaggaaactgaaaaaaatggggatagagaaggaagggagttaggtgtgtccttagttagcagtgagaagtatttgttacgaagtatttctcagaaatacctggcttgtgggttccacccccagtgatttaggtctgagaggaccctgaaaatctacctttctaacaagtccccagtgatgctgatgcgtctggaccacactcagatggtttacagcagtggttctttcaaaatgtggatcatgtccaagttggtgaacaaaactagtgaaagacctgaccacatgaagtaaagcattgaactcctgtttaggttgtattgatgtttgtgtactagatttgaatgtaaaatgggtttcttatttaattcggggaccttcaactgaaagttgataaatactgatggacttttctgtgtggtcttgttgggcatttcactcctgagccctggtttccatactgtatactgggtgttaacatgtttcaaaggataattgtcaaactgaatctgaaatttatcagcatggctggcatatagggactcaaaagggatgtggatttctttttagttgtcttccataaaccaaatgataccagttgcttgatggatactaggtgctttaggttttttcctgtgttttttattttaccttttcacatttgcattttctctgttcaacaagcagaacaggataattcagacaacaacaccatctttgtgcaaggcctgggtgagaatgttacaattgagtctgtggctgattacttcaagcagattggtattattaagacaaacaagaaaacgggacagcccatgattaatttgtacacagacagggaaactggcaagctgaagggagaggcaacggtctcttttgatgacccaccttcagctaaagcagctattgactggtttgatggtaaagaattctccggctctcggtgggaagtcgggtgccgagctcgagggtt

SEQ ID NO: 63004 - DNA, 1026 bp, Homo sapiens
accgccggtaccggttcggaattcccgggcgtgctcagtcctccaggcgtcggtgctcagcggtgttggaacttcgttgcttgcttgcctgtgcgcgcgtgcgcggacatggcctcaaacgattatacccaacaagcaacccaaagctatggggcctaccccacccagcccgggcagggctattcccagcagagcagtcagccctacggacagcagagttacagtggttatagccagtccacggacacttcaggctatggccagagcagctattcttcttatggccagagccagaacacaggctatggaactcagtcaactccccagggatatggctcgactggcggctatggcagtagccagagctcccaatcgtcttacgggcagcagtcctcctatcctggctatggccagcagccagctcccagcagcacctcgggaagttacggtagcagttctcagagcagcagctatgggcagccccagagtgggagctacagccagcagcctagctatggtggacagcagcaaagctatggacagcagcaaagctataatccccctcagggctatggacagcagaaccagtacaacagcagcagtggtggtggaggtggaggtggaggtggaggtaactatggccaagatcaatcctccatgagtagtggtggtggcagtggtggcggttatggcaatcaagaccagagtggtggaggtggcagcggtggctatggacagcaggaccgtggaggccgcggcaggggtggcagtggtggcggcggcggcggcggcggtggtggttacaaccgcagcagtggtggctatgaacccagaggtcgtggaggtggccgtggaggcagaggtggcatgggcggaagtgaccgtggtggcttcaataaatttggtgcagtggccagatccagctttggcagttcctcctggagctcctgtcggacagctccaactccagctgcatcacctgggaaggcaccaacggggagttcaagatgacggatcccgacgagg

SEQ ID NO: 63005 - DNA, 1717 bp, Homo sapiens
  misc_feature (944)..(944): n is a, c, g, or t
accgccggtaccggttcggaattcccgggcgtgctcagtcctccaggcgtcggtgctcagcggtgttggaacttcgttgcttgcttgcctgtgcgcgcgtgcgcggacatggcctcaaacgattatacccaacaagcaacccaaagctatggggcctaccccacccagcccgggcagggctattcccagcagagcagtcagccctacggacagcagagttacagtggttatagccagtccacggacacttcaggctatggccagagcagctattcttcttatggccagagccagaacacaggctatggaactcagtcaactccccagggatatggctcgactggcggctatggcagtagccagagctcccaatcgtcttacgggcagcagtcctcctatcctggctatggccagcagccagctcccagcagcacctcgggaagttacggtagcagttctcagagcagcagctatgggcagccccagagtgggagctacagccagcagcctagctatggtggacagcagcaaagctatggacagcagcaaagctataatccccctcagggctatggacagcagaaccagtacaacagcagcagtggtggtggaggtggaggtggaggtggaggtaactatggccaagatcaatcctccatgagtagtggtggtggcagtggtggcggttatggcaatcaagaccagagtggtggaggtggcagcggtggctatggacagcaggaccgtggaggccgcggcaggggtggcagtggtggcggcggcggcggcggcggtggtggttacaaccgcagcagtggtggctatgaacccagaggtcgtggaggtggccgtggaggcagaggtggcatgggcggaagtgaccgtggtggcttcaataaatttggtgtgttcaagaaggaagtgtatcttcatacatcaccacncctgaaagcagatgtgcttttccagactgatccaactgcagagatggcagctgagtcattgcctttctccttcgggacactgtccagctgggagctggaagcctggtatgaggacctgcaagaggtcctgtcttcagatgaaaatgggggtacctatgtttcacctcctggaaatgaagaggaagaatcaaaaatcttcaccactcttgaccctgcttctctggcttggctgactgaggaggagccagaaccagcagaggtcacaagcacctcccagagccctcactctccagattccagtcagagctccctggctcaggaggaagaggaggaagaccaagggagaaccaggaaacggaaacagagtggtcattccccagcccgggctggaaagcagcgcatgaaggagaaagaacaggagaatgaaaggaaagtggcacagctagctgaagagaatgaacggctcaagcaggaaatcgagcgcctgaccagggaagtagaggcgactcgccgagctctgattgaccgaatggtgaatctgcaccaagcatgaacaattgggagcatcagtcccccacttgggccacactacccacctttcccagaagtggctactgactaccctctcactagtgccaatgatgtgaccctcaatcccacatacgcagggggaaggcttggagtagacaaaaggaaaggtctcagcttgtatatagagattgtacatttatttattactgtccctatctattaaagtgactttctatgaaaaa

SEQ ID NO: 63006 - DNA, 1037 bp, Homo sapiens
accgccggtaccggttcggaattcccgggcgtgctcagtcctccaggcgtcggtgctcagcggtgttggaacttcgttgcttgcttgcctgtgcgcgcgtgcgcggacatggcctcaaacgattatacccaacaagcaacccaaagctatggggcctaccccacccagcccgggcagggctattcccagcagagcagtcagccctacggacagcagagttacagtggttatagccagtccacggacacttcaggctatggccagagcagctattcttcttatggccagagccagaacacaggctatggaactcagtcaactccccagggatatggctcgactggcggctatggcagtagccagagctcccaatcgtcttacgggcagcagtcctcctatcctggctatggccagcagccagctcccagcagcacctcgggaagttacggtagcagttctcagagcagcagctatgggcagccccagagtgggagctacagccagcagcctagctatggtggacagcagcaaagctatggacagcagcaaagctataatccccctcagggctatggacagcagaaccagtacaacagcagcagtggtggtggaggtggaggtggaggtggagttgccattgccccaaatggagccttacagttggcaagtccaggcacagatggagtacagggacttcagacattaaccatgacaaattcaggcagtactcagcaaggtacaactattcttcagtatgcacagacctctgatggacagcagatacttgtgcccagcaatcaggtggtcgtacaaactgcatcaggagatatgcaaacatatcagatccgaactacaccttcagctacttctctgccacaaactgtggtgatgacatctcctgtgactctcacctctcagacaactaagacagatgacccccaattgaaaagagaaataaggttaatgaaaaacagagaagctgctcgagaatgtcgcagaaagaagaaagaatatgtgaaatgcctggaaaaccgagt

SEQ ID NO: 63007 - DNA, 1168 bp, Homo sapiens
accgccggtaccggttcggaattcccgggcgtgctcagtcctccaggcgtcggtgctcagcggtgttggaacttcgttgcttgcttgcctgtgcgcgcgtgcgcggacatggcctcaaacgattatacccaacaagcaacccaaaggtgagtgctatttttgggcttccagagtttgtagagggcaagggtggtcacgccatgttttctgatcacgctggttttccttttatttagctatggggcctaccccacccagcccgggcagggctattcccagcagagcagtcagccctacggacagcagagttacagtggttatagccagtccacggacacttcaggctatggccagagcagctattcttcttatggccagagccagaacagtgagtctttctcagcgggtcacctcttcctactctttctgaatattgcttttctttttcttgttttttggagacggagtctggtcctgttgcccaggctggagtgcagtggtgctgtctcagctcactgcaacatcagcctaccgggttcaaacgattctcctgcctcagcctcctgaagtagctgggattacaggtacctgctaccacgcctggctaattttgtgtttttagtagagatggggtttcaccgtgttggacaggctggtctggaactcctgacctcctgcctgccttgacctgccaaagtgctgggattacaggcgtcagccacaatgccctgaatgttgcttttcttaaacctgagcagcactgagatgttgaaactgttccatatttcttttccgtgaaacagtgtataagtcttaaaactttttgggatctgagtcctttacagggcattgtggcacacctgtagtcccagctactgaggaggctgaggcgggaggatcccttgaattcaggagtttggggctgcagtgagctatgatggtgcctgtgaacagccactgcattccagcctgggcagtgtgttgaggccccatctcaaaaacataaaaaaaaaaacaaaaaacaaaaatgtttattggtttgtgattctgtttccatttattttctttggcttttaatttttttgactcttcttattttccatcagcatgaaagagagcatattttctaaaggaagaaccagttttaggccaattctgaaatggagaa

SEQ ID NO: 63008 - DNA, 529 bp, Homo sapiens
tacaggcacacaccaccacatctgctgatttttgtatttttagtagagtggggtttcaccatgttgccctgagagaagagagaaagagacccccccccatattgttttatattgttttatactcagtatctgttttaagaagaaacaaggaagcgaaaccaaaggcaggcagcccagcgccaggcaccagacccaaaaccagacccaaaaccaggcctgggactgccagacctaacctggtagttaaaattcaacccatgacctagcaaccaatgttatccacagattccagacattgtatggaaggacatcgtgaaacttcccgttcgttgtttcactcttattaccggtgcatgcagcccctgtcacataccccctagattgctcaatcaatcacggccctttcacgtaaaatctttagcattgtgagcccttaaaagggccagaaactgtgcactcgagaagctcggattttgagacgttagtctgcagatgcttccagcttattaaagccacttccttcactacc

SEQ ID NO: 63009 - DNA, 343 bp, Homo sapiens
cccacctcctcctctcacctcctgtgtctgttattcactgttccagacacacaggccttcctgctagtccttgacaaggaagagctgtatgcaggaggctttctctggctcttcatgcgagtatctccagcgtgttactcaaatctcaactcagaagcacctctcagggctccagagatgccttctctggccacttgacgttagcagcacctgtatgcatgcaaccacactgtgctggcaccttcagtcacactcacctgctatatgtccttctgcttacctctttagtgtcttgtttctgctgctgaactgaaagcttcatataagcaaaaactgggttcgt

SEQ ID NO: 63010 - DNA, 3365 bp, Homo sapiens
  misc_feature (1)..(1): n is a, c, g, or t
ngcaaagaaatggctcaaaagcttcagctctttctgtgccctgggagctgagatgcacgtcagtggccttgccagcgtggccaattctctgctgactgccagaaaaaagaggccaggaagaaagaggaaagagaagagatcgctcaggggtgagaccatgcccttcatcttttcttttccctaatctcctctgcttgtgtccacccacactctccccacctggcaaaattgttcaaaattgctgtggagtttacctcagtttcctctttcagtctgtggtgtgtggtccatcctcttgctgagcacattgaaaggaactggctatctttgatctcttcctccagatcagagtcaaggaatgtgtttataatggacacttcatccaaagaaaatatccagttgttctgcaaaacttcagtgcaacctgttggaaggccttcttttaaaacagaatatccctcctcagaagaaaagcaaccatgctgtggtgaactaaaggtgttcttgtgtgccttgtcttttgtttactttgccaaagcattggcagaaggctatctgaagagcaccatcactcagatagagagaaggtttgatatcccttcttcactggtgggagttattgatggtagttttgaaattgggaatctcttagttataacatttgttagctactttggagccaaacttcacaggccaaaaataattggagcagggtgtgtaatcatgggagttggaacactgctcattgcaatgcctcagttcttcatggagcagtacaaatatgagagatattctccttcctccaattccactctcagcatctctccgtgtctcctagagtcaagcagtcaattaccagtttcagttatggaaaaatcaaaatccaaaataagtaacgaatgtgaagtggacactagctcttccatgtggatttatgttttcctgggcaatcttcttcgtggaataggagaaactcccattcagcctttgggcattgcctacctggatgattttgccagtgaagacaatgcagctttctatattgggtgtgtgcagacggttgcaattataggaccaatctttggtttcctgttaggctcattatgtgccaaactatatgttgacattggctttgtaaacctagatcacataaccattaccccaaaagatccccagtgggtaggagcctggtggcttggctatctaatagcaggaatcataagtcttcttgcagctgtgcctttctggtatttaccaaagagtttaccaagatcccaaagtagagaggattctaattcttcctctgagaaatccaagtttattatagatgatcacacagactaccaaacaccccagggagaaaatgcaaaaataatggaaatggcaagagattttcttccatcactgaagaatctttttggaaacccagtatacttcctatatttatgtacaagcactgttcagttcaattctctgttcggcatggtgacgtacaaaccaaagtacattgagcagcagtatggacagtcatcctccagggccaactttgtgatcgggctcatcaacattccagcagtggcccttggaatattctctggggggatagttatgaaaaaattcagaatcagtgtgtgtggagctgcaaaactctacttgggatcatctgtctttggttacctcctatttctttccctgtttgcactgggctgtgaaaattctgatgtggcaggactaactgtctcctaccaaggaaccaaacctgtctcttatcatgaacgagctctcttttcagattgcaactcaagatgcaaatgttcagagacaaaatgggaacccatgtgcggtgaaaatggaatcacatatgtatcagcttgtcttgctggttgtcaaacctccaacaggagtggaaaaaatattatattttacaactgcacttgtgtgggaattgcagcttctaaatccggaaattcctcaggcatagtgggaagatgtcagaaagacaatggatgtccccaaatgtttctgtatttccttgtaatttcagtcatcacatcctatactttatccctaggtggcatacctggatacatattacttctgaggtgcattaagccacagcttaagtcttttgccttgggtatctacacattagcaataagagttcttgcaggaatcccagctccagtgtattttggagttttgattgatacttcatgcctcaaatggggatttaaaagatgtggaagtagaggatcatgcagattatatgattcaaatgtcttcagacatatatatctgggactaactgtgatactgggcacagtgtcaattctcctaagcattgcagtacttttcattttaaagaaaaattatgtttcaaaacacagaagttttataaccaagagagaaagaacaatggtgtctacaagattccaaaaggaaaattacactacaagtgatcatctgctacaacccaactactggccaggcaaggaaactcaactttagaaacatgatgactggaagtcatgtcttctaattggttgacattttgcaaacaaataaattgtaatcaaaagagctctaaatttgtaatttctttctcctttcaaaaaatgtctactttgttttggtcctaggcattaggtaatataactgataatatactgaaacatataatggaagatgcagatgataaaactaattttgaactttttaatttatataaattattttatatcacttacttatttcactttattttgctttgtgctcattgatatatattagctgtactcctagaagaacaattgtctctattgtcacacatggttatatttaaagtaatttctgaactgtgtaatgtgtctagagtaagcaaatactgctaacaattaactcataccttgggttccttcaagtattactcctatagtattttctcccatagctgtcttcatctgtgtattttaataatgatcttaggatggagcagaacatggagaggaagatttcattttaagctcctccttttctttgaaatacaataatttatatagaaatgtgtagcagcaaattatattggggattagaattttgaattaatagctctcctactattaatttacatgtgctttttgtgtggcgctataagtgactatggttgtaaagtaataaaattgatgttaacatgcccaattattgttcttttatgaatccaatgaatttaaaactattgttaaatataatactgccccactttaatatatgtaagcaacttcctacttatacacgacgtgttcctaaaacatgtttgaaaggtgaatttctgaaagtctacaataaatgtaggtgttacaacagga

SEQ ID NO: 63011 - DNA, 910 bp, Homo sapiens
  misc_feature (1)..(1): n is a, c, g, or t
ngcaaagaaatggctcaaaagcttcagctctttctgtgccctgggagctgagatgcacgtcagtggccttgccagcgtggccaattctctgctgactgccagaaaaaagaggccaggaagaaagaggaaagagaagagatcgctcagggtctgtggtgtgtggtccatcctcttgctgagcacattgaaaggaactggctatctttgatctcttcctccagatcagagtcaaggaatgtgtttataatggacacttcatccaaagaaaatatccagttgttctgcaaaacttcagtgcaacctgttggaaggccttcttttaaaacagaatatccctcctcagaagaaaagcaaccatgctgtggtgaactaaaggtagagcaaccaagaagtaaatagtgttgatgctcttagttttctgtccagatatcatctatataatgaagttagaatgagaattgttttctcctttaaaaaaaaaaaaagatcttagatgcaatttactaaaaccacaccttgccaggcggtgcaagcaatctctacctgaccatgtgggttaaattactttcctgggctcatttaaatgcccccccaaacagaaaagagagaaatagtagaaactagtatttattgaacttctgccatgtgccagatattaagccaagcacagatataacatttaatttgtgaaacatcacattactcccattttgcaaataaaaatgggaataatgttacagagtagggagaagagttgcttttttttttttttaggattgttgtatcaaacaatagtttttagttttttgaggaacctccatactattatattttccaaagagactacatcaacttatgtaaccactaaccatgtacaaagattcccttttctttacattctaaccagttt

SEQ ID NO: 63012 - DNA, 457 bp, Homo sapiens
  misc_feature (1)..(1): n is a, c, g, or t
ngcaaagaaatggctcaaaagcttcagctctttctgtgccctgggagctgagatgcacgtcagtggccttgccagcgtggccaattctctgctgactgccagaaaaaagaggccaggaagaaagaggaaagagaagagatcgctcaggggtgagaccatgcccttcatcttttcttttccctaatctcctctgcttgtgtccacccacactctccccacctggcaaaattgttcaaaattgctgtggagtttacctcagtttcctctttcagtctgtggtgtgtggtccatcctcttgctgagcacattgaaaggaactggctatctttgatctcttcctccaggggatgaactgtagcctccttggaacatactacacttgcaataatttgcgcattaaccatcaagacacttcagtaaagctatgcagtgccaatagtttaagctggatcctatt

SEQ ID NO: 63013 - DNA, 270 bp, Homo sapiens
tatgtttttaacagcaattatttgtttttctcacagcaggaatcccagctccagtgtattttggagttttgattgatacttcatgcctcaaatggggatttaaaagatgtggaagtagaggatcatgcagattatatgattcaaatgtcttcaggtaccaaatcaaaagcattcccgcatctcattgctacagcatcccagatttacacaatgccactgacactaacaagttttcatgtcatttcactgcttgtaaggtaaagaatagtc

SEQ ID NO: 63014 - DNA, 3242 bp, Homo sapiens
  misc_feature (1)..(1): n is a, c, g, or t
ngcaaagaaatggctcaaaagcttcagctctttctgtgccctgggagctgagatgcacgtcagtggccttgccagcgtggccaattctctgctgactgccagaaaaaagaggccaggaagaaagaggaaagagaagagatcgctcagggtctgtggtgtgtggtccatcctcttgctgagcacattgaaaggaactggctatctttgatctcttcctccagatcagagtcaaggaatgtgtttataatggacacttcatccaaagaaaatatccagttgttctgcaaaacttcagtgcaacctgttggaaggccttcttttaaaacagaatatccctcctcagaagaaaagcaaccatgctgtggtgaactaaaggtgttcttgtgtgccttgtcttttgtttactttgccaaagcattggcagaaggctatctgaagagcaccatcactcagatagagagaaggtttgatatcccttcttcactggtgggagttattgatggtagttttgaaattgggaatctcttagttataacatttgttagctactttggagccaaacttcacaggccaaaaataattggagcagggtgtgtaatcatgggagttggaacactgctcattgcaatgcctcagttcttcatggagcagtacaaatatgagagatattctccttcctccaattccactctcagcatctctccgtgtctcctagagtcaagcagtcaattaccagtttcagttatggaaaaatcaaaatccaaaataagtaacgaatgtgaagtggacactagctcttccatgtggatttatgttttcctgggcaatcttcttcgtggaataggagaaactcccattcagcctttgggcattgcctacctggatgattttgccagtgaagacaatgcagctttctatattgggtgtgtgcagacggttgcaattataggaccaatctttggtttcctgttaggctcattatgtgccaaactatatgttgacattggctttgtaaacctagatcacataaccattaccccaaaagatccccagtgggtaggagcctggtggcttggctatctaatagcaggaatcataagtcttcttgcagctgtgcctttctggtatttaccaaagagtttaccaagatcccaaagtagagaggattctaattcttcctctgagaaatccaagtttattatagatgatcacacagactaccaaacaccccagggagaaaatgcaaaaataatggaaatggcaagagattttcttccatcactgaagaatctttttggaaacccagtatacttcctatatttatgtacaagcactgttcagttcaattctctgttcggcatggtgacgtacaaaccaaagtacattgagcagcagtatggacagtcatcctccagggccaactttgtgatcgggctcatcaacattccagcagtggcccttggaatattctctggggggatagttatgaaaaaattcagaatcagtgtgtgtggagctgcaaaactctacttgggatcatctgtctttggttacctcctatttctttccctgtttgcactgggctgtgaaaattctgatgtggcaggactaactgtctcctaccaaggaaccaaacctgtctcttatcatgaacgagctctcttttcagattgcaactcaagatgcaaatgttcagagacaaaatgggaacccatgtgcggtgaaaatggaatcacatatgtatcagcttgtcttgctggttgtcaaacctccaacaggagtggaaaaaatattatattttacaactgcacttgtgtgggaattgcagcttctaaatccggaaattcctcaggcatagtgggaagatgtcagaaagacaatggatgtccccaaatgtttctgtatttccttgtaatttcagtcatcacatcctatactttatccctaggtggcatacctggatacatattacttctgaggtgcattaagccacagcttaagtcttttgccttgggtatctacacattagcaataagagttcttgcaggaatcccagctccagtgtattttggagttttgattgatacttcatgcctcaaatggggatttaaaagatgtggaagtagaggatcatgcagattatatgattcaaatgtcttcagacatatatatctgggactaactgtgatactgggcacagtgtcaattctcctaagcattgcagtacttttcattttaaagaaaaattatgtttcaaaacacagaagttttataaccaagagagaaagaacaatggtgtctacaagattccaaaaggaaaattacactacaagtgatcatctgctacaacccaactactggccaggcaaggaaactcaactttagaaacatgatgactggaagtcatgtcttctaattggttgacattttgcaaacaaataaattgtaatcaaaagagctctaaatttgtaatttctttctcctttcaaaaaatgtctactttgttttggtcctaggcattaggtaatataactgataatatactgaaacatataatggaagatgcagatgataaaactaattttgaactttttaatttatataaattattttatatcacttacttatttcactttattttgctttgtgctcattgatatatattagctgtactcctagaagaacaattgtctctattgtcacacatggttatatttaaagtaatttctgaactgtgtaatgtgtctagagtaagcaaatactgctaacaattaactcataccttgggttccttcaagtattactcctatagtattttctcccatagctgtcttcatctgtgtattttaataatgatcttaggatggagcagaacatggagaggaagatttcattttaagctcctccttttctttgaaatacaataatttatatagaaatgtgtagcagcaaattatattggggattagaattttgaattaatagctctcctactattaatttacatgtgctttttgtgtggcgctataagtgactatggttgtaaagtaataaaattgatgttaacatgcccaattattgttcttttatgaatccaatgaatttaaaactattgttaaatataatactgccccactttaatatatgtaagcaacttcctacttatacacgacgtgttcctaaaacatgtttgaaaggtgaatttctgaaagtctacaataaatgtaggtgttacaacagga

SEQ ID NO: 63015 - DNA, 3079 bp, Homo sapiens
  misc_feature (31)..(31): n is a, c, g, or t
  misc_feature (36)..(36): n is a, c, g, or t
  misc_feature (2422)..(2422): n is a, c, g, or t
  misc_feature (2519)..(2519): n is a, c, g, or t
  misc_feature (2522)..(2522): n is a, c, g, or t
  misc_feature (2569)..(2569): n is a, c, g, or t
  misc_feature (2574)..(2574): n is a, c, g, or t
  misc_feature (2662)..(2662): n is a, c, g, or t
  misc_feature (3076)..(3079): n is a, c, g, or t
cagacactggcaagccgcagaagcccagttngccgnccatgaagcagcggttctcggcgctgcagctgctgaagctgctgctgctgctgcagccgccgctgccacgagcgctgcgcgaggcgctctgccctgagccctgcaactgcgtgcccgacggcgccctgcgctgccccggccccacggccggtctcactcgactatcacttgcctacctccctgtcaaagtgatcccatctcaagctttcagaggacttaatgaggtcataaaaattgaaatctctcagattgattccctggaaaggatagaagctaatgcctttgacaacctcctcaatttgtctgaaatactgatccagaacaccaaaaatctgagatacattgagcccggagcatttataaatcttccccgattaaaatacttgagcatctgtaacacaggcatcagaaagtttccagatgttacgaaggtcttctcctctgaatcaaatttcattctggaaatttgtgataacttacacataaccaccataccaggaaatgcttttcaagggatgaataatgaatctgtaacactcaaactatatggaaatggatttgaagaagtacaaagtcatgcattcaatgggacgacactgacttcactggagctaaaggaaaacgtacatctggagaagatgcacaatggagccttccgtggggccacagggccgaaaaccttggatatttcttccaccaaattgcaggccctgccgagctatggcctagagtccattcagaggctaattgccacgtcatcctattctctaaaaaaattgccatcaagagaaacatttgtcaatctcctggaggccacgttgacttaccccagccactgctgtgcttttagaaacttgccaacaaaagaacagaatttttcacattccatttctgaaaacttttccaaacaatgtgaaagcacagtaaggaaagtgagtaacaaaacactttattcttccatgcttgctgagagtgaactgagtggctgggactatgaatatggtttctgcttacccaagacaccccgatgtgctcctgaaccagatgcttttaatccctgtgaagacattatgggctatgacttccttagggtcctgatttggctgattaatattctagccatcatgggaaacatgactgttctttttgttctcctgacaagtcgttacaaacttacagtgcctcgttttctcatgtgcaatctctcctttgcagacttttgcatggggctctatctgctgctcatagcctcagttgattcccaaaccaagggccagtactataaccatgccatagactggcagacagggagtgggtgcagcactgctggctttttcactgtattcgcaagtgaactttctgtctacaccctcaccgtcatcactctagaaagatggcacaccatcacctatgctattcacctggaccaaaagctgcgattaagacatgccattctgattatgcttggaggatggctcttttcttctctaattgctatgttgccccttgtcggtgtcagcaattacatgaaggtcagtatttgcttccccatggatgtggaaaccactctctcacaagtctatatattaaccatcctgattctcaatgtggtggccttcttcataatttgtgcttgctacattaaaatttattttgcagttcgaaacccagaattaatggctaccaataaagatacaaagattgctaagaaaatggcaatcctcatcttcaccgatttcacctgcatggcacctatctctttttttgccatctcagctgccttcaaagtacctcttatcacagtaaccaactctaaagttttactggttcttttttatcccatcaattcttgtgccaatccatttctgtatgcaatattcactaagacattccaaagagatttctttcttttgctgagcaaatttggctgctgtaaacgtcgggctgaactttatagaaggaaagatttttcagcttacacctccaactgcaaaaatggcttcactggatcaaataagccttctcaatccaccttgaagttgtccacattgcactgtcaaggtacagctctcctagacaagactcgctacacagagtgttaactgttacatcagtaactgcattattgaattgttcttaaacctgtaaaaaaaaattacctgtaccagtaattttaacataaagggttggatttaggaaattatttatttttaggtacattaggcaagagacctctacctagtagaaagtgtagtctatgaccactgccacacgtaaaaactatttgtcattgttacatggcataaatactgaagttgagagtgtttagaaatttttatagaaattttgacacagtaattttgtttgatgaatcttttaaaaaacngaggaggtattttgcatatcttttttttcattttcgtaatttgtattgcattctataaaaatattagttcataacagatcagaaatttaaaataacnggnctttttcctcaggtagtttgaaaaacacactctagagatgcactgtncaatncggtagcgcactagccacatgtggctaaattaaaattaaataaaatgagaaatgtagtttctcagttgcactacgtttcaagccacgnttcaagttctcaatggctacgtgtgactagtgcttaccatactggacagcacagacacagaatattttcatcaccacagaaagttctatctgttctattatagagacttttatctatgccctatctggattctacttatttataatttaaggtaaacatctgaaagcacatttcagcctatttgcttagtgaaacattaagctgtagactgtaaactcctcgtgagtaggaaccctgtctcagtgcattttgttttcctgcttcctacctcaagatcttggcaatggtacactacaaatgtgctgagttagaattactctgaagttatgaaacatataatgaaaacaattttttctagagcttatatttttatttgaatgaaataaaatgtttaaatatttaaaaataaaaaannnn

SEQ ID NO: 63016 - DNA, 3057 bp, Homo sapiens
  misc_feature (31)..(31): n is a, c, g, or t
  misc_feature (36)..(36): n is a, c, g, or t
  misc_feature (2400)..(2400): n is a, c, g, or t
  misc_feature (2497)..(2497): n is a, c, g, or t
  misc_feature (2500)..(2500): n is a, c, g, or t
  misc_feature (2547)..(2547): n is a, c, g, or t
  misc_feature (2552)..(2552): n is a, c, g, or t
  misc_feature (2640)..(2640): n is a, c, g, or t
  misc_feature (3054)..(3057): n is a, c, g, or t
cagacactggcaagccgcagaagcccagttngccgnccatgaagcagcggttctcggcgctgcagctgctgaagctgctgctgctgctgcagccgccgctgccacgagcgctgcgcgaggcgctctgccctgagccctgcaactgcgtgcccgacggcgccctgcgctgccccggccccacggccggtctcactcgactatcacttgcctacctccctgtcaaagtgatcccatctcaagctttcagaggacttaatgaggtcataaaaattgaaatctctcagattgattccctggaaaggatagaagctaatgcctttgacaacctcctcaatttgtctgaaatactgatccagaacaccaaaaatctgagatacattgagcccggagcatttataaatcttccccgattaaaatacttgagcatctgtaacacaggcatcagaaagtttccagatgttacgaaggtcttctcctctgaatcaaatttcattctggaaatttgtgataacttacacataaccaccataccaggaaatgcttttcaagggatgaataatgaatctgtaacactcaaactatatggaaatggatttgaagaagtacaaagtcatgcattcaatgggacgacactgacttcactggagctaaaggaaaacgtacatctggagaagatgcacaatggagccttccgtggggccacagggccgaaaaccttggatatttcttccaccaaattgcaggccctgccgagctatggcctagagtccattcagaggctaattgccacgtcatcctattctctaaaaaaattgccatcaagagaaacatttgtcaatctcctggaggccacgttgacttaccccagccactgctgtgcttttagaaacttgccaacaaaagaacagaatttttcacattccatttctgaaaacttttccaaacaatgtgaaagcacagtaaggaaagtgagtaacaaaacactagtgaactgagtggctgggactatgaatatggtttctgcttacccaagacaccccgatgtgctcctgaaccagatgcttttaatccctgtgaagacattatgggctatgacttccttagggtcctgatttggctgattaatattctagccatcatgggaaacatgactgttctttttgttctcctgacaagtcgttacaaacttacagtgcctcgttttctcatgtgcaatctctcctttgcagacttttgcatggggctctatctgctgctcatagcctcagttgattcccaaaccaagggccagtactataaccatgccatagactggcagacagggagtgggtgcagcactgctggctttttcactgtattcgcaagtgaactttctgtctacaccctcaccgtcatcactctagaaagatggcacaccatcacctatgctattcacctggaccaaaagctgcgattaagacatgccattctgattatgcttggaggatggctcttttcttctctaattgctatgttgccccttgtcggtgtcagcaattacatgaaggtcagtatttgcttccccatggatgtggaaaccactctctcacaagtctatatattaaccatcctgattctcaatgtggtggccttcttcataatttgtgcttgctacattaaaatttattttgcagttcgaaacccagaattaatggctaccaataaagatacaaagattgctaagaaaatggcaatcctcatcttcaccgatttcacctgcatggcacctatctctttttttgccatctcagctgccttcaaagtacctcttatcacagtaaccaactctaaagttttactggttcttttttatcccatcaattcttgtgccaatccatttctgtatgcaatattcactaagacattccaaagagatttctttcttttgctgagcaaatttggctgctgtaaacgtcgggctgaactttatagaaggaaagatttttcagcttacacctccaactgcaaaaatggcttcactggatcaaataagccttctcaatccaccttgaagttgtccacattgcactgtcaaggtacagctctcctagacaagactcgctacacagagtgttaactgttacatcagtaactgcattattgaattgttcttaaacctgtaaaaaaaaattacctgtaccagtaattttaacataaagggttggatttaggaaattatttatttttaggtacattaggcaagagacctctacctagtagaaagtgtagtctatgaccactgccacacgtaaaaactatttgtcattgttacatggcataaatactgaagttgagagtgtttagaaatttttatagaaattttgacacagtaattttgtttgatgaatcttttaaaaaacngaggaggtattttgcatatcttttttttcattttcgtaatttgtattgcattctataaaaatattagttcataacagatcagaaatttaaaataacnggnctttttcctcaggtagtttgaaaaacacactctagagatgcactgtncaatncggtagcgcactagccacatgtggctaaattaaaattaaataaaatgagaaatgtagtttctcagttgcactacgtttcaagccacgnttcaagttctcaatggctacgtgtgactagtgcttaccatactggacagcacagacacagaatattttcatcaccacagaaagttctatctgttctattatagagacttttatctatgccctatctggattctacttatttataatttaaggtaaacatctgaaagcacatttcagcctatttgcttagtgaaacattaagctgtagactgtaaactcctcgtgagtaggaaccctgtctcagtgcattttgttttcctgcttcctacctcaagatcttggcaatggtacactacaaatgtgctgagttagaattactctgaagttatgaaacatataatgaaaacaattttttctagagcttatatttttatttgaatgaaataaaatgtttaaatatttaaaaataaaaaannnn

SEQ ID NO: 63017 - DNA, 900 bp, Homo sapiens
  misc_feature (31)..(31): n is a, c, g, or t
  misc_feature (36)..(36): n is a, c, g, or t
cagacactggcaagccgcagaagcccagttngccgnccatgaagcagcggttctcggcgctgcagctgctgaagctgctgctgctgctgcagccgccgctgccacgagcgctgcgcgaggcgctctgccctgagccctgcaactgcgtgcccgacggcgccctgcgctgccccggccccacggccggtctcactcgactatcacttgcctacctccctgtcaaagtgatcccatctcaagctttcagaggacttaatgaggtcataaaaattgaaatctctcagattgattccctggaaaggatagaagctaatgcctttgacaacctcctcaatttgtctgaaatactgatccagaacaccaaaaatctgagatacattgagcccggagcatttataaatcttccccgattaaaatacttgagcatctgtaacacaggcatcagaaagtttccagatgttacgaaggtcttctcctctgaatcaaatttcattctggaaatttgtgataacttacacataaccaccataccaggaaatgcttttcaagggatgaataatgaatctgtaacactcaaactatatggaaatggatttgaagaagtacaaagtcatgcattcaatgggacgacactgacttcactggagctaaaggaaaacgtacatctggagaagatgcacaatggagccttccgtggggccacagggccgaaaaccttgtgagtagaatggtgctgcctcccctccctgcccagtgtaccccaacaggactgcttagggtgtccctccacatcatccccaagctgatatgtgagacatcagcctctacacctgaaaaggctgctgttggaaagacaaagtgtatcacagctgccataataaagtaccccaaaccgagagg

SEQ ID NO: 63018 - DNA, 476 bp, Homo sapiens
tgcaaaaccagaggaaaggcttaagtgttaaacatctctggccttggatcccagctatgccactgttttcctttgacattaagcaagctacataaccacactgagggttaggcttcttgtcggtataatggaaatgatgatgaggattaaatcataaaataaacatagagtggctgatgaagtatctagcacttaatagacacttaataaattgatggtggtggtgatgatggagaactagatattatgaatgcctgtaataaccttagtaatatatgttacaggaggaaaaatgtgtttccaaactgtttctttcagtttcttcccattcctaaaccctctcctccctccttcagcaaactatatggaaatggatttgaagaagtacaaagtcatgcattcaatgggacgacactgacttcactgtaagtatttgcttatttccccagctcaggaataaaaatgaaatattactc

SEQ ID NO: 63019 - DNA, 547 bp, Homo sapiens
cctcggcttcccaaagtgttgggattacaatcatgagccactgtgcccggccttataattcttagtaataagaaaataaacaatgaaatgtaagataggcaaaagatttggaaatgtcaccaagaagatatatggatggcaaataagcacatgaaaagatgctcaatgtcgttaatcactaggggaatgcaaattaaaatcatgagatactactaaatacctagaagaatgactaaaaaaaacaagaaatatctgaccattccaagtattggccgggatatggaggaaatagaattattgtgggaatgtaaaatggtatcattttggaaaacagtttaccagtttcttaaaagttaaacatacacctactatccagccacctctaagacttgtacataaatgtttgtagcaactttatttgtaattttatcagttgtgtacttaaataaatgcagtttattgtaaaaatgaaaacaaattagtaaatcacttgcggcccggaagctttattccctttaagtgaggggaaaattttagcttggcactg

SEQ ID NO: 63020 - DNA, 425 bp, Homo sapiens
gtcctctagcccagcaagctttggggagggagtaagcggaactgcaaaagagctcgctcagctgtttctggattggggcgcagagaaagaaatcgcgatcagggaactgagtactggagtccctcaaaataacccgaagggtcaaatagtgagctccaagcaaagcgttgacccggctacccctgagcagcgccctacgctgggttccactccacttcccctcccccgcgcggggcgatagccaggcgcggtcccttcccacgcgggccgcggcgagtgcggacagctcccttccgggctgcggaaggcgggaagtctgcggttcgcgggctccggctggcgggcgcccctcggagtccctgaagtcggccgggccccgcaggacccgcgccttctcggccccaactgtccctcgcgaagcgtcc

SEQ ID NO: 63021 - DNA, 282 bp, Homo sapiens
tcaggcacagtgagagcccagttgcagaattatcattgatacagacaccaaaagtctgcacttcgagcagttcgagatgacaagattgagcgtccttaccatccatgccccaatgcaaagaattggtcattccatttcaggtcaaagtgaacccaggcacagtgtggcccccagagggggaccagcaaacagggctaccctggctgctccaggaggaactcagaaacagcttctctcatcccactgggccaaggttttgccaggtgcctggtgggagaggag

SEQ ID NO: 63022 - DNA, 3551 bp, Homo sapiens
gttgactgtgacacgggtgttacatatcttcctgtgccccttctccctgtagggtgaagctctgggcctcggcttttggtggggagataaaatccattgctgctaagtactccggttcccagcttctgcaaaagaaatacaaagagtatgagaaagacgttgccatagaagaaatcgatggcctccaactggtaaagaagctggcaaagaacatggaagagatgtttcacaagaagtctgaggccgtcaggcgtctggtggaggctgcagaagaagcacacctgaaacatgaatttgatgcagacttacagtatgaatacttcaatgctgtgctgataaatgaaagggacaaagacgggaattttttggagctgggaaaggaattcatcttagccccaaatgaccattttaataatttgcctgtgaacatcagtctaagtgacgtccaagtaccaacgaacatgtacaacaaagaccctgcaattgtcaatggggtttattggtctgaatctctaaacaaagtttttgtagataactttgaccgtgacccatctctcatatggcagtactttggaagtgcaaagggcttttttaggcagtatccggggattaaatgggaaccagatgagaatggagtcattgccttcgactgcaggaaccgaaaatggtacatccaggcagcaacttctccgaaagacgtggtcattttagttgacgtcagtggcagcatgaaaggactccgtctgactatcgcgaagcaaacagtctcatccattttggatacacttggggatgatgacttcttcaacataattgcttataatgaggagcttcactatgtggaaccttgcctgaatggaactttggtgcaagccgacaggacaaacaaagagcacttcagggagcatctggacaaacttttcgccaaaggaattggaatgttggatatagctctgaatgaggccttcaacattctgagtgatttcaaccacacgggacaaggaagtatctgcagtcaggccatcatgctcataactgatggggcggtggacacctatgatacaatctttgcaaaatacaattggccagatcgaaaggttcgcatcttcacatacctcattggacgagaggctgcgtttgcagacaatctaaagtggatggcctgtgccaacaaaggattttttacccaaatctccaccttggctgatgtgcaggagaatgtcatggaataccttcacgtgcttagccggcccaaagtcatcgaccaggagcatgatgtggtgtggaccgaagcttacattgacagcactctccctcaggcacaaaagctgactgatgatcagggccccgtcctgatgaccactgtagccatgcctgtgtttagtaagcagaacgaaaccagatcgaagggcattcttctgggagtggttggcacagatgtcccagtgaaagaacttctgaagaccatccccaaatacaagttagggattcacggttatgcctttgcaatcacaaataatggatatatcctgacgcatccggaactcaggctgctgtacgaagaaggaaaaaagcgaaggaaacctaactatagtagcgttgacctctctgaggtggagtgggaagaccgagatgacgtgttgagaaatgctatggtgaatcgaaagacggggaagttttccatggaggtgaagaagacagtggacaaagggaaacgggttttggtgatgacaaatgactactattatacagacatcaagggtactcctttcagtttaggtgtggcgctttccagaggtcatgggaaatatttcttccgagggaatgtaaccatcgaagaaggcctgcatgacttagaacatcccgatgtgtccttggcagatgaatggtcctactgcaacactgacctacaccctgagcaccgccatctgtctcagttagaagcgattaagctctacctaaaaggcaaagaacctctgctccagtgtgataaagaattgatccaagaagtcctttttgacgcggtggtgagtgcccccattgaagcgtattggaccagcctggccctcaacaaatctgaaaattctgacaagggcgtggaggttgccttcctcggcactcgcacgggcctctccagaatcaacctgtttgtcggggctgagcagctcaccaatcaggacttcctgaaagctggcgacaaggagaacatttttaacgcagaccatttccctctctggtaccgaagagccgctgagcagattccagggagcttcgtctactcgatcccattcagcactggaccagtcaataaaagcaatgtggtgacagcaagtacatccatccagctcctggatgaacggaaatctcctgtggtggcagctgtaggcattcagatgaaacttgaatttttccaaaggaagttctggactgccagcagacagtgtgcttccctggatggcaaatgctccatcagctgtgatgatgagactgtgaattgttacctcatagacaataatggatttattttggtgtctgaagactacacacagactggagacttttttggtgagatcgagggagctgtgatgaacaaattgctaacaatgggctcctttaaaagaattaccctttatgactaccaagccatgtgtagagccaacaaggaaagcagcgatggcgcccatggcctcctggatccttataatgccttcctctctgcagtaaaatggatcatgacagaacttgtcttgttcctggtggaatttaacctctgcagttggtggcactccgatatgacagctaaagcccagaaattgaaacagaccctggagccttgtgatactgaatatccagcattcgtctctgagcgcaccatcaaggagactacagggaatattgcttgtgaagactgctccaagtcctttgtcatccagcaaatcccaagcagcaacctgttcatggtggtggtggacagcagctgcctctgtgaatctgtggcccccatcaccatggcacccattgaaatcaggtataatgaatcccttaagtgtgaacgtctaaaggcccagaagatcagaaggcgcccagaatcttgtcatggcttccatcctgaggagaatgcaagggagtgtgggggtgcgccgagtctccaagcccagacagtcctccttctgctccctctgcttttgatgctcttctcaaggtgacactgactgagatgttctcttggcatgctaaatcatggataaactgtgaaccaaaatatggtgcaacatacgagacatgaatatagtccaaccatcagcatctcatcatgattttaaactgtgcgtgatataaactcttaaagatatgttgacaaaaagttatctatcatctttttactttgccagtcatgcaaatgtgagtttgccacatgataatcacccttcatcagaaatgggaccgcaagtggtaggcagtgtcccttctgcttgaaacctattgaaaccaatttaaaactgtgtactttttaaataaagtatattaaaatcataaaaaaaaaatctccg

SEQ ID NO: 63023 - DNA, 3489 bp, Homo sapiens
gttgactgtgacacgggtgttacatatcttcctgtgccccttctccctgtagggtgaagctctgggcctcggcttttggtggggagataaaatccattgctgctaagtactccggttcccagcttctgcaaaagaaatacaaagagtatgagaaagacgttgccatagaagaaatcgatggcctccaactggtaaagaagctggcaaagaacatggaagagatgtttcacaagaagtctgaggccgtcaggcgtctggtggaggctgcagaagaagcacacctgaaacatgaatttgatgcagacttacagtatgaatacttcaatgctgtgctgataaatgaaagggacaaagacgggaattttttggagctgggaaaggaattcatcttagccccaaatgaccattttaataatttgcctgtgaacatcagtctaagtgacgtccaagtaccaacgaacatgtacaacaaagaccctgcaattgtcaatggggtttattggtctgaatctctaaacaaagtttttgtagataactttgaccgtgacccatctctcatatggcagtactttggaagtgcaaagggcttttttaggcagtatccggggattaaatgggaaccagatgagaatggagtcattgccttcgactgcaggaaccgaaaatggtacatccaggcagcaacttctccgaaagacgtggtcattttagttgacgtcagtggcagcatgaaaggactccgtctgactatcgcgaagcaaacagtctcatccattttggatacacttggggatgatgacttcttcaacataattgcttataatgaggagcttcactatgtggaaccttgcctgaatggaactttggtgcaagccgacaggacaaacaaagagcacttcagggagcatctggacaaacttttcgccaaaggaattggaatgttggatatagctctgaatgaggccttcaacattctgagtgatttcaaccacacgggacaaggaagtatctgcagtcaggccatcatgctcataactgatggggcggtggacacctatgatacaatctttgcaaaatacaattggccagatcgaaaggttcgcatcttcacatacctcattggacgagaggctgcgtttgcagacaatctaaagtggatggcctgtgccaacaaaggattttttacccaaatctccaccttggctgatgtgcaggagaatgtcatggaataccttcacgtgcttagccggcccaaagtcatcgaccaggagcatgatgtggtgtggaccgaagcttacattgacagcactctccctcaggcacaaaagctgactgatgatcagggccccgtcctgatgaccactgtagccatgcctgtgtttagtaagcagaacgaaaccagatcgaagggcattcttctgggagtggttggcacagatgtcccagtgaaagaacttctgaagaccatccccaaatacaagttagggattcacggttatgcctttgcaatcacaaataatggatatatcctgacgcatccggaactcaggctgctgtacgaagaaggaaaaaagcgaaggaaacctaactatagtagcgttgacctctctgaggtggagtgggaagaccgagatgacgtgttgagaaatgctatggtgaatcgaaagacggggaagttttccatggaggtgaagaagacagtggacaaagggtttaggtgtggcgctttccagaggtcatgggaaatatttcttccgagggaatgtaaccatcgaagaaggcctgcatgacttagaacatcccgatgtgtccttggcagatgaatggtcctactgcaacactgacctacaccctgagcaccgccatctgtctcagttagaagcgattaagctctacctaaaaggcaaagaacctctgctccagtgtgataaagaattgatccaagaagtcctttttgacgcggtggtgagtgcccccattgaagcgtattggaccagcctggccctcaacaaatctgaaaattctgacaagggcgtggaggttgccttcctcggcactcgcacgggcctctccagaatcaacctgtttgtcggggctgagcagctcaccaatcaggacttcctgaaagctggcgacaaggagaacatttttaacgcagaccatttccctctctggtaccgaagagccgctgagcagattccagggagcttcgtctactcgatcccattcagcactggaccagtcaataaaagcaatgtggtgacagcaagtacatccatccagctcctggatgaacggaaatctcctgtggtggcagctgtaggcattcagatgaaacttgaatttttccaaaggaagttctggactgccagcagacagtgtgcttccctggatggcaaatgctccatcagctgtgatgatgagactgtgaattgttacctcatagacaataatggatttattttggtgtctgaagactacacacagactggagacttttttggtgagatcgagggagctgtgatgaacaaattgctaacaatgggctcctttaaaagaattaccctttatgactaccaagccatgtgtagagccaacaaggaaagcagcgatggcgcccatggcctcctggatccttataatgccttcctctctgcagtaaaatggatcatgacagaacttgtcttgttcctggtggaatttaacctctgcagttggtggcactccgatatgacagctaaagcccagaaattgaaacagaccctggagccttgtgatactgaatatccagcattcgtctctgagcgcaccatcaaggagactacagggaatattgcttgtgaagactgctccaagtcctttgtcatccagcaaatcccaagcagcaacctgttcatggtggtggtggacagcagctgcctctgtgaatctgtggcccccatcaccatggcacccattgaaatcaggtataatgaatcccttaagtgtgaacgtctaaaggcccagaagatcagaaggcgcccagaatcttgtcatggcttccatcctgaggagaatgcaagggagtgtgggggtgcgccgagtctccaagcccagacagtcctccttctgctccctctgcttttgatgctcttctcaaggtgacactgactgagatgttctcttggcatgctaaatcatggataaactgtgaaccaaaatatggtgcaacatacgagacatgaatatagtccaaccatcagcatctcatcatgattttaaactgtgcgtgatataaactcttaaagatatgttgacaaaaagttatctatcatctttttactttgccagtcatgcaaatgtgagtttgccacatgataatcacccttcatcagaaatgggaccgcaagtggtaggcagtgtcccttctgcttgaaacctattgaaaccaatttaaaactgtgtactttttaaataaagtatattaaaatcataaaaaaaaaatctccg

SEQ ID NO: 63024 - DNA, 582 bp, Homo sapiens
tgcaccatcatctaggtcccagaagacttcgttcttacgttagagagggggagagaggtctggggaaagttgaaggtgtcctggagtctatttccgtctaaccaacccctgcctttccccataggagaatgcaagggagtgtgggggtgcgccgagtctccaagcccagacagtcctccttctgctccctctgcttttgatgctcttctcaaggtgacactgactgagatgttctcttactgactgagatgttctcttggcatgctaaatcatggataaactgtgaaccaaaatatggtgcaacatacgagacatgaatatagtccaaccatcagcatctcatcatgattttaaactgtgcgtgatataaactcttaaagatatgttgacaaaaagttatctatcatctttttactttgccagtcatgcaaatgtgagtttgccacatgataatcacccttcatcagaaatgggaccgcaagtggtaggcagtgtcccttctgcttgaaacctattgaaaccaatttaaaactgtgtactttttaaataaagtatattaaaatcataaaaaaaaaatctccg

SEQ ID NO: 63025 - DNA, 535 bp, Homo sapiens
  misc_feature (157)..(159): n is a, c, g, or t
gttcttctggaggttgtaaatgacttgtgaacttaccttggaaatccagtgtcttcatggaccataaatccatcctggccagagctctcaggcatggctaggaacagccagctgctagcagcttctctggctagctcaggcagggaaccctcattcnnngtctcctcgcaagcccagccatataatcgaatccttattacaaatggacgatccccttagttctggccaaggctgccagattagcacgtacgaagaaggaaaaaagcgaaggaaacctaactatagtagcgttgacctctctgaggtggagtgggaagaccgagatgacgtgttgagaaatgctatggtgaatcgaaagacggggaagttttccatggaggtgaagaagacagtggacaaaggggtacatttttctcaaacatttttgctgcttaatttaaaacaaaccactgtgaaaaattagctttgaaagctatatctggaataatcgtgagcggcagactaatataaaaaatggaagaaaattaaagagtgg

SEQ ID NO: 63026 - DNA, 434 bp, Homo sapiens
  misc_feature (157)..(159): n is a, c, g, or t
gttcttctggaggttgtaaatgacttgtgaacttaccttggaaatccagtgtcttcatggaccataaatccatcctggccagagctctcaggcatggctaggaacagccagctgctagcagcttctctggctagctcaggcagggaaccctcattcnnngtctcctcgcaagcccagccatataatcgaatccttattacaaatggacgatccccttagttctggccaaggctgccagattagcacggtgagtgtgagtgtggggttgtggccagcatggggaggacacagcaagctgacttaaaataactcctattccctctccatctgccatggactttgtttcggcccctacagccagaggaaagaggtgggtttctctgaagcacaataccaatatttttctaatttgtcctataaaatctttcccctga

SEQ ID NO: 63027 - DNA, 402 bp, Homo sapiens
ttttcaccagagttcaactgattttcttcctaaactgtaactgaagctaaaccatgaatattgaagcacttcagggagcatctggacaaacttttcgccaaaggaattggaatgttggatatagctctgaatgaggccttcaacattctgagtgatttcaaccacacgggacaaggaagtatctgcagtcaggccatcatgctcataactgatggggcggtggacacctatgatacaatctttgcaaaatacaattggccagatcgaaaggtccatccatgttgtaaatggtaggatttccttctttccaaggctgggtaccaaagacattttttgctgtgaagtcacctcctctcccaacttgtcctttaaaatatatgtatagaaagaaaggccttaaaa

SEQ ID NO: 63028 - DNA, 3545 bp, Homo sapiens
gttgactgtgacacgggtgttacatatcttcctgtgccccttctccctgtagggtgaagctctgggcctcggcttttggtggggagataaaatccattgctgctaagtactccggttcccagcttctgcaaaagaaatacaaagagtatgagaaagacgttgccatagaagaaatcgatggcctccaactggtaaagaagctggcaaagaacatggaagagatgtttcacaagaagtctgaggccgtcaggcgtctggtggaggctgcagaagaagcacacctgaaacatgaatttgatgcagacttacagtatgaatacttcaatgctgtgctgataaatgaaagggacaaagacgggaattttttggagctgggaaaggaattcatcttagccccaaatgaccattttaataatttgcctgtgaacatcagtctaagtgacgtccaagtaccaacgaacatgtacaacaaagaccctgcaattgtcaatggggtttattggtctgaatctctaaacaaagtttttgtagataactttgaccgtgacccatctctcatatggcagtactttggaagtgcaaagggcttttttaggcagtatccggggattaaatgggaaccagatgagaatggagtcattgccttcgactgcaggaaccgaaaatggtacatccaggcagcaacttctccgaaagacgtggtcattttagttgacgtcagtggcagcatgaaaggactccgtctgactatcgcgaagcaaacagtctcatccattttggatacacttggggatgatgacttcttcaacataattgcttataatgaggagcttcactatgtggaaccttgcctgaatggaactttggtgcaagccgacaggacaaacaaagagcacttcagggagcatctggacaaacttttcgccaaaggaattggaatgttggatatagctctgaatgaggccttcaacattctgagtgatttcaaccacacgggacaaggaagtatctgcagtcaggccatcatgctcataactgatggggcggtggacacctatgatacaatctttgcaaaatacaattggccagatcgaaaggttcgcatcttcacatacctcattggacgagaggctgcgtttgcagacaatctaaagtggatggcctgtgccaacaaaggattttttacccaaatctccaccttggctgatgtgcaggagaatgtcatggaataccttcacgtgcttagccggcccaaagtcatcgaccaggagcatgatgtggtgtggaccgaagcttacattgacagcactctccctcaggcacaaaagagatcgaagggcattcttctgggagtggttggcacagatgtcccagtgaaagaacttctgaagaccatccccaaatacaagttagggattcacggttatgcctttgcaatcacaaataatggatatatcctgacgcatccggaactcaggctgctgtacgaagaaggaaaaaagcgaaggaaacctaactatagtagcgttgacctctctgaggtggagtgggaagaccgagatgacgtgttgagaaatgctatggtgaatcgaaagacggggaagttttccatggaggtgaagaagacagtggacaaagggaaacgggttttggtgatgacaaatgactactattatacagacatcaagggtactcctttcagtttaggtgtggcgctttccagaggtcatgggaaatatttcttccgagggaatgtaaccatcgaagaaggcctgcatgacttagaacatcccgatgtgtccttggcagatgaatggtcctactgcaacactgacctacaccctgagcaccgccatctgtctcagttagaagcgattaagctctacctaaaaggcaaagaacctctgctccagtgtgataaagaattgatccaagaagtcctttttgacgcggtggtgagtgcccccattgaagcgtattggaccagcctggccctcaacaaatctgaaaattctgacaagggcgtggaggttgccttcctcggcactcgcacgggcctctccagaatcaacctgtttgtcggggctgagcagctcaccaatcaggacttcctgaaagctggcgacaaggagaacatttttaacgcagaccatttccctctctggtaccgaagagccgctgagcagattccagggagcttcgtctactcgatcccattcagcactggaccagtcaataaaagcaatgtggtgacagcaagtacatccatccagctcctggatgaacggaaatctcctgtggtggcagctgtaggcattcagatgaaacttgaatttttccaaaggaagttctggactgccagcagacagtgtgcttccctggatggcaaatgctccatcagctgtgatgatgagactgtgaattgttacctcatagacaataatggatttattttggtgtctgaagactacacacagactggagacttttttggtgagatcgagggagctgtgatgaacaaattgctaacaatgggctcctttaaaagaattaccctttatgactaccaagccatgtgtagagccaacaaggaaagcagcgatggcgcccatggcctcctggatccttataatgccttcctctctgcagtaaaatggatcatgacagaacttgtcttgttcctggtggaatttaacctctgcagttggtggcactccgatatgacagctaaagcccagaaattgaaacagaccctggagccttgtgatactgaatatccagcattcgtctctgagcgcaccatcaaggagactacagggaatattgcttgtgaagactgctccaagtcctttgtcatccagcaaatcccaagcagcaacctgttcatggtggtggtggacagcagctgcctctgtgaatctgtggcccccatcaccatggcacccattgaaatcaggtagtagaaaaaagcaatccttggaaacatgccttaactacagtcaacataatgaatcccttaagtgtgaacgtctaaaggcccagaagatcagaaggcgcccagaatcttgtcatggcttccatcctgaggagaatgcaagggagtgtgggggtgcgccgagtctccaagcccagacagtcctccttctgctccctctgcttttgatgctcttctcaaggtgacactgactgagatgttctcttactgactgagatgttctcttggcatgctaaatcatggataaactgtgaaccaaaatatggtgcaacatacgagacatgaatatagtccaaccatcagcatctcatcatgattttaaactgtgcgtgatataaactcttaaagatatgttgacaaaaagttatctatcatctttttactttgccagtcatgcaaatgtgagtttgccacatgataatcacccttcatcagaaatgggaccgcaagtggtaggcagtgtcccttctgcttgaaacctattgaaaccaatttaaaactgtgtactttttaaataaagtatattaaaatcataaaaaaaaaatctccg

SEQ ID NO: 63029 - DNA, 490 bp, Homo sapiens
atccctcagactcttatgcctaccatcctgaggagaatgcaagggagtgtgggggtgcgccgagtctccaagcccagacagtcctccttctgctccctctgcttttgatgctcttctcaaggtgacactgactgagatgttctcttactgactgagatgttctcttggcatgctaaatcatggataaactgtgaaccaaaatatggtgcaacatacgagacatgaatatagtccaaccatcagcatctcatcatgattttaaactgtgcgtgatataaactcttaaagatatgttgacaaaaagttatctatcatctttttactttgccagtcatgcaaatgtgagtttgccacatgataatcacccttcatcagaaatgggaccgcaagtggtaggcagtgtcccttctgcttgaaacctattgaaaccaatttaaaactgtgtactttttaaataaagtatattaaaatcataaaaaaaaaatctccg

SEQ ID NO: 63030 - DNA, 486 bp, Homo sapiens
acagaagcggcctgatcgaagggcagtcaatctacctgtcagatggcgggtagtggaagagaccgtctgacaggaacttccccgtaacgtccctctgcttttgatgctcttctcaaggtgacactgactgagatgttctcttactgactgagatgttctcttggcatgctaaatcatggataaactgtgaaccaaaatatggtgcaacatacgagacatgaatatagtccaaccatcagcatctcatcatgattttaaactgtgcgtgatataaactcttaaagatatgttgacaaaaagttatctatcatctttttactttgccagtcatgcaaatgtgagtttgccacatgataatcacccttcatcagaaatgggaccgcaagtggtaggcagtgtcccttctgcttgaaacctattgaaaccaatttaaaactgtgtactttttaaataaagtatattaaaatcataaaaaaaaaatctccg

SEQ ID NO: 63031 - DNA, 1772 bp, Homo sapiens
gttgactgtgacacgggtgttacatatcttcctgtgccccttctccctgtagggtgaagctctgggcctcggcttttggtggggagataaaatccattgctgctaagtactccggttcccagcttctgcaaaagaaatacaaagagtatgagaaagacgttgccatagaagaaatcgatggcctccaactggtaaagaagctggcaaagaacatggaagagatgtttcacaagaagtctgaggccgtcaggcgtctggtggaggctgcagaagaagcacacctgaaacatgaatttgatgcagacttacagtatgaatacttcaatgctgtgctgataaatgaaagggacaaagacgggaattttttggagctgggaaaggaattcatcttagccccaaatgaccattttaataatttgcctgtgaacatcagtctaagtgacgtccaagtaccaacgaacatgtacaacaaagaccctgcaattgtcaatggggtttattggtctgaatctctaaacaaagtttttgtagataactttgaccgtgacccatctctcatatggcagtactttggaagtgcaaagggcttttttaggcagtatccggggattaaatgggaaccagatgagaatggagtcattgccttcgactgcaggaaccgaaaatggtacatccaggcagcaacttctccgaaagacgtggtcattttagttgacgtcagtggcagcatgaaaggactccgtctgactatcgcgaagcaaacagtctcatccattttggatacacttggggatgatgacttcttcaacataattgcttataatgaggagcttcactatgtggaaccttgcctgaatggaactttggtgcaagccgacaggacaaacaaagagcacttcagggagcatctggacaaacttttcgccaaaggaattggaatgttggatatagctctgaatgaggccttcaacattctgagtgatttcaaccacacgggacaaggaagtatctgcagtcaggccatcatgctcataactgatggggcggtggacacctatgatacaatctttgcaaaatacaattggccagatcgaaaggttcgcatcttcacatacctcattggacgagaggctgcgtttgcagacaatctaaagtggatggcctgtgccaacaaaggattttttacccaaatctccaccttggctgatgtgcaggagaatgtcatggaataccttcacgtgcttagccggcccaaagtcatcgaccaggagcatgatgtggtgtggaccgaagcttacattgacagcactctccctcaggcacaaaagagatcgaagggcattcttctgggagtggttggcacagatgtcccagtgaaagaacttctgaagaccatccccaaatacaagttagggattcacggttatgcctttgcaatcacaaataatggatatatcctgacgcatccggaactcaggctgctgtacgaagaaggaaaaaagcgaaggaaacctaactatagtagcgttgacctctctgaggtggagtgggaagaccgagatgacgtgttgagaaatgctatggtgaatcgaaagacggggaagttttccatggaggtgaagaagacagtggacaaaggggtacatttttctcaaacatttttgctgcttaatttaaaacaaaccactgtgaaaaattagctttgaaagctatatctggaataatcgtgagcggcagactaatataaaaaatggaagaaaattaaagagtgg

SEQ ID NO: 63032 - DNA, 617 bp, Homo sapiens
cacacacacacacaccccccattcaaggaggggacagattttcctttgcatctggtgttttggaaaccaagaagtctacaaggtaaattcatatcaagcaaagagttaacttttctactcccaacttggagccaatgtttagaggcatctgaccttggctttcctgtcattaaaagtccctaggactgtcaccctgctgggcttctcaccctcatcggtccactcccaagccctgtccatgaaacaggacttgggaaggtaaagattgccctggctgatgacttcacggacttttgtttttcttttctttttcttcttccccttgctagtacgaagaaggaaaaaagcgaaggaaacctaactatagtagcgttgacctctctgaggtggagtgggaagaccgagatgacgtgttgagaaatgctatggtgaatcgaaagacggggaagttttccatggaggtgaagaagacagtggacaaaggggtacatttttctcaaacatttttgctgcttaatttaaaacaaaccactgtgaaaaattagctttgaaagctatatctggaataatcgtgagcggcagactaatataaaaaatggaagaaaattaaagagtgg

SEQ ID NO: 63033 - DNA, 1769 bp, Homo sapiens
gttgactgtgacacgggtgttacatatcttcctgtgccccttctccctgtagggtgaagctctgggcctcggcttttggtggggagataaaatccattgctgctaagtactccggttcccagcttctgcaaaagaaatacaaagagtatgagaaagacgttgccatagaagaaatcgatggcctccaactggtaaagaagctggcaaagaacatggaagagatgtttcacaagaagtctgaggccgtcaggcgtctggtggaggctgcagaagaagcacacctgaaacatgaatttgatgcagacttacagtatgaatacttcaatgctgtgctgataaatgaaagggacaaagacgggaattttttggagctgggaaaggaattcatcttagccccaaatgaccattttaataatttgcctgtgaacatcagtctaagtgacgtccaagtaccaacgaacatgtacaacaaagaccctgcaattgtcaatggggtttattggtctgaatctctaaacaaagtttttgtagataactttgaccgtgacccatctctcatatggcagtactttggaagtgcaaagggcttttttaggcagtatccggggattaaatgggaaccagatgagaatggagtcattgccttcgactgcaggaaccgaaaatggtacatccaggcagcaacttctccgaaagacgtggtcattttagttgacgtcagtggcagcatgaaaggactccgtctgactatcgcgaagcaaacagtctcatccattttggatacacttggggatgatgacttcttcaacataattgcttataatgaggagcttcactatgtggaaccttgcctgaatggaactttggtgcaagccgacaggacaaacaaagagcacttcagggagcatctggacaaacttttcgccaaaggaattggaatgttggatatagctctgaatgaggccttcaacattctgagtgatttcaaccacacgggacaaggaagtatctgcagtcaggccatcatgctcataactgatggggcggtggacacctatgatacaatctttgcaaaatacaattggccagatcgaaaggttcgcatcttcacatacctcattggacgagaggctgcgtttgcagacaatctaaagtggatggcctgtgccaacaaaggattttttacccaaatctccaccttggctgatgtgcaggagaatgtcatggaataccttcacgtgcttagccggcccaaagtcatcgaccaggagcatgatgtggtgtggaccgaagcttacattgacagcactctccctcaggcacaaaagctgactgatgatcagggccccgtcctgatgaccactgtagccatgcctgtgtttagtaagcagaacgaaaccagatcgaagggcattcttctgggagtggttggcacagatgtcccagtgaaagaacttctgaagaccatccccaaatacaagtacgaagaaggaaaaaagcgaaggaaacctaactatagtagcgttgacctctctgaggtggagtgggaagaccgagatgacgtgttgagaaatgctatggtgaatcgaaagacggggaagttttccatggaggtgaagaagacagtggacaaaggggtacatttttctcaaacatttttgctgcttaatttaaaacaaaccactgtgaaaaattagctttgaaagctatatctggaataatcgtgagcggcagactaatataaaaaatggaagaaaattaaagagtgg

SEQ ID NO: 63034 - DNA, 3499 bp, Homo sapiens
gttgactgtgacacgggtgttacatatcttcctgtgccccttctccctgtagggtgaagctctgggcctcggcttttggtggggagataaaatccattgctgctaagtactccggttcccagcttctgcaaaagaaatacaaagagtatgagaaagacgttgccatagaagaaatcgatggcctccaactggtaaagaagctggcaaagaacatggaagagatgtttcacaagaagtctgaggccgtcaggcgtctggtggaggctgcagaagaagcacacctgaaacatgaatttgatgcagacttacagtatgaatacttcaatgctgtgctgataaatgaaagggacaaagacgggaattttttggagctgggaaaggaattcatcttagccccaaatgaccattttaataatttgcctgtgaacatcagtctaagtgacgtccaagtaccaacgaacatgtacaacaaagaccctgcaattgtcaatggggtttattggtctgaatctctaaacaaagtttttgtagataactttgaccgtgacccatctctcatatggcagtactttggaagtgcaaagggcttttttaggcagtatccggggattaaatgggaaccagatgagaatggagtcattgccttcgactgcaggaaccgaaaatggtacatccaggcagcaacttctccgaaagacgtggtcattttagttgacgtcagtggcagcatgaaaggactccgtctgactatcgcgaagcaaacagtctcatccattttggatacacttggggatgatgacttcttcaacataattgcttataatgaggagcttcactatgtggaaccttgcctgaatggaactttggtgcaagccgacaggacaaacaaagagcacttcagggagcatctggacaaacttttcgccaaaggaattggaatgttggatatagctctgaatgaggccttcaacattctgagtgatttcaaccacacgggacaaggaagtatctgcagtcaggccatcatgctcataactgatggggcggtggacacctatgatacaatctttgcaaaatacaattggccagatcgaaaggttcgcatcttcacatacctcattggacgagaggctgcgtttgcagacaatctaaagtggatggcctgtgccaacaaaggattttttacccaaatctccaccttggctgatgtgcaggagaatgtcatggaataccttcacgtgcttagccggcccaaagtcatcgaccaggagcatgatgtggtgtggaccgaagcttacattgacagcactctccctcaggcacaaaagagatcgaagggcattcttctgggagtggttggcacagatgtcccagtgaaagaacttctgaagaccatccccaaatacaagttagggattcacggttatgcctttgcaatcacaaataatggatatatcctgacgcatccggaactcaggctgctgtacgaagaaggaaaaaagcgaaggaaacctaactatagtagcgttgacctctctgaggtggagtgggaagaccgagatgacgtgttgagaaatgctatggtgaatcgaaagacggggaagttttccatggaggtgaagaagacagtggacaaagggaaacgggttttggtgatgacaaatgactactattatacagacatcaagggtactcctttcagtttaggtgtggcgctttccagaggtcatgggaaatatttcttccgagggaatgtaaccatcgaagaaggcctgcatgacttagaacatcccgatgtgtccttggcagatgaatggtcctactgcaacactgacctacaccctgagcaccgccatctgtctcagttagaagcgattaagctctacctaaaaggcaaagaacctctgctccagtgtgataaagaattgatccaagaagtcctttttgacgcggtggtgagtgcccccattgaagcgtattggaccagcctggccctcaacaaatctgaaaattctgacaagggcgtggaggttgccttcctcggcactcgcacgggcctctccagaatcaacctgtttgtcggggctgagcagctcaccaatcaggacttcctgaaagctggcgacaaggagaacatttttaacgcagaccatttccctctctggtaccgaagagccgctgagcagattccagggagcttcgtctactcgatcccattcagcactggaccagtcaataaaagcaatgtggtgacagcaagtacatccatccagctcctggatgaacggaaatctcctgtggtggcagctgtaggcattcagatgaaacttgaatttttccaaaggaagttctggactgccagcagacagtgtgcttccctggatggcaaatgctccatcagctgtgatgatgagactgtgaattgttacctcatagacaataatggatttattttggtgtctgaagactacacacagactggagacttttttggtgagatcgagggagctgtgatgaacaaattgctaacaatgggctcctttaaaagaattaccctttatgactaccaagccatgtgtagagccaacaaggaaagcagcgatggcgcccatggcctcctggatccttataatgccttcctctctgcagtaaaatggatcatgacagaacttgtcttgttcctggtggaatttaacctctgcagttggtggcactccgatatgacagctaaagcccagaaattgaaacagaccctggagccttgtgatactgaatatccagcattcgtctctgagcgcaccatcaaggagactacagggaatattgcttgtgaagactgctccaagtcctttgtcatccagcaaatcccaagcagcaacctgttcatggtggtggtggacagcagctgcctctgtgaatctgtggcccccatcaccatggcacccattgaaatcaggtataatgaatcccttaagtgtgaacgtctaaaggcccagaagatcagaaggcgcccagaatcttgtcatggcttccatcctgaggagaatgcaagggagtgtgggggtgcgccgagtctccaagcccagacagtcctccttctgctccctctgcttttgatgctcttctcaaggtgacactgactgagatgttctcttactgactgagatgttctcttggcatgctaaatcatggataaactgtgaaccaaaatatggtgcaacatacgagacatgaatatagtccaaccatcagcatctcatcatgattttaaactgtgcgtgatataaactcttaaagatatgttgacaaaaagttatctatcatctttttactttgccagtcatgcaaatgtgagtttgccacatgataatcacccttcatcagaaatgggaccgcaagtggtaggcagtgtcccttctgcttgaaacctattgaaaccaatttaaaactgtgtactttttaaataaagtatattaaaatcataaaaaaaaaatctccg

SEQ ID NO: 63035 - DNA, 2736 bp, Homo sapiens
gttgactgtgacacgggtgttacatatcttcctgtgccccttctccctgtagggtgaagctctgggcctcggcttttggtggggagataaaatccattgctgctaagtactccggttcccagcttctgcaaaagaaatacaaagagtatgagaaagacgttgccatagaagaaatcgatggcctccaactggtaaagaagctggcaaagaacatggaagagatgtttcacaagaagtctgaggccgtcaggcgtctggtggaggctgcagaagaagcacacctgaaacatgaatttgatgcagacttacagtatgaatacttcaatgctgtgctgataaatgaaagggacaaagacgggaattttttggagctgggaaaggaattcatcttagccccaaatgaccattttaataatttgcctgtgaacatcagtctaagtgacgtccaagtaccaacgaacatgtacaacaaagaccctgcaattgtcaatggggtttattggtctgaatctctaaacaaagtttttgtagataactttgaccgtgacccatctctcatatggcagtactttggaagtgcaaagggcttttttaggcagtatccggggattaaatgggaaccagatgagaatggagtcattgccttcgactgcaggaaccgaaaatggtacatccaggcagcaacttctccgaaagacgtggtcattttagttgacgtcagtggcagcatgaaaggactccgtctgactatcgcgaagcaaacagtctcatccattttggatacacttggggatgatgacttcttcaacataattgcttataatgaggagcttcactatgtggaaccttgcctgaatggaactttggtgcaagccgacaggacaaacaaagagcacttcagggagcatctggacaaacttttcgccaaaggaattggaatgttggatatagctctgaatgaggccttcaacattctgagtgatttcaaccacacgggacaaggaagtatctgcagtcaggccatcatgctcataactgatggggcggtggacacctatgatacaatctttgcaaaatacaattggccagatcgaaaggttcgcatcttcacatacctcattggacgagaggctgcgtttgcagacaatctaaagtggatggcctgtgccaacaaaggattttttacccaaatctccaccttggctgatgtgcaggagaatgtcatggaataccttcacgtgcttagccggcccaaagtcatcgaccaggagcatgatgtggtgtggaccgaagcttacattgacagcactctccctcaggcacaaaagagatcgaagggcattcttctgggagtggttggcacagatgtcccagtgaaagaacttctgaagaccatccccaaatacaagttagggattcacggttatgcctttgcaatcacaaataatggatatatcctgacgcatccggaactcaggctgctgtacgaagaaggaaaaaagcgaaggaaacctaactatagtagcgttgacctctctgaggtggagtgggaagaccgagatgacgtgttgagaaatgctatggtgaatcgaaagacggggaagttttccatggaggtgaagaagacagtggacaaagggaaacgggttttggtgatgacaaatgactactattatacagacatcaagggtactcctttcagtttaggtgtggcgctttccagaggtcatgggaaatatttcttccgagggaatgtaaccatcgaagaaggcctgcatgacttagaacatcccgatgtgtccttggcagatgaatggtcctactgcaacactgacctacaccctgagcaccgccatctgtctcagttagaagcgattaagctctacctaaaaggcaaagaacctctgctccagtgtgataaagaattgatccaagaagtcctttttgacgcggtggtgagtgcccccattgaagcgtattggaccagcctggccctcaacaaatctgaaaattctgacaagggcgtggaggttgccttcctcggcactcgcacgggcctctccagaatcaacctgtttgtcggggctgagcagctcaccaatcaggacttcctgaaagctggcgacaaggagaacatttttaacgcagaccatttccctctctggtaccgaagagccgctgagcagattccagggagcttcgtctactcgatcccattcagcactggaccagtcaataaaagcaatgtggtgacagcaagtacatccatccagctcctggatgaacggaaatctcctgtggtggcagctgtaggcattcagatgaaacttgaatttttccaaaggaagttctggactgccagcagacagtgtgcttccctggatggcaaatgctccatcagctgtgatgatgagactgtgaattgttacctcatagacaataatggatttattttggtgtctgaagactacacacagactggagacttttttggtgagatcgagggagctgtgatgaacaaattgctaacaatgggctcctttaaaagacccaggaccacaactttttcttctacctttctccaagatggcttttaagttcaaggttacctcatgattcaatgtagctgctgagccccagccatcatatctgcaattcaggcttgcaaaagaagagttcagggagttccaaaagctccaaaaggccaagtttcaaattactttttaataaatgctt

SEQ ID NO: 63036 - DNA, 1453 bp, Homo sapiens
gttgactgtgacacgggtgttacatatcttcctgtgccccttctccctgtagggtgaagctctgggcctcggcttttggtggggagataaaatccattgctgctaagtactccggttcccagcttctgcaaaagaaatacaaagagtatgagaaagacgttgccatagaagaaatcgatggcctccaactggtaaagaagctggcaaagaacatggaagagatgtttcacaagaagtctgaggccgtcaggcgtctggtggaggctgcagaagaagcacacctgaaacatgaatttgatgcagacttacagtatgaatacttcaatgctgtgctgataaatgaaagggacaaagacgggaattttttggagctgggaaaggaattcatcttagccccaaatgaccattttaataatttgcctgtgaacatcagtctaagtgacgtccaagtaccaacgaacatgtacaacaaagaccctgcaattgtcaatggggtttattggtctgaatctctaaacaaagtttttgtagataactttgaccgtgacccatctctcatatggcagtactttggaagtgcaaagggcttttttaggcagtatccggggattaaatgggaaccagatgagaatggagtcattgccttcgactgcaggaaccgaaaatggtacatccaggcagcaacttctccgaaagacgtggtcattttagttgacgtcagtggcagcatgaaaggactccgtctgactatcgcgaagcaaacagtctcatccattttggatacacttggggatgatgacttcttcaacataattgcttataatgaggagcttcactatgtggaaccttgcctgaatggaactttggtgcaagccgacaggacaaacaaagagcacttcagggagcatctggacaaacttttcgccaaaggaattggaatgttggatatagctctgaatgaggccttcaacattctgagtgatttcaaccacacgggacaaggaagtatctgcagtcaggccatcatgctcataactgatggggcggtggacacctatgatacaatctttgcaaaatacaattggccagatcgaaaggaaccaaaagcttaggaagactagaaagagtctccatagatctcctggccacaggctgtgtctctcatcccagttaattatcttctaatatcatgccagacaccacagatggttcgcatcttcacatacctcattggacgagaggctgcgtttgcagacaatctaaagtggatggcctgtgccaacaaaggtacatggtccagacagaacagtcacgagatgcagcagccttcatcagcctgggtccctgagtgagcacatggagcagatgactttcactgccccttgcatctgccaacccacactggattataaatagtgttcatgacaaataaacttttatgttaagccactga

SEQ ID NO: 63037 - DNA, 1296 bp, Homo sapiens
tgtttttttttttaacatccaatctttcccagcatatgcacataagaaggtgaatgaagcaatgtgaaacttacttctctttagtcaagtgaaaaaaaggctaaacatttgttagatggtaaaatattgtgtcaagcgagtaggcaaattccaaaattacacagtggttgatacattaacatcctcaaatatttgagcatgcacttcctttgagatctgtaaattaaatcaccagtgggttagataaaaatacaaaacaaatggcaatctaaccatctcagaaaaggttcaggtttttttctccctaaaactgagaacttgctaaataatttttgaaaagcataaacgtaatacaccctgggttacgatcgagggcagaagggaaggcatttccaaggctcctgctgtagtgtttttcccatttttgttaatacctcaaaaactcccagagatgactttattcctggcccctgcagagctcccctccccacccccaccttgtagactgtaacagattgcaccacatggtgtctgtttaaaaaaaaaaaaaaaattcccatagggacctggatatcccattaatgggctttatgttcctcatggcaaattagctttacacaggaatttccaaacattgttttctgttaagaagggaggaataccatatataatgtatattttttctacaattagtaggaatcagacaaggaaaaggaaatgtcatctattcatacctttctctccaaattcagtgttctttccatatgctccattgtactccaccactcttctccatgaaaactatgaatttatggtttttttttagaaaaatggagttttcaaaatgaaagtcaaataattttttccaaagccgtttgtggactgttgcaaatgcataaatattcaaagctcattttctgcagaaacacttctggtatatgaaattattaaactgtagaatgctaaagatcagaagaagctacagtttttctttaaacttgaaaaaaaattaagaagtattaaggaaaaagcttaatactctggaaaccagacatctggtctttctcatgcgtagggagcagtgtgaatgaaagtgaagtcaaacggacagtttttttctgcattatgcacaaggtgttttaaattgtcagcttaaggtttagatgaagataatctttaactttgtttacaatttttgctattttgcattatccccctttttccataaaaaataaagtgaatatgtgtgcatatttattttgaatcaaaattaaacttattttgagattattttgt

SEQ ID NO: 63038 - DNA, 1803 bp, Homo sapiens
  misc_feature (57)..(57): n is a, c, g, or t
acgcttgtcacttacgtgagcgcagccaatcagcactagaggttgggatatttcggnccaaaggagaacggggacttgtggggacgctcctgcgcaccaatgaatgtgcatggagatggagaggcgggcctgcaagtgcgaacaagccaatcacggaatcccggcggccggcggcccgggaggcagtcgcgcgctcgcatccccaagatggcggccgttaaggacagttgtggcaaaggagaaatggccacagggaatgggcggcggctccacctggggattcctgaggccgtgtttgtggaagatgtagattccttcatgaaacagcctgggaatgagactgcagatacagtattaaagaagctggatgaacagtaccagaagtataagtttatggaactcaaccttgctcaaaagaaaagaaggctaaaaggtcagattcctgaaattaaacagactttggaaattctaaaatacatgcagaagaaaaaagagtccaccaactcaatggagaccagattcttgctggcagataacctgtattgcaaagcttcagttcctcctaccgataaagtgtgtctgtggttgggggctaatgtaatgcttgaatatgatattgatgaagctcaggcattgttggaaaagaatttatcgactgccacaaagaatcttgattccctggaggaagaccttgactttcttcgagatcaatttactaccacagaagtcaatatggccagggtttataattgggatgtaaaaagaagaaacaaggatgactctaccaagaacaaagcataatgctggcaattaaaaatgtggtttagttttccaaacatgttatcttaaatacccctttatccttacaggttgacataactttgaatgttttaacagcaagaattttaagaaaagataaacaccattttatttatttataaaaacaaaattagtttcaaatatttttgacattgtgatttttttttccacatttctcagcaaagctaatggtattttaatcattatttttgcctgtcataagaaaactcttagctgaaatggccgaaaactgtgagacatgctatggaagctgaatgccggacgctagcacagtttactttttccctttctaatcggctgatgttactctcacttgatgtggttaaaccattttagaggtagagaagacagacagtttgaatatttgtaaacttgtttttctttggtatatttaggacttagtggtcctctgttgctattgtcttctataagtggagtttcatgacttactgcttaacgaataactaactactatgatattctggacattttaggaaatggtaatttgccttgctacacattaagagggctattaagactacattttttctaacctcagataagtgcagtgtctttgcaatgccaacataagggagatcttggccaacgtgaaataaaattactcattcaaaactctgcctaaggtgattttgtagttcttaacagttctccagagcatcttgaacaggaatattaagataaatgtgaatctgcaatggctgaaaagagttgtgagcttttttattcatgataaaaccttataggaatagtataaaaaatccctgtggaaagctactagtacattgaccagcgctgggtgatacagattctgataaaaacataaatgtattagttcatctccatgtagtaaaaagtatacttatacaatgttttgtacttgtatttcatgaaattaaaacagtgatgctaaaactatggcagagcacttttttcatgttactc

SEQ ID NO: 63039 - DNA, 365 bp, Homo sapiens
agatctccgccccgccccctccccccccttcaaaactctgcctaaggtgattttgtagttcttaacagttctccagagcatcttgaacaggaatattaagataaatgtgaatctgcaatggctgaaaagagttgtgagcttttttattcatgataaaaccttataggaatagtataaaaaatccctgtggaaagctactagtacattgaccagcgctgggtgatacagattctgataaaaacataaatgtattagttcatctccatgtagtaaaaagtatacttatacaatgttttgtacttgtatttcatgaaattaaaacagtgatgctaaaactatggcagagcacttttttcatgttactc

SEQ ID NO: 63040 - DNA, 331 bp, Homo sapiens
cctactactactactactactaaattcgcggccgtgcgacagagcatcttgaacaggaatattaagataaatgtgaatctgcaatggctgaaaagagttgtgagcttttttattcatgataaaaccttataggaatagtataaaaaatccctgtggaaagctactagtacattgaccagcgctgggtgatacagattctgataaaaacataaatgtattagttcatctccatgtagtaaaaagtatacttatacaatgttttgtacttgtatttcatgaaattaaaacagtgatgctaaaactatggcagagcacttttttcatgttactc

SEQ ID NO: 63041 - DNA, 1619 bp, Homo sapiens
  misc_feature (38)..(38): n is a, c, g, or t
tggctaggacaggcgtgtgttatcggccgaggcgttangacagttgtggcaaaggagaaatggccacagggaatgggcggcggctccacctggggattcctgaggccgtgtttgtggaagatgtagattccttcatgaaacagcctgggaatgagactgcagatacagtattaaagaagctggatgaacagtaccagaagtataagtttatggaactcaaccttgctcaaaagaaaagaaggctaaaaggtcagattcctgaaattaaacagactttggaaattctaaaatacatgcagaagaaaaaagagtccaccaactcaatggagaccagattcttgctggcagataacctgtattgcaaagcttcagttcctcctaccgataaagtgtgtctgtggttgggggctaatgtaatgcttgaatatgatattgatgaagctcaggcattgttggaaaagaatttatcgactgccacaaagaatcttgattccctggaggaagaccttgactttcttcgagatcaatttactaccacagaagtcaatatggccagggtttataattgggatgtaaaaagaagaaacaaggatgactctaccaagaacaaagcataatgctggcaattaaaaatgtggtttagttttccaaacatgttatcttaaatacccctttatccttacaggttgacataactttgaatgttttaacagcaagaattttaagaaaagataaacaccattttatttatttataaaaacaaaattagtttcaaatatttttgacattgtgatttttttttccacatttctcagcaaagctaatggtattttaatcattatttttgcctgtcataagaaaactcttagctgaaatggccgaaaactgtgagacatgctatggaagctgaatgccggacgctagcacagtttactttttccctttctaatcggctgatgttactctcacttgatgtggttaaaccattttagaggtagagaagacagacagtttgaatatttgtaaacttgtttttctttggtatatttaggacttagtggtcctctgttgctattgtcttctataagtggagtttcatgacttactgcttaacgaataactaactactatgatattctggacattttaggaaatggtaatttgccttgctacacattaagagggctattaagactacattttttctaacctcagataagtgcagtgtctttgcaatgccaacataagggagatcttggccaacgtgaaataaaattactcattcaaaactctgcctaaggtgattttgtagttcttaacagttctccagagcatcttgaacaggaatattaagataaatgtgaatctgcaatggctgaaaagagttgtgagcttttttattcatgataaaaccttataggaatagtataaaaaatccctgtggaaagctactagtacattgaccagcgctgggtgatacagattctgataaaaacataaatgtattagttcatctccatgtagtaaaaagtatacttatacaatgttttgtacttgtatttcatgaaattaaaacagtgatgctaaaactatggcagagcacttttttcatgttactc

SEQ ID NO: 63042 - DNA, 1639 bp, Homo sapiens
  misc_feature (38)..(38): n is a, c, g, or t
tggctaggacaggcgtgtgttatcggccgaggcgttangacagttgtggcaaaggagaaatggccacagggaatgggcggcggctccacctggggattcctgaggccgtgtttgtgtattatttttgatattaaaggaagatgtagattccttcatgaaacagcctgggaatgagactgcagatacagtattaaagaagctggatgaacagtaccagaagtataagtttatggaactcaaccttgctcaaaagaaaagaaggctaaaaggtcagattcctgaaattaaacagactttggaaattctaaaatacatgcagaagaaaaaagagtccaccaactcaatggagaccagattcttgctggcagataacctgtattgcaaagcttcagttcctcctaccgataaagtgtgtctgtggttgggggctaatgtaatgcttgaatatgatattgatgaagctcaggcattgttggaaaagaatttatcgactgccacaaagaatcttgattccctggaggaagaccttgactttcttcgagatcaatttactaccacagaagtcaatatggccagggtttataattgggatgtaaaaagaagaaacaaggatgactctaccaagaacaaagcataatgctggcaattaaaaatgtggtttagttttccaaacatgttatcttaaatacccctttatccttacaggttgacataactttgaatgttttaacagcaagaattttaagaaaagataaacaccattttatttatttataaaaacaaaattagtttcaaatatttttgacattgtgatttttttttccacatttctcagcaaagctaatggtattttaatcattatttttgcctgtcataagaaaactcttagctgaaatggccgaaaactgtgagacatgctatggaagctgaatgccggacgctagcacagtttactttttccctttctaatcggctgatgttactctcacttgatgtggttaaaccattttagaggtagagaagacagacagtttgaatatttgtaaacttgtttttctttggtatatttaggacttagtggtcctctgttgctattgtcttctataagtggagtttcatgacttactgcttaacgaataactaactactatgatattctggacattttaggaaatggtaatttgccttgctacacattaagagggctattaagactacattttttctaacctcagataagtgcagtgtctttgcaatgccaacataagggagatcttggccaacgtgaaataaaattactcattcaaaactctgcctaaggtgattttgtagttcttaacagttctccagagcatcttgaacaggaatattaagataaatgtgaatctgcaatggctgaaaagagttgtgagcttttttattcatgataaaaccttataggaatagtataaaaaatccctgtggaaagctactagtacattgaccagcgctgggtgatacagattctgataaaaacataaatgtattagttcatctccatgtagtaaaaagtatacttatacaatgttttgtacttgtatttcatgaaattaaaacagtgatgctaaaactatggcagagcacttttttcatgttactc

SEQ ID NO: 63043 - DNA, 1749 bp, Homo sapiens
  misc_feature (57)..(57): n is a, c, g, or t
acgcttgtcacttacgtgagcgcagccaatcagcactagaggttgggatatttcggnccaaaggagaacggggacttgtggggacgctcctgcgcaccaatgaatgtgcatggagatggagaggcgggcctgcaagtgcgaacaagccaatcacggaatcccggcggccggcggcccgggaggcagtcgcgcgctcgcatccccaagatggcggccgttaaggacagttgtggcaaaggagaaatggccacagggaatgggcggcggctccacctggggattcctgaggccgtgtttgtggaagatgtagattccttcatgaaacagcctgggaatgagactgcagatacagtattaaagaagctggatgaacagtaccagaagtataagtttatggaactcaaccttgctcaaaagaaaagaaggctaaaaggtcagattcctgaaattaaacagactttggaaattctaaaatacatgcagaagaaaaaagagtccaccaactcaatggagaccagattcttgctggcagataacctgtattgcaaagcttcagttcctcctaccgataaagtgtgtctgtggttgggggctaatgtaatgcttgaatatgatattgatgaagctcaggcattgttggaaaagaatttatcgactgccacaaagaatcttgattccctggaggaagaccttgactttcttcgagatcaatttactaccacagaagtcaatatggccagggtttataattgggatgtaaaaagaagaaacaaggatgactctaccaagaacaaagcataatgctggcaattaaggttgacataactttgaatgttttaacagcaagaattttaagaaaagataaacaccattttatttatttataaaaacaaaattagtttcaaatatttttgacattgtgatttttttttccacatttctcagcaaagctaatggtattttaatcattatttttgcctgtcataagaaaactcttagctgaaatggccgaaaactgtgagacatgctatggaagctgaatgccggacgctagcacagtttactttttccctttctaatcggctgatgttactctcacttgatgtggttaaaccattttagaggtagagaagacagacagtttgaatatttgtaaacttgtttttctttggtatatttaggacttagtggtcctctgttgctattgtcttctataagtggagtttcatgacttactgcttaacgaataactaactactatgatattctggacattttaggaaatggtaatttgccttgctacacattaagagggctattaagactacattttttctaacctcagataagtgcagtgtctttgcaatgccaacataagggagatcttggccaacgtgaaataaaattactcattcaaaactctgcctaaggtgattttgtagttcttaacagttctccagagcatcttgaacaggaatattaagataaatgtgaatctgcaatggctgaaaagagttgtgagcttttttattcatgataaaaccttataggaatagtataaaaaatccctgtggaaagctactagtacattgaccagcgctgggtgatacagattctgataaaaacataaatgtattagttcatctccatgtagtaaaaagtatacttatacaatgttttgtacttgtatttcatgaaattaaaacagtgatgctaaaactatggcagagcacttttttcatgttactc

SEQ ID NO: 63044 - DNA, 1366 bp, Homo sapiens
  misc_feature (57)..(57): n is a, c, g, or t
acgcttgtcacttacgtgagcgcagccaatcagcactagaggttgggatatttcggnccaaaggagaacggggacttgtggggacgctcctgcgcaccaatgaatgtgcatggagatggagaggcgggcctgcaagtgcgaacaagccaatcacggaatcccggcggccggcggcccgggaggcagtcgcgcgctcgcatccccaagatggcggccgttaaggacaaagaatcttgattccctggaggaagaccttgactttcttcgagatcaatttactaccacagaagtcaatatggccagggtttataattgggatgtaaaaagaagaaacaaggatgactctaccaagaacaaagcataatgctggcaattaaaaatgtggtttagttttccaaacatgttatcttaaatacccctttatccttacaggttgacataactttgaatgttttaacagcaagaattttaagaaaagataaacaccattttatttatttataaaaacaaaattagtttcaaatatttttgacattgtgatttttttttccacatttctcagcaaagctaatggtattttaatcattatttttgcctgtcataagaaaactcttagctgaaatggccgaaaactgtgagacatgctatggaagctgaatgccggacgctagcacagtttactttttccctttctaatcggctgatgttactctcacttgatgtggttaaaccattttagaggtagagaagacagacagtttgaatatttgtaaacttgtttttctttggtatatttaggacttagtggtcctctgttgctattgtcttctataagtggagtttcatgacttactgcttaacgaataactaactactatgatattctggacattttaggaaatggtaatttgccttgctacacattaagagggctattaagactacattttttctaacctcagataagtgcagtgtctttgcaatgccaacataagggagatcttggccaacgtgaaataaaattactcattcaaaactctgcctaaggtgattttgtagttcttaacagttctccagagcatcttgaacaggaatattaagataaatgtgaatctgcaatggctgaaaagagttgtgagcttttttattcatgataaaaccttataggaatagtataaaaaatccctgtggaaagctactagtacattgaccagcgctgggtgatacagattctgataaaaacataaatgtattagttcatctccatgtagtaaaaagtatacttatacaatgttttgtacttgtatttcatgaaattaaaacagtgatgctaaaactatggcagagcacttttttcatgttactc

SEQ ID NO: 63045 - DNA, 1031 bp, Homo sapiens
  misc_feature (9)..(9): n is a, c, g, or t
caaaattangtttcaaatatttttgtttttataaataaataaaatggtgtttatcttttcttaaaattcttgctgttaaaacattcaaagttatgtcaacctgtaaggataaaggggtatttaagataacatgtttggaaaagataaacaccattttatttatttataaaaacaaaattagtttcaaatatttttgacattgtgatttttttttccacatttctcagcaaagctaatggtattttaatcattatttttgcctgtcataagaaaactcttagctgaaatggccgaaaactgtgagacatgctatggaagctgaatgccggacgctagcacagtttactttttccctttctaatcggctgatgttactctcacttgatgtggttaaaccattttagaggtagagaagacagacagtttgaatatttgtaaacttgtttttctttggtatatttaggacttagtggtcctctgttgctattgtcttctataagtggagtttcatgacttactgcttaacgaataactaactactatgatattctggacattttaggaaatggtaatttgccttgctacacattaagagggctattaagactacattttttctaacctcagataagtgcagtgtctttgcaatgccaacataagggagatcttggccaacgtgaaataaaattactcattcaaaactctgcctaaggtgattttgtagttcttaacagttctccagagcatcttgaacaggaatattaagataaatgtgaatctgcaatggctgaaaagagttgtgagcttttttattcatgataaaaccttataggaatagtataaaaaatccctgtggaaagctactagtacattgaccagcgctgggtgatacagattctgataaaaacataaatgtattagttcatctccatgtagtaaaaagtatacttatacaatgttttgtacttgtatttcatgaaattaaaacagtgatgctaaaactatggcagagcacttttttcatgttactc

SEQ ID NO: 63046 - DNA, 1019 bp, Homo sapiens
  misc_feature (57)..(57): n is a, c, g, or t
acgcttgtcacttacgtgagcgcagccaatcagcactagaggttgggatatttcggnccaaaggagaacggggacttgtggggacgctcctgcgcaccaatgaatgtgcatggagatggagaggcgggcctgcaagtgcgaacaagccaatcacggaatcccggcggccggcggcccgggaggcagtcgcgcgctcgcatccccaagatggcggccgttaaggacagttgtggcaaaggagaaatggccacagggaatgggcggcggctccacctggggattcctgaggccgtgtttgtggaagatgtagattccttcatgaaacagcctgggaatgagactgcagatacagtattaaagaagctggatgaacagtaccagaagtataagtttatggaactcaaccttgctcaaaagaaaagaaggctaaaaggtcagattcctgaaattaaacagactttggaaattctaaaatacatgcagaagaaaaaagagtccaccaactcaatggagaccagattcttgctggcagataacctgtattgcaaagcttcagttcctcctaccgataaagtgtgtctgtggttgggggctaatgtaatgcttgaatatgatattgatgaagctcaggcattgttggaaaagaatttatcgactgccacaaagaatcttgattccctggaggaagaccttgactttcttcgagatcaatttactaccacagaagtcaagcatcttgaacaggaatattaagataaatgtgaatctgcaatggctgaaaagagttgtgagcttttttattcatgataaaaccttataggaatagtataaaaaatccctgtggaaagctactagtacattgaccagcgctgggtgatacagattctgataaaaacataaatgtattagttcatctccatgtagtaaaaagtatacttatacaatgttttgtacttgtatttcatgaaattaaaacagtgatgctaaaactatggcagagcacttttttcatgttactc

SEQ ID NO: 63047 - DNA, 903 bp, Homo sapiens
  misc_feature (38)..(38): n is a, c, g, or t
  misc_feature (751)..(751): n is a, c, g, or t
  misc_feature (753)..(753): n is a, c, g, or t
  misc_feature (756)..(756): n is a, c, g, or t
  misc_feature (759)..(759): n is a, c, g, or t
  misc_feature (771)..(771): n is a, c, g, or t
  misc_feature (775)..(775): n is a, c, g, or t
  misc_feature (777)..(777): n is a, c, g, or t
tggctaggacaggcgtgtgttatcggccgaggcgttangacagttgtggcaaaggagaaatggccacagggaatgggcggcggctccacctggggattcctgaggccgtgtttgtggaagatgtagattccttcatgaaacagcctgggaatgagactgcagatacagtattaaagaagctggatgaacagtaccagaagtataagtttatggaactcaaccttgctcaaaagaaaagaaggctaaaaggtcagattcctgaaattaaacagactttggaaattctaaaatacatgcagaagaaaaaagagtccaccaactcaatggagaccagattcttgctggcagataacctgtattgcaaagcttcagttcctcctaccgataaagtgtgtctgtggttgggggctaatgtaatgcttgaatatgatattgatgaagctcaggcattgttggaaaagaatttatcgactgccacaaagaatcttgattccctggaggaagaccttgactttcttcgagatcaatttactaccacagaagtcaatatggccagggtttataattgggatgtaaaaagaagaaacaaggatgactctaccaagaacaaagcataatgctggcaattaaaaatgtggtttagttttccaaacatgttatcttaaatacccctttatccttacaggttgacataactttgaatgttttaacagcaagaattttaagaaaagataaacaccattttattttnanacnatngttcaatttgcncggntnttccatctcccaagagggtgtaacctttggcgccaaactgtgaggcgcgggagatgggggccccgcgacacccggggcccctgcaaaagaggagttttcggtgccgctgtttcgcccacatatctc

SEQ ID NO: 63048 - DNA, 1470 bp, Homo sapiens
gacattagtagaaaatgcaaagttagtaagaccgtgtcctgttgtttatttttgcctgcaaaatactaagttactctttttcttgttcacaggctaaaaggtcagattcctgaaattaaacagactttggaaattctaaaatacatgcagaagaaaaaagagtccaccaactcaatggagaccagattcttgctggcagataacctgtattgcaaagcttcagttcctcctaccgataaagtgtgtctgtggttgggggctaatgtaatgcttgaatatgatattgatgaagctcaggcattgttggaaaagaatttatcgactgccacaaagaatcttgattccctggaggaagaccttgactttcttcgagatcaatttactaccacagaagtcaatatggccagggtttataattgggatgtaaaaagaagaaacaaggatgactctaccaagaacaaagcataatgctggcaattaaaaatgtggtttagttttccaaacatgttatcttaaatacccctttatccttacaggttgacataactttgaatgttttaacagcaagaattttaagaaaagataaacaccattttatttatttataaaaacaaaattagtttcaaatatttttgacattgtgatttttttttccacatttctcagcaaagctaatggtattttaatcattatttttgcctgtcataagaaaactcttagctgaaatggccgaaaactgtgagacatgctatggaagctgaatgccggacgctagcacagtttactttttccctttctaatcggctgatgttactctcacttgatgtggttaaaccattttagaggtagagaagacagacagtttgaatatttgtaaacttgtttttctttggtatatttaggacttagtggtcctctgttgctattgtcttctataagtggagtttcatgacttactgcttaacgaataactaactactatgatattctggacattttaggaaatggtaatttgccttgctacacattaagagggctattaagactacattttttctaacctcagataagtgcagtgtctttgcaatgccaacataagggagatcttggccaacgtgaaataaaattactcattcaaaactctgcctaaggtgattttgtagttcttaacagttctccagagcatcttgaacaggaatattaagataaatgtgaatctgcaatggctgaaaagagttgtgagcttttttattcatgataaaaccttataggaatagtataaaaaatccctgtggaaagctactagtacattgaccagcgctgggtgatacagattctgataaaaacataaatgtattagttcatctccatgtagtaaaaagtatacttatacaatgttttgtacttgtatttcatgaaattaaaacagtgatgctaaaactatggcagagcacttttttcatgttactc

SEQ ID NO: 63049 - DNA, 2964 bp, Homo sapiens
atatatagagttaagaagtctaggtctgcttccagaagaaaacagttccacgttgcttgaaattgaaaatcaagataaaaatgttcacaattaagctccttctttttattgttcctctagttatttcctccagaattgatcaagacaattcatcatttgattctctatctccagagccaaaatcaagatttgctatgttagacgatgtaaaaattttagccaatggcctccttcagttgggacatggtcttaaagactttgtccataagacgaagggccaaattaatgacatatttcaaaaactcaacatatttgatcagtctttttatgatctatcgctgcaaaccagtgaaatcaaagaagaagaaaaggaactgagaagaactacatataaactacaagtcaaaaatgaagaggtaaagaatatgtcacttgaactcaactcaaaacttgaaagcctcctagaagaaaaaattctacttcaacaaaaagtgaaatatttagaagagcaactaactaacttaattcaaaatcaacctgaaactccagaacacccagaagtaacttcacttaaaacttttgtagaaaaacaagataatagcatcaaagaccttctccagaccgtggaagaccaatataaacaattaaaccaacagcatagtcaaataaaagaaatagaaaatcagctcagaaggactagtattcaagaacccacagaaatttctctatcttccaagccaagagcaccaagaactactccctttcttcagttgaatgaaataagaaatgtaaaacatgatggcattcctgctgaatgtaccaccatttataacagaggtgaacatacaagtggcatgtatgccatcagacccagcaactctcaagtttttcatgtctactgtgatgttatatcaggtagtccatggacattaattcaacatcgaatagatggatcacaaaacttcaatgaaacgtgggagaactacaaatatggttttgggaggcttgatggagaattttggttgggcctagagaagatatactccatagtgaagcaatctaattatgttttacgaattgagttggaagactggaaagacaacaaacattatattgaatattctttttacttgggaaatcacgaaaccaactatacgctacatctagttgcgattactggcaatgtccccaatgcaatcccggaaaacaaagatttggtgttttctacttgggatcacaaagcaaaaggacacttcaactgtccagagggttattcaggaggctggtggtggcatgatgagtgtggagaaaacaacctaaatggtaaatataacaaaccaagagcaaaatctaagccagagaggagaagaggattatcttggaagtctcaaaatggaaggttatactctataaaatcaaccaaaatgttgatccatccaacagattcagaaagctttgaatgaactgaggcaaatttaaaaggcaataatttaaacattaacctcattccaagttaatgtggtctaataatctggtattaaatccttaagagaaagcttgagaaatagattttttttatcttaaagtcactgtctatttaagattaaacatacaatcacataaccttaaagaataccgtttacatttctcaatcaaaattcttataatactatttgttttaaattttgtgatgtgggaatcaattttagatggtcacaatctagattataatcaataggtgaacttattaaataacttttctaaataaaaaatttagagacttttattttaaaaggcatcatatgagctaatatcacaactttcccagtttaaaaaactagtactcttgttaaaactctaaacttgactaaatacagaggactggtaattgtacagttcttaaatgttgtagtattaatttcaaaactaaaaatcgtcagcacagagtatgtgtaaaaatctgtaatacaaatttttaaactgatgcttcattttgctacaaaataatttggagtaaatgtttgatatgatttatttatgaaacctaatgaagcagaattaaatactgtattaaaataagttcgctgtctttaaacaaatggagatgactactaagtcacattgactttaacatgaggtatcactataccttatttgttaaaatatatactgtatacattttatatattttaacacttaatactatgaaaacaaataattgtaaaggaatcttgtcagattacagtaagaatgaacatatttgtggcatcgagttaaagtttatatttcccctaaatatgctgtgattctaatacattcgtgtaggttttcaagtagaaataaacctcgtaacaagttactgaacgtttaaacagcctgacaagcatgtatatatgtttaaaattcaataaacaaagacccagtccctaaattatagaaatttaaattattcttgcatgtttatcgacatcacaacagatccctaaatccctaaatccctaaagattagatacaaattttttaccacagtatcacttgtcagaatttatttttaaatatgattttttaaaactgccagtaagaaattttaaattaaacccatttgttaaaggatatagtgcccaagttatatggtgacctacctttgtcaatacttagcattatgtatttcaaattatccaatatacatgtcatatatatttttatatgtcacatatataaaagatatgtatgatctatgtgaatcctaagtaaatattttgttccagaaaagtacaaaataataaaggtaaaaataatctataattttcaggaccacagactaagctgtcgaaattaacgctgatttttttagggccagaataccaaaatggctcctctcttcccccaaaattggacaatttcaaatgcaaaataattcattatttaatatatgagttgcttcctctatttggtttccttaaa

SEQ ID NO: 63050 - DNA, 3361 bp, Homo sapiens
atatatagagttaagaagtctaggtctgcttccagaagaaaacagttccacgttgcttgaaattgaaaatcaagataaaaatgttcacaattaagctccttctttttattgttcctctagttatttcctccagaattgatcaagacaattcatcatttgattctctatctccagagccaaaatcaagatttgctatgttagacgatgtaaaaattttagccaatggcctccttcagttgggacatggtcttaaagactttgtccataagacgaagggccaaattaatgacatatttcaaaaactcaacatatttgatcagtctttttatgatctatcgctgcaaaccagtgaaatcaaagaagaagaaaaggaactgagaagaactacatataaactacaagtcaaaaatgaagaggtaaagaatatgtcacttgaactcaactcaaaacttgaaagcctcctagaagaaaaaattctacttcaacaaaaagtgaaatatttagaagagcaactaactaacttaattcaaaatcaacctgaaactccagaacacccagaagtaacttcacttaaaacttttgtagaaaaacaagataatagcatcaaagaccttctccagaccgtggaagaccaatataaacaattaaaccaacagcatagtcaaataaaagaaatagaaaatcagctcagaaggactagtattcaagaacccacagaaatttctctatcttccaagccaagagcaccaagaactactccctttcttcagttgaatgaaataagaaatgtaaaacatgatggcattcctgctgaatgtaccaccatttataacagaggtgaacatacaagtggcatgtatgccatcagacccagcaactctcaagtttttcatgtctactgtgatgttatatcaggtagtccatggacattaattcaacatcgaatagatggatcacaaaacttcaatgaaacgtgggagaactacaaatatggttttgggaggcttgatggagaattttggttgggcctagagaagatatactccatagtgaagcaatctaattatgttttacgaattgagttggaagactggaaagacaacaaacattatattgaatattctttttacttgggaaatcacgaaaccaactatacgctacatctagttgcgattactggcaatgtccccaatgcaatcccggaaaacaaagatttggtgttttctacttgggatcacaaagcaaaaggacacttcaactgtccagagggttattcaggtatctttttctgataccaatactttattttcatatcttcaaagtatcttcccacattattagctattatctgcaatgacaacttttaaaaatccgaatcccaaataagcgttttctctctagacgaaaacctcttaactataatgaaagtgttcattctagttcaatcaggtattttacctctaatcttcctcagattttctattttttggtagtgtatagattatttatacagattatttaaaattgggacttatacagattatttaaaactgggatacatgcatctaaaacactgtaatatttataagaaaggaagataaacttacggggaaatacagtaacagtaactacatacgagtctgtacccattaaattgcatatctatctcctttaggaggctggtggtggcatgatgagtgtggagaaaacaacctaaatggtaaatataacaaaccaagagcaaaatctaagccagagaggagaagaggattatcttggaagtctcaaaatggaaggttatactctataaaatcaaccaaaatgttgatccatccaacagattcagaaagctttgaatgaactgaggcaaatttaaaaggcaataatttaaacattaacctcattccaagttaatgtggtctaataatctggtattaaatccttaagagaaagcttgagaaatagattttttttatcttaaagtcactgtctatttaagattaaacatacaatcacataaccttaaagaataccgtttacatttctcaatcaaaattcttataatactatttgttttaaattttgtgatgtgggaatcaattttagatggtcacaatctagattataatcaataggtgaacttattaaataacttttctaaataaaaaatttagagacttttattttaaaaggcatcatatgagctaatatcacaactttcccagtttaaaaaactagtactcttgttaaaactctaaacttgactaaatacagaggactggtaattgtacagttcttaaatgttgtagtattaatttcaaaactaaaaatcgtcagcacagagtatgtgtaaaaatctgtaatacaaatttttaaactgatgcttcattttgctacaaaataatttggagtaaatgtttgatatgatttatttatgaaacctaatgaagcagaattaaatactgtattaaaataagttcgctgtctttaaacaaatggagatgactactaagtcacattgactttaacatgaggtatcactataccttatttgttaaaatatatactgtatacattttatatattttaacacttaatactatgaaaacaaataattgtaaaggaatcttgtcagattacagtaagaatgaacatatttgtggcatcgagttaaagtttatatttcccctaaatatgctgtgattctaatacattcgtgtaggttttcaagtagaaataaacctcgtaacaagttactgaacgtttaaacagcctgacaagcatgtatatatgtttaaaattcaataaacaaagacccagtccctaaattatagaaatttaaattattcttgcatgtttatcgacatcacaacagatccctaaatccctaaatccctaaagattagatacaaattttttaccacagtatcacttgtcagaatttatttttaaatatgattttttaaaactgccagtaagaaattttaaattaaacccatttgttaaaggatatagtgcccaagttatatggtgacctacctttgtcaatacttagcattatgtatttcaaattatccaatatacatgtcatatatatttttatatgtcacatatataaaagatatgtatgatctatgtgaatcctaagtaaatattttgttccagaaaagtacaaaataataaaggtaaaaataatctataattttcaggaccacagactaagctgtcgaaattaacgctgatttttttagggccagaataccaaaatggctcctctcttcccccaaaattggacaatttcaaatgcaaaataattcattatttaatatatgagttgcttcctctatttggtttccttaaa

SEQ ID NO: 63051 - DNA, 2922 bp, Homo sapiens
atatatagagttaagaagtctaggtctgcttccagaagaaaacagttccacgttgcttgaaattgaaaatcaagataaaaatgttcacaattaagctccttctttttattgttcctctagttatttcctccagaattgatcaagacaattcatcatttgattctctatctccagagccaaaatcaagatttgctatgttagacgatgtaaaaattttagccaatggcctccttcagttgggacatggtcttaaagactttgtccataagacgaagggccaaattaatgacatatttcaaaaactcaacatatttgatcagtctttttatgatctatcgctgcaaaccagtgaaatcaaagaagaagaaaaggaactgagaagaactacatataaactacaagtcaaaaatgaagaggtaaagaatatgtcacttgaactcaactcaaaacttgaaagcctcctagaagaaaaaattctacttcaacaaaaagtgaaatatttagaagagcaactaactaacttaattcaaaatcaacctgaaactccagaacacccagaagtaacttcacttaaaacttttgtagaaaaacaagataatagcatcaaagaccttctccagaccgtggaagaccaatataaacaattaaaccaacagcatagtcaaataaaagaaatagaaaatcagctcagaaggactagtattcaagaacccacagaaatttctctatcttccaagccaagagcaccaagaactactccctttcttcagttgaatgaaataagaaatgtaaaacatgatgatacaagtggcatgtatgccatcagacccagcaactctcaagtttttcatgtctactgtgatgttatatcaggtagtccatggacattaattcaacatcgaatagatggatcacaaaacttcaatgaaacgtgggagaactacaaatatggttttgggaggcttgatggagaattttggttgggcctagagaagatatactccatagtgaagcaatctaattatgttttacgaattgagttggaagactggaaagacaacaaacattatattgaatattctttttacttgggaaatcacgaaaccaactatacgctacatctagttgcgattactggcaatgtccccaatgcaatcccggaaaacaaagatttggtgttttctacttgggatcacaaagcaaaaggacacttcaactgtccagagggttattcaggaggctggtggtggcatgatgagtgtggagaaaacaacctaaatggtaaatataacaaaccaagagcaaaatctaagccagagaggagaagaggattatcttggaagtctcaaaatggaaggttatactctataaaatcaaccaaaatgttgatccatccaacagattcagaaagctttgaatgaactgaggcaaatttaaaaggcaataatttaaacattaacctcattccaagttaatgtggtctaataatctggtattaaatccttaagagaaagcttgagaaatagattttttttatcttaaagtcactgtctatttaagattaaacatacaatcacataaccttaaagaataccgtttacatttctcaatcaaaattcttataatactatttgttttaaattttgtgatgtgggaatcaattttagatggtcacaatctagattataatcaataggtgaacttattaaataacttttctaaataaaaaatttagagacttttattttaaaaggcatcatatgagctaatatcacaactttcccagtttaaaaaactagtactcttgttaaaactctaaacttgactaaatacagaggactggtaattgtacagttcttaaatgttgtagtattaatttcaaaactaaaaatcgtcagcacagagtatgtgtaaaaatctgtaatacaaatttttaaactgatgcttcattttgctacaaaataatttggagtaaatgtttgatatgatttatttatgaaacctaatgaagcagaattaaatactgtattaaaataagttcgctgtctttaaacaaatggagatgactactaagtcacattgactttaacatgaggtatcactataccttatttgttaaaatatatactgtatacattttatatattttaacacttaatactatgaaaacaaataattgtaaaggaatcttgtcagattacagtaagaatgaacatatttgtggcatcgagttaaagtttatatttcccctaaatatgctgtgattctaatacattcgtgtaggttttcaagtagaaataaacctcgtaacaagttactgaacgtttaaacagcctgacaagcatgtatatatgtttaaaattcaataaacaaagacccagtccctaaattatagaaatttaaattattcttgcatgtttatcgacatcacaacagatccctaaatccctaaatccctaaagattagatacaaattttttaccacagtatcacttgtcagaatttatttttaaatatgattttttaaaactgccagtaagaaattttaaattaaacccatttgttaaaggatatagtgcccaagttatatggtgacctacctttgtcaatacttagcattatgtatttcaaattatccaatatacatgtcatatatatttttatatgtcacatatataaaagatatgtatgatctatgtgaatcctaagtaaatattttgttccagaaaagtacaaaataataaaggtaaaaataatctataattttcaggaccacagactaagctgtcgaaattaacgctgatttttttagggccagaataccaaaatggctcctctcttcccccaaaattggacaatttcaaatgcaaaataattcattatttaatatatgagttgcttcctctatttggtttccttaaa

SEQ ID NO: 63052 - DNA, 2465 bp, Homo sapiens
atatatagagttaagaagtctaggtctgcttccagaagaaaacagttccacgttgcttgaaattgaaaatcaagataaaaatgttcacaattaagctccttctttttattgttcctctagttatttcctccagaattgatcaagacaattcatcatttgattctctatctccagagccaaaatcaagatttgctatgttagacgatgtaaaaattttagccaatggcctccttcagttgggacatggtcttaaagactttgtccataagacgaagggccaaattaatgacatatttcaaaaactcaacatatttgatcagtctttttatgatctatcgctgcaaaccagtgaaatcaaagaagaagaaaaggaactgagaagaactacatataaactacaagtcaaaaatgaagaggtaaagaatatgtcacttgaactcaactcaaaacttgaaagcctcctagaagaaaaaattctacttcaacaaaaagtgaaatatttagaagagcaactaactaacttaattcaaaatcaacctgaaactccagaacacccagaagtaacttcacttaaagaattgagttggaagactggaaagacaacaaacattatattgaatattctttttacttgggaaatcacgaaaccaactatacgctacatctagttgcgattactggcaatgtccccaatgcaatcccggaaaacaaagatttggtgttttctacttgggatcacaaagcaaaaggacacttcaactgtccagagggttattcaggaggctggtggtggcatgatgagtgtggagaaaacaacctaaatggtaaatataacaaaccaagagcaaaatctaagccagagaggagaagaggattatcttggaagtctcaaaatggaaggttatactctataaaatcaaccaaaatgttgatccatccaacagattcagaaagctttgaatgaactgaggcaaatttaaaaggcaataatttaaacattaacctcattccaagttaatgtggtctaataatctggtattaaatccttaagagaaagcttgagaaatagattttttttatcttaaagtcactgtctatttaagattaaacatacaatcacataaccttaaagaataccgtttacatttctcaatcaaaattcttataatactatttgttttaaattttgtgatgtgggaatcaattttagatggtcacaatctagattataatcaataggtgaacttattaaataacttttctaaataaaaaatttagagacttttattttaaaaggcatcatatgagctaatatcacaactttcccagtttaaaaaactagtactcttgttaaaactctaaacttgactaaatacagaggactggtaattgtacagttcttaaatgttgtagtattaatttcaaaactaaaaatcgtcagcacagagtatgtgtaaaaatctgtaatacaaatttttaaactgatgcttcattttgctacaaaataatttggagtaaatgtttgatatgatttatttatgaaacctaatgaagcagaattaaatactgtattaaaataagttcgctgtctttaaacaaatggagatgactactaagtcacattgactttaacatgaggtatcactataccttatttgttaaaatatatactgtatacattttatatattttaacacttaatactatgaaaacaaataattgtaaaggaatcttgtcagattacagtaagaatgaacatatttgtggcatcgagttaaagtttatatttcccctaaatatgctgtgattctaatacattcgtgtaggttttcaagtagaaataaacctcgtaacaagttactgaacgtttaaacagcctgacaagcatgtatatatgtttaaaattcaataaacaaagacccagtccctaaattatagaaatttaaattattcttgcatgtttatcgacatcacaacagatccctaaatccctaaatccctaaagattagatacaaattttttaccacagtatcacttgtcagaatttatttttaaatatgattttttaaaactgccagtaagaaattttaaattaaacccatttgttaaaggatatagtgcccaagttatatggtgacctacctttgtcaatacttagcattatgtatttcaaattatccaatatacatgtcatatatatttttatatgtcacatatataaaagatatgtatgatctatgtgaatcctaagtaaatattttgttccagaaaagtacaaaataataaaggtaaaaataatctataattttcaggaccacagactaagctgtcgaaattaacgctgatttttttagggccagaataccaaaatggctcctctcttcccccaaaattggacaatttcaaatgcaaaataattcattatttaatatatgagttgcttcctctatttggtttccttaaa

SEQ ID NO: 63053 - DNA, 1366 bp, Homo sapiens
  misc_feature (20)..(20): n is a, c, g, or t
  misc_feature (50)..(50): n is a, c, g, or t
  misc_feature (66)..(66): n is a, c, g, or t
  misc_feature (83)..(83): n is a, c, g, or t
  misc_feature (90)..(90): n is a, c, g, or t
  misc_feature (92)..(92): n is a, c, g, or t
  misc_feature (104)..(104): n is a, c, g, or t
  misc_feature (120)..(120): n is a, c, g, or t
  misc_feature (136)..(136): n is a, c, g, or t
  misc_feature (155)..(155): n is a, c, g, or t
  misc_feature (164)..(164): n is a, c, g, or t
  misc_feature (188)..(189): n is a, c, g, or t
  misc_feature (239)..(239): n is a, c, g, or t
  misc_feature (246)..(246): n is a, c, g, or t
cgtaagtactagtcggccanataaaccaagtaatgtgtcatagggtgttnttagttatcacacatntcagtagtaagtaacanatttttntntatatcagacanaatatgaattcaaatngccattatatatctanctatgagtatctcctaganattttccanatgcatttcctttcgatttccatnntatagctggcattttttgccacagtactctgtcaggtcttaatatacgcnctatagnaagcatgacctatcatttcttcatgtttgctcgtgccgaattcggcacgaggttcttaaatgttgtagtattaatttcaaaactaaaaatcgtcagcacagagtatgtgtaaaaatctgtaatacaaatttttaaactgatgcttcattttgctacaaaataatttggagtaaatgtttgatatgatttatttatgaaacctaatgaagcagaattaaatactgtattaaaataagttcgctgtctttaaacaaatggagatgactactaagtcacattgactttaacatgaggtatcactataccttatttgttaaaatatatactgtatacattttatatattttaacacttaatactatgaaaacaaataattgtaaaggaatcttgtcagattacagtaagaatgaacatatttgtggcatcgagttaaagtttatatttcccctaaatatgctgtgattctaatacattcgtgtaggttttcaagtagaaataaacctcgtaacaagttactgaacgtttaaacagcctgacaagcatgtatatatgtttaaaattcaataaacaaagacccagtccctaaattatagaaatttaaattattcttgcatgtttatcgacatcacaacagatccctaaatccctaaatccctaaagattagatacaaattttttaccacagtatcacttgtcagaatttatttttaaatatgattttttaaaactgccagtaagaaattttaaattaaacccatttgttaaaggatatagtgcccaagttatatggtgacctacctttgtcaatacttagcattatgtatttcaaattatccaatatacatgtcatatatatttttatatgtcacatatataaaagatatgtatgatctatgtgaatcctaagtaaatattttgttccagaaaagtacaaaataataaaggtaaaaataatctataattttcaggaccacagactaagctgtcgaaattaacgctgatttttttagggccagaataccaaaatggctcctctcttcccccaaaattggacaatttcaaatgcaaaataattcattatttaatatatgagttgcttcctctatttggtttccttaaa

SEQ ID NO: 63054 - DNA, 1293 bp, Homo sapiens
  misc_feature (20)..(20): n is a, c, g, or t
  misc_feature (50)..(50): n is a, c, g, or t
  misc_feature (66)..(66): n is a, c, g, or t
  misc_feature (83)..(83): n is a, c, g, or t
  misc_feature (90)..(90): n is a, c, g, or t
  misc_feature (92)..(92): n is a, c, g, or t
  misc_feature (104)..(104): n is a, c, g, or t
  misc_feature (120)..(120): n is a, c, g, or t
  misc_feature (136)..(136): n is a, c, g, or t
  misc_feature (155)..(155): n is a, c, g, or t
  misc_feature (164)..(164): n is a, c, g, or t
  misc_feature (188)..(189): n is a, c, g, or t
  misc_feature (239)..(239): n is a, c, g, or t
  misc_feature (246)..(246): n is a, c, g, or t
cgtaagtactagtcggccanataaaccaagtaatgtgtcatagggtgttnttagttatcacacatntcagtagtaagtaacanatttttntntatatcagacanaatatgaattcaaatngccattatatatctanctatgagtatctcctaganattttccanatgcatttcctttcgatttccatnntatagctggcattttttgccacagtactctgtcaggtcttaatatacgcnctatagnaagcatgacctatcatttcttcatgtttgctcgtgccgaattcggcacgaggaaatttttaaactgatgcttcattttgctacaaaataatttggagtaaatgtttgatatgatttatttatgaaacctaatgaagcagaattaaatactgtattaaaataagttcgctgtctttaaacaaatggagatgactactaagtcacattgactttaacatgaggtatcactataccttatttgttaaaatatatactgtatacattttatatattttaacacttaatactatgaaaacaaataattgtaaaggaatcttgtcagattacagtaagaatgaacatatttgtggcatcgagttaaagtttatatttcccctaaatatgctgtgattctaatacattcgtgtaggttttcaagtagaaataaacctcgtaacaagttactgaacgtttaaacagcctgacaagcatgtatatatgtttaaaattcaataaacaaagacccagtccctaaattatagaaatttaaattattcttgcatgtttatcgacatcacaacagatccctaaatccctaaatccctaaagattagatacaaattttttaccacagtatcacttgtcagaatttatttttaaatatgattttttaaaactgccagtaagaaattttaaattaaacccatttgttaaaggatatagtgcccaagttatatggtgacctacctttgtcaatacttagcattatgtatttcaaattatccaatatacatgtcatatatatttttatatgtcacatatataaaagatatgtatgatctatgtgaatcctaagtaaatattttgttccagaaaagtacaaaataataaaggtaaaaataatctataattttcaggaccacagactaagctgtcgaaattaacgctgatttttttagggccagaataccaaaatggctcctctcttcccccaaaattggacaatttcaaatgcaaaataattcattatttaatatatgagttgcttcctctatttggtttccttaaa

SEQ ID NO: 63055 - DNA, 389 bp, Homo sapiens
gtaaaacctgtctaaggagaatagacagtagttagttcaacttactcattacgtattaggaagattaacctggttatcattgttttatacatatatatatgaaatatatatgagtattcgtataaatataatacttttaccttgtttatgtatttactcaatattctccttttcctctaaaataatctgaagtgactattatcaataagtttactatgccaaaattcattaattgcctttcacttaacttttgggaccataataaataataaaatgtattgccataacattaataaactaccttacaaaaccaccaattaaaatcaaacaaacaaaaaagtgttatttacatctgtcaacataaatctactaaaaatacatgatttcat

SEQ ID NO: 63056 - DNA, 764 bp, Homo sapiens
ccagaagaaaacagttccacgttgcttgaaattgaaaatcaagataaaaatgttcacaattaagctccttctttttattgttcctctagttatttcctccagaattgatcaagacaattcatcatttgattctctatctccagagccaaaatcaagatttgctatgttagacgatgtaaaaattttagccaatggcctccttcagttgggacatggtcttaaagactttgtccataagacgaagggccaaattaatgacatatttcaaaaactcaacatatttgatcagtctttttatgatctatcgctgcaaaccagtgaaatcaaagaagaagaaaaggaactgagaagaactacatataaactacaagtcaaaaatgaagaggtaaagaatatgtcacttgaactcaactcaaaacttgaaagcctcctagaagaaaaaattctacttcaacaaaaagtgaaatatttagaagagcaactaactaacttaattcaaaatcaacctgaaactccagaacacccagaagtaacttcacttaaagtaagtagaaaataaagagggttcatgtttatgttttcaatgtggatcttttaaaaaaaatatttctaaggcatgccatttgaaatactttgttgcattgttgaaatacttttttttccaagaaaaataatctccagaaaataaaatttcctattataatttcaagttagttttttgtttccctaatgttatatatgaaaacactgaaaatttgcatttt

SEQ ID NO: 63057 - DNA, 796 bp, Homo sapiens
atatatagagttaagaagtctaggtctgcttccagaagaaaacagttccacgttgcttgaaattgaaaatcaagataaaaatgttcacaattaagctccttctttttattgttcctctagttatttcctccagaattgatcaagacaattcatcatttgattctctatctccagagccaaaatcaagatttgctatgttagacgatgtaaaaattttagccaatggcctccttcagttgggacatggtcttaaagactttgtccataagacgaagggccaaattaatgacatatttcaaaaactcaacatatttgatcagtctttttatgatctatcgctgcaaaccagtgaaatcaaagaagaagaaaaggaactgagaagaactacatataaactacaagtcaaaaatgaagaggtaaagaatatgtcacttgaactcaactcaaaacttgaaagcctcctagaagaaaaaattctacttcaacaaaaagtgaaatatttagaagagcaactaactaacttaattcaaaatcaacctgaaactccagaacacccagaagtaacttcacttaaaacttttgtagaaaaacaagataatagcatcaaagaccttctccagaccgtggaagaccaatataaacaattaaaccaacagcatagtcaaataaaagaaatagaaaatcagctcagaaggactagtattcaagaacccacagaaatttctctatcttccggtaaacatgatggggcattctgctgatgtccacatttatacagaggtgacatacagttgcc

SEQ ID NO: 63058 - DNA, 2910 bp, Homo sapiens
atatatagagttaagaagtctaggtctgcttccagaagaaaacagttccacgttgcttgaaattgaaaatcaagataaaaatgttcacaattaagctccttctttttattgttcctctagttatttcctccagaattgatcaagacaattcatcatttgattctctatctccagagccaaaatcaagatttgctatgttagacgatgtaaaaattttagccaatggcctccttcagttgggacatggtcttaaagactttgtccataagacgaagggccaaattaatgacatatttcaaaaactcaacatatttgatcagtctttttatgatctatcgctgcaaaccagtgaaatcaaagaagaagaaaaggaactgagaagaactacatataaactacaagtcaaaaatgaagaggtaaagaatatgtcacttgaactcaactcaaaacttgaaagcctcctagaagaaaaaattctacttcaacaaaaagtgaaatatttagaagagcaactaactaacttaattcaaaatcaacctgaaactccagaacacccagaagtaacttcacttaaaacttttgtagaaaaacaagataatagcatcaaagaccttctccagaccgtggaagaccaatataaacaattaaaccaacagcatagtcaaataaaagaaatagaaaatcagctcagaaggactagtattcaagaacccacagaaatttctctatcttccaagccaagagcaccaagaactactccctttcttcagttgaatgaaataagaaatgtaaaacatgatggcattcctgctgaatgtaccaccatttataacagaggtgaacatacaagtggcatgtatgccatcagacccagcaactctcaagtttttcatgtctactgtgatgttatatcaggtagtccatggacattaattcaacatcgaatagatggatcacaaaacttcaatgaaacgtgggagaactacaaatatggttttgggaggcttgatggagaattttggttgggcctagagaagatatactccatagtgaagcaatctaattatgttttacgaattgagttggaagactggaaagacaacaaacattatattgaatattctttttacttgggaaatcacgaaaccaactatacgctacatctagttgcgattactggcaatgtccccaatgcaatcccggaaaacaaagatttggtgttttctacttgggatcacaaagcaaaaggacacttcaactgtccagagggttattcaggaggctggtggtggcatgatgagtgtggagaaaacaacctaaatggtaaatataacaaaccaagagcaaaatctaagccagagaggagaagaggattatcttggaagtctcaaaatggaaggttatactctataaaatcaaccaaaatgttgatccatccaacagattcagaaagctttgaatgaactgaggcaaatttaaaaggcaataatttaaacattaacctcattccaagttaatgtggtctaataatctggtattaaatccttaagagaaagcttgagaaatagattttttttatcttaaagtcactgtctatttaagattaaacatacaatcacataaccttaaagaataccgtttacatttctcaatcaaaattcttataatactatttgttttaaattttgtgatgtgggaatcaattttagatggtcacaatctagattataatcaataggtgaacttattaaataacttttctaaataaaaaatttagagacttttattttaaaaggcatcatatgagctaatatcacaactttcccagtttaaaaaactagtactcttgttaaaactctaaacttgactaaatacagaggactggtaattgtacagttcttaaatgttgtagtattaatttcaaaactaaaaatcgtcagcacagagtatgtgtaaaaatctgtaatacaaatttttaaactgatgcttcattttgctacaaaataatttggagtaaatgtttgatatgatttatttatgaaacctaatgaagcagaattaaatactgtattaaaataagttcgctgtctttaaacaaatggagatgactactaagtcacattgactttaacatgaggtatcactataccttatttgttaaaatatatactgtatacattttatatattttaacacttaatactatgaaaacaaataattgtaaaggaatcttgtcagattacagtaagaatgaacatatttgtggcatcgagttaaagtttatatttcccctaaatatgctgtgattctaatacattcgtgtaggttttcaagtagaaataaacctcgtaacaagttactgaacgtttaaacagcctgacaagcatgtatatatgttttgcatgtttatcgacatcacaacagatccctaaatccctaaatccctaaagattagatacaaattttttaccacagtatcacttgtcagaatttatttttaaatatgattttttaaaactgccagtaagaaattttaaattaaacccatttgttaaaggatatagtgcccaagttatatggtgacctacctttgtcaatacttagcattatgtatttcaaattatccaatatacatgtcatatatatttttatatgtcacatatataaaagatatgtatgatctatgtgaatcctaagtaaatattttgttccagaaaagtacaaaataataaaggtaaaaataatctataattttcaggaccacagactaagctgtcgaaattaacgctgatttttttagggccagaataccaaaatggctcctctcttcccccaaaattggacaatttcaaatgcaaaataattcattatttaatatatgagttgcttcctctatttggtttccttaaa

SEQ ID NO: 63059 - DNA, 2910 bp, Homo sapiens
atatatagagttaagaagtctaggtctgcttccagaagaaaacagttccacgttgcttgaaattgaaaatcaagataaaaatgttcacaattaagctccttctttttattgttcctctagttatttcctccagaattgatcaagacaattcatcatttgattctctatctccagagccaaaatcaagatttgctatgttagacgatgtaaaaattttagccaatggcctccttcagttgggacatggtcttaaagactttgtccataagacgaagggccaaattaatgacatatttcaaaaactcaacatatttgatcagtctttttatgatctatcgctgcaaaccagtgaaatcaaagaagaagaaaaggaactgagaagaactacatataaactacaagtcaaaaatgaagaggtaaagaatatgtcacttgaactcaactcaaaacttgaaagcctcctagaagaaaaaattctacttcaacaaaaagtgaaatatttagaagagcaactaactaacttaattcaaaatcaacctgaaactccagaacacccagaagtaacttcacttaaaacttttgtagaaaaacaagataatagcatcaaagaccttctccagaccgtggaagaccaatataaacaattaaaccaacagcatagtcaaataaaagaaatagaaaatcagctcagaaggactagtattcaagaacccacagaaatttctctatcttccaagccaagagcaccaagaactactccctttcttcagttgaatgaaataagaaatgtaaaacatgatggcattcctgctgaatgtaccaccatttataacagaggtgaacatacaagtggcatgtatgccatcagacccagcaactctcaagtttttcatgtctactgtgatgttatatcaggtagtccatggacattaattcaacatcgaatagatggatcacgagaattttggttgggcctagagaagatatactccatagtgaagcaatctaattatgttttacgaattgagttggaagactggaaagacaacaaacattatattgaatattctttttacttgggaaatcacgaaaccaactatacgctacatctagttgcgattactggcaatgtccccaatgcaatcccggaaaacaaagatttggtgttttctacttgggatcacaaagcaaaaggacacttcaactgtccagagggttattcaggaggctggtggtggcatgatgagtgtggagaaaacaacctaaatggtaaatataacaaaccaagagcaaaatctaagccagagaggagaagaggattatcttggaagtctcaaaatggaaggttatactctataaaatcaaccaaaatgttgatccatccaacagattcagaaagctttgaatgaactgaggcaaatttaaaaggcaataatttaaacattaacctcattccaagttaatgtggtctaataatctggtattaaatccttaagagaaagcttgagaaatagattttttttatcttaaagtcactgtctatttaagattaaacatacaatcacataaccttaaagaataccgtttacatttctcaatcaaaattcttataatactatttgttttaaattttgtgatgtgggaatcaattttagatggtcacaatctagattataatcaataggtgaacttattaaataacttttctaaataaaaaatttagagacttttattttaaaaggcatcatatgagctaatatcacaactttcccagtttaaaaaactagtactcttgttaaaactctaaacttgactaaatacagaggactggtaattgtacagttcttaaatgttgtagtattaatttcaaaactaaaaatcgtcagcacagagtatgtgtaaaaatctgtaatacaaatttttaaactgatgcttcattttgctacaaaataatttggagtaaatgtttgatatgatttatttatgaaacctaatgaagcagaattaaatactgtattaaaataagttcgctgtctttaaacaaatggagatgactactaagtcacattgactttaacatgaggtatcactataccttatttgttaaaatatatactgtatacattttatatattttaacacttaatactatgaaaacaaataattgtaaaggaatcttgtcagattacagtaagaatgaacatatttgtggcatcgagttaaagtttatatttcccctaaatatgctgtgattctaatacattcgtgtaggttttcaagtagaaataaacctcgtaacaagttactgaacgtttaaacagcctgacaagcatgtatatatgtttaaaattcaataaacaaagacccagtccctaaattatagaaatttaaattattcttgcatgtttatcgacatcacaacagatccctaaatccctaaatccctaaagattagatacaaattttttaccacagtatcacttgtcagaatttatttttaaatatgattttttaaaactgccagtaagaaattttaaattaaacccatttgttaaaggatatagtgcccaagttatatggtgacctacctttgtcaatacttagcattatgtatttcaaattatccaatatacatgtcatatatatttttatatgtcacatatataaaagatatgtatgatctatgtgaatcctaagtaaatattttgttccagaaaagtacaaaataataaaggtaaaaataatctataattttcaggaccacagactaagctgtcgaaattaacgctgatttttttagggccagaataccaaaatggctcctctcttcccccaaaattggacaatttcaaatgcaaaataattcattatttaatatatgagttgcttcctctatttggtttccttaaa

SEQ ID NO: 63060 - DNA, 2909 bp, Homo sapiens
atatatagagttaagaagtctaggtctgcttccagaagaaaacagttccacgttgcttgaaattgaaaatcaagataaaaatgttcacaattaagctccttctttttattgttcctctagttatttcctccagaattgatcaagacaattcatcatttgattctctatctccagagccaaaatcaagatttgctatgttagacgatgtaaaaattttagccaatggcctccttcagttgggacatggtcttaaagactttgtccataagacgaagggccaaattaatgacatatttcaaaaactcaacatatttgatcagtctttttatgatctatcgctgcaaaccagtgaaatcaaagaagaagaaaaggaactgagaagaactacatataaactacaagtcaaaaatgaagaggtaaagaatatgtcacttgaactcaactcaaaacttgaaagcctcctagaagaaaaaattctacttcaacaaaaagtgaaatatttagaagagcaactaactaacttaattcaaaatcaacctgaaactccagaacacccagaagtaacttcacttaaaaccaatataaacaattaaaccaacagcatagtcaaataaaagaaatagaaaatcagctcagaaggactagtattcaagaacccacagaaatttctctatcttccaagccaagagcaccaagaactactccctttcttcagttgaatgaaataagaaatgtaaaacatgatggcattcctgctgaatgtaccaccatttataacagaggtgaacatacaagtggcatgtatgccatcagacccagcaactctcaagtttttcatgtctactgtgatgttatatcaggtagtccatggacattaattcaacatcgaatagatggatcacaaaacttcaatgaaacgtgggagaactacaaatatggttttgggaggcttgatggagaattttggttgggcctagagaagatatactccatagtgaagcaatctaattatgttttacgaattgagttggaagactggaaagacaacaaacattatattgaatattctttttacttgggaaatcacgaaaccaactatacgctacatctagttgcgattactggcaatgtccccaatgcaatcccggaaaacaaagatttggtgttttctacttgggatcacaaagcaaaaggacacttcaactgtccagagggttattcaggaggctggtggtggcatgatgagtgtggagaaaacaacctaaatggtaaatataacaaaccaagagcaaaatctaagccagagaggagaagaggattatcttggaagtctcaaaatggaaggttatactctataaaatcaaccaaaatgttgatccatccaacagattcagaaagctttgaatgaactgaggcaaatttaaaaggcaataatttaaacattaacctcattccaagttaatgtggtctaataatctggtattaaatccttaagagaaagcttgagaaatagattttttttatcttaaagtcactgtctatttaagattaaacatacaatcacataaccttaaagaataccgtttacatttctcaatcaaaattcttataatactatttgttttaaattttgtgatgtgggaatcaattttagatggtcacaatctagattataatcaataggtgaacttattaaataacttttctaaataaaaaatttagagacttttattttaaaaggcatcatatgagctaatatcacaactttcccagtttaaaaaactagtactcttgttaaaactctaaacttgactaaatacagaggactggtaattgtacagttcttaaatgttgtagtattaatttcaaaactaaaaatcgtcagcacagagtatgtgtaaaaatctgtaatacaaatttttaaactgatgcttcattttgctacaaaataatttggagtaaatgtttgatatgatttatttatgaaacctaatgaagcagaattaaatactgtattaaaataagttcgctgtctttaaacaaatggagatgactactaagtcacattgactttaacatgaggtatcactataccttatttgttaaaatatatactgtatacattttatatattttaacacttaatactatgaaaacaaataattgtaaaggaatcttgtcagattacagtaagaatgaacatatttgtggcatcgagttaaagtttatatttcccctaaatatgctgtgattctaatacattcgtgtaggttttcaagtagaaataaacctcgtaacaagttactgaacgtttaaacagcctgacaagcatgtatatatgtttaaaattcaataaacaaagacccagtccctaaattatagaaatttaaattattcttgcatgtttatcgacatcacaacagatccctaaatccctaaatccctaaagattagatacaaattttttaccacagtatcacttgtcagaatttatttttaaatatgattttttaaaactgccagtaagaaattttaaattaaacccatttgttaaaggatatagtgcccaagttatatggtgacctacctttgtcaatacttagcattatgtatttcaaattatccaatatacatgtcatatatatttttatatgtcacatatataaaagatatgtatgatctatgtgaatcctaagtaaatattttgttccagaaaagtacaaaataataaaggtaaaaataatctataattttcaggaccacagactaagctgtcgaaattaacgctgatttttttagggccagaataccaaaatggctcctctcttcccccaaaattggacaatttcaaatgcaaaataattcattatttaatatatgagttgcttcctctatttggtttccttaaa

SEQ ID NO: 63061 - DNA, 239 bp, Homo sapiens
atcagtttatatccactaatttttaaaatattttaaccattgttaaatgtacaattcagtagcattaagtaaattcacaatgttgtacaaccatcactactatttatttccaaaactttttcatcacccagatactcttccttaatttttcaggcatattttatatatttgaaacttttttcaaaatttgagtcagtgttgtattgtataaagctttatcctttctgttcaaaatcatg

SEQ ID NO: 63062 - DNA, 580 bp, Homo sapiens
gggagatgcaggcggggagacacaaggtagaaggggcaaagtcctcacctaggaccttgagggagttaatgtgtaatattctaggatataagcttgaccacgagttgagaccctgagcacaggcctccaggagccgctgggagctgccgccaggagctgtcaccatgacgggggaacttgaggttaagaacatggacatgaagccggggtcaaccctgaagatcacaggcagcatcgccgatggcactgatggctttgtaattaatctgggccaggggacagacaagctgaacctgcatttcaaccctcgcttcagcgaatccaccattgtctgcaactcattggacggcagcaactgggggcaagaacaacgggaagatcacctgtgcttcagcccagggtcagaggtcaagttcacagtgacctttgagagtgacaaattcaaggtgaagctgccagatgggcacgagctgacttttcccaacaggctgggtcacagccacctgagctacctgagcgtaaggggcgggttcaacatgtcctctttcaagttaaaagaataaaagacttccagccgaga

SEQ ID NO: 63063 - DNA, 632 bp, Homo sapiens
gggagatgcaggcggggagacacaaggtagaaggggcaaagtcctcacctaggaccttgagggagttaatgtgtaatattctaggatataagcttgaccacgagttgagaccctgagcacaggcctccaggagccgctgggagctgccgccaggagctgtcaccatgacgggggaacttgaggttaagaacatggacatgaagccggggtcaaccctgaagatcacaggcagcatcgccgatggcactgatggctttgtaattaatctgggccaggggacagacaagctgaacctgcatttcaaccctcgcttcagcgaatccaccattgtctgcaactcattggacggcagcaactgggggcaagaacaacgggaagatcacctgtgcttcagcccagggtcagaggtcaagttcacagtgacctttgagagtgacaaattcaaggtgaagctgccagatgggcacgagctgacttttcccaacaggctgggtcacagccacctgagctacctgagcgtaaggggcgggttcaacatgtcctctttcaagttaaaagaataaaagacttccagccgagagagcgatgcggcagatcctttattaacttaacccaacacaccagacgcagta

SEQ ID NO: 63064 - DNA, 548 bp, Homo sapiens
cctgagctacctgagcgtaaggggcgggttcaacatgtcctctttcaagttaaaagaataaaagacttccagccgagaagccgagattctctgtcctggttcttcttccgagtcacaccaggatcaacagagcttgggtgtgttcccctatccctacctgcagttcctgccccagggctaaaagcaaacaaaataatctgtttttatcgagtcttcctgtggcaagaactgtggcttgtgactcctttctctcttgggtccctcaagtttacaaaaacatgggatacccctggtctgaggacctctgaatgaaggcaccccatgatccagaatgtcctgctctcagggatcctgaggtcccgtagtgatcctgcctcctgccacacatcctctggttgcatacctgtagtgacagggagtgcaccacctcacgttagctgtttgtggctaaatttaaccggtcttccgatacctaaggagggcatttctctttccgtgcattttaatgctcctggcattttcataatactgaggaggaaacagatatg

SEQ ID NO: 63065 - DNA, 1127 bp, Homo sapiens
gggagatgcaggcggggagacacaaggtagaaggggcaaagtcctcacctaggaccttgagggagttaatgtgtaatattctaggatataagcttgaccacgagttgagaccctgagcacaggcctccaggagccgctgggagctgccgccaggagctgtcaccatgacgggggaacttgaggttaagaacatggacatgaagccggggtcaaccctgaagatcacaggcagcatcgccgatggcactgatggctttgtaattaatctgggccaggggacagacaagctgaacctgcatttcaaccctcgcttcagcgaatccaccattgtctgcaactcattggacggcagcaactgggggcaagaacaacgggaagatcacctgtgcttcagcccagggtcagaggtcaagttcacagtgacctttgagagtgacaaattcaaggtgaagctgccagatgggcacgagctgacttttcccaacaggctgggtcacagccacctgagctacctgagcgtaaggggcgggttcaacatgtcctctttcaagttaaaagaataaaagacttccagccgagaaaaaaacaaacacaaaaaaaaaaaaaacaaagaagagggagggacgcgctctcatagaatatttccctcccgagagggggccccaggttatagacgccgttcccgcagttttctctggataccagagggggcccccctatatagggacagctgcgtatatataagagcctgaggacgctgtggcccgggcagttttacaacaccgttctgtgagccgtgtgcgacacacctgccgtatcacctggggaacacctttgtggcagaaggagcacccttatatcttcgggggggggggcacccacataactgggcgggcccacaatacttactccactacgagggaagtatttttaaacgggccctcatagggggcaaagttctctacaagacagctttctacaaggggctgctactaacggtgtgtggttaacccacttcgccggcctaattttgttgctgtatcacggccttagaaaaagtgtggtgcgcgaccaacacggggagagaatagtagtattttggcgcaacactttttttatccctgcgg

SEQ ID NO: 63066 - DNA, 440 bp, Homo sapiens
tcccatgtatttgagaagttgaagtcagtaagtgaatcaaaagatattaagcatttattaattatttttctgtgccacaaagggacagaatttttagaattgctggagaaaggcagaagacaagactgtaaaggtaaatatgaaccaaattgtgaaaggactgtaggatttcatggtaggaatagattaccaacagcagagtgggagaagtaggtaagtatgggcatgatgaaggcgaccctaggcaggctaggataaaactctatgtaatcattattttatgtaactacctgaaaaaaaaaataaggctttagtttggatgcagggtggtggtatgctcttattttcaaattaaaagtaagatacagacttttactaagcagaaagatgattataatttggaagaacctgataactttcactatccgtggcagcctggt

SEQ ID NO: 63067 - DNA, 229 bp, Homo sapiens
caaagaggagacaccatatatatttttggaatgaatgaaacagaagcttagagtcagagattgtgggtttggatgccaactctgtatcccactgacaatttttccgagcctcagtttgctcatctcatcagtaaaatggggaatgtacacttccctcacagggtggctgtgagattaaagtaagaagacacctttggaaatgctagtttgctgcagatttggctagtac

SEQ ID NO: 63068 - DNA, 421 bp, Homo sapiens
tcctgtaaattcccactgtagatcctcagcactggcagtttcctctacctgaagcattctttccctgatcgtgccctgtttggcttcttcttgactttcaggtcatagcttctcagtcttctgagagatcttttctgaccattacccccaaaccgaagaaaccacagttactatttcatcctgctttaattctcttcatagcattacaccacttttttaatctgtttaatatttgtcatatccttcattacaatgttaagctctctaagagtagggactaatttgatcttgttcaccatatgtaagcacccaatatatattcatgaataggtagataatgaatgaatgaatgaatgagcaaatgaacataggtagtaccttaaagactgctgaaattttaggagccagtgctgggactatc

SEQ ID NO: 63069 - DNA, 188 bp, Homo sapiens
gaccctatgtcagatactaggtaagcatctgtgatacaaagatgactatgcggagtttcttgtgtctttatgtaaaatgtcttcactacattttgatttggaagaacagctttctcatcataagtcaagcctactcatcagcattggatttctcttttatcataataaaggtattttgaagattcatc

SEQ ID NO: 63070 - DNA, 390 bp, Homo sapiens
ttcatacataaacaggggttagtaattaaaatactaggcattttgttaagcagaatttgggggaaaaaagaagaagaaaagaaaagattacaaccagcaaccagagtcagattatcagatttccttactcctttctagttctactccaagattagacattgggacctaccaaaggagaaagggctgcagaaatgtgtgtagtcagacaggatagctagagaaccaaaggcccttctctccttttcccacccatacccccaagtgacagaacctgcttccagaaacttgcaatctgggggagcagaaaatgcaagcttgctataggcaggcagatcccagagaaaaagccaaggaggagaactgagttatacttgctcactgcttatttcc

SEQ ID NO: 63071 - DNA, 333 bp, Homo sapiens
actggtattcttacttacaattgttctctcatcttcaaaacaacctagctggtttggagaacagtctttccatcgttaaaatgtggccatgtacatttcaattcaaaattattcagtggctctccatattctgacacattatattaaaatgcaaccttggactcaggcctcatataacaatcgcttgaaccatgcagacatattcactgatccaaccaaacttgtgaccttcccccttgaccccttgtatttatgctgatgtgaaatgccattgttgttatgtatcctgtaaggatcatctcaaatataaaaatgtccttaagtatttcctgc

SEQ ID NO: 63072 - DNA, 256 bp, Homo sapiens
cacaaattcaggaaaattaccagaagccgctggaagaattggaggtattgaaagaagcagcaagccacgtcctttcaaagcacaacaatgaactaaaggcggctgaggcgctcgtgagggaagctgaggcaaagatgcaggaaagcaaccacctgctgctcatggtcaatgctaatctgagagaattcagtgataaaaagctacatgttcaagaagaacaaaatctgacctcagagctcattgtccaaggaagagg

SEQ ID NO: 63073 - DNA, 289 bp, Homo sapiens
ctttatgaagtagtaattcctgagaggtgtgctggctgaaaacataataggttctggaagagccaggtaaatgcctggatttagacatgcaggggttaatcaaaataatttaggagcgttttcagctggtcagcctcatatgggatcttcgaacccgtggcgagaagaaaaccggtgtttaggaagcaccaggcacagtgctcggaagggagaggctggccggccagtgtgcagctcagctgcttcgaggacggaacctgcagcctggctgtgtcccagcagacccagg

SEQ ID NO: 63074 - DNA, 223 bp, Homo sapiens
atttcacaggcgaacaatttctaaagattaacaaagtctaggaatgtctgaggcagtgaaatgtcttaggcaaagataaaatttaccaggattagaacagccaaggaattaggaaatcgtgttgaacagattgcccagaaaattggcaggacttaaagatggagtcaaggaaaaatgtcatccagaaactaaatcaatgcaaggaacatagggaagctgatag

SEQ ID NO: 63075 - DNA, 461 bp, Homo sapiens
gcctctaatcccagctacttgggaggctgaggtaggagaatcacttgaacccaggaggcagaggttgcagtgagccaagattatgccgctgcactccagcctgggcaacagagcgagactctgtctcaaaaaaataatatggtaataataataaaagcagtgcccagagaacaaggattgttggctgttccaccccagggggccccttgcacaggaggtgccatctctgcctcccaaagctctaagagccactgtcccccatcccaagagacagggtcttgctttgtcacccaggctggaatgcagtggtgcaatcacggttcactgtagcctcgacctcccaggctcaggtgatcttcccgcctcagcctcccaagtagctgggactataggcaggcaccaccatgtccagctaatttttttttttaattttttgtagagatagggttttgccatgttgc

SEQ ID NO: 63076 - DNA, 176 bp, Homo sapiens
gatcatttaccctctccaagcttttggtgttttattatcattactcccattttacagatgtggaaacagaggctccagcaggtaattgtcagagctggaatgcaaactcaggtctctctcaccctttctagtacactgatagaaggcagtggctcggcagtgggcaggaagtaaaa

SEQ ID NO: 63077 - DNA, 594 bp, Homo sapiens
cattgaaaacatgactttcataaagcttgaaacagaagaatctcatttgcatgtcttccttctctactaaatataagcagattcctcctcctggtcaagtgatgtgggttagagacttctcaatctttccagtcctaaatgtatatctcatcattccagcgatgattccctccaacatggtatagggtttaaatcatgaaaaataattcctttcaatttagactctcatattttcattgaactatatttttccacgttccctaccctttgagtcttacagaagaaacctattaaaatatcacatcactatataagaggacagatattttaatttgcttggctatagtaatcactttactatgtatatttatatcaaagcaccatgttgtacacctaaaatatgtaaaatttgaaaaaaagttgaaaaatatcaaaataattatatcagtcaggcaatatttttagtgaaaagacattggctttttatttggcacaaagtgaacctcaactcaagcagttatttcatgcttattttctaagcagataagcttcaaacatattaaagtatctagttacgtagattctttactctta

SEQ ID NO: 63078 - DNA, 667 bp, Homo sapiens
gtataaatttgtattatttttgatattacaactttgtattaaaaaggaaaatatatttaggtgtttgtcatagattttttttcatatgcaactcaaaacacattcttatgtcaaaatacaatagcaaaatacaagtcaatatttactcataattaaatgcaaactttatgaaactggtggaaagtgtggaaaaatttaagtaaatttttacctctactaaaaattatttagacaacttaaaggaatactggattcaaacttcagttactattcactgtaaatattatgatcaactgaactgacttaccattcatgggataaaacatgatacaattctcagtatttgcttttctgttaagagcttggaatatgactgatgcttcagtgtcatttttttattattgaatataaaattaggtgcaatagatacatttattgtagccttaagaaggaaatcaatgctaagctgttgggcataaaactttacagtaacattagataacaagataataaaacactttaattttaatcgaccttttaagaatgatctttattattctatccaaatcaaggtagacttcaaaatttatagtttgaacaggaagaaagtagtgaatacaaaattcttaaaattggttcatatgatcatttttttattaatagcatg

SEQ ID NO: 63079 - DNA, 251 bp, Homo sapiens
aatccccggagataactaaattcagttttgttctgaaatttttattttctgggtagaaacatattttcatgaagttataattatattcattttctttctcagcccaatagtattaagaatgatgaatgatcaactcatgtttctggaaagagcatttattgatccattagggttaccagacaggcctttttataggtaagaaaagaaaatatgactcctttctgtaatatcactttttcttctaattattt

SEQ ID NO: 63080 - DNA, 1641 bp, Homo sapiens
taggttaaaaatgcccagctggcaggggccaaaggagtcattctctactccgaccctgctgactactttgctcctggggtgaagtcctatccagacggttggaatcttcctggaggtggtgtccagcgtggaaatatcctaaatctgaatggtgcaggagaccctctcacaccaggttacccagcaaatgaatatgcttataggcgtggaattgcagaggctgttggtcttccaagtattcctgttcatccaattggatactatgatgcacagaagctcctagaaaaaatgggtggctcagcaccaccagatagcagctggagaggaagtctcaaagtgccctacaatgttggacctggctttactggaaacttttctacacaaaaagtcaagatgcacatccactctaccaatgaagtgacgagaatttacaatgtgataggtactctcagaggagcagtggaaccagacagatatgtcattctgggaggtcaccgggactcatgggtgtttggtggtattgaccctcagagtggagcagctgttgttcatgaaattgtgaggagctttggaacactgaaaaaggaagggtggagacctagaagaacaattttgtttgcaagctgggatgcagaagaatttggtcttcttggttctactgagtgggcagaggagaattcaagactccttcaagagcgtggcgtggcttatattaatgctgactcatctatagaaggaaactacactctgagagttgattgtacaccgctgatgtacagcttggtacacaacctaacaaaagagctgaaaagccctgatgaaggctttgaaggcaaatctctttatgaaagttggactaaaaaaagtccttccccagagttcagtggcatgcccaggataagcaaattgggatctggaaatgattttgaggtgttcttccaacgacttggaattgcttcaggcagagcacggtatactaaaaattgggaaacaaacaaattcagcggctatccactgtatcacagtgtctatgaaacatatgagttggtggaaaagttttatgatccaatgtttaaatatcacctcactgtggcccaggttcgaggagggatggtgtttgagctagccaattccatagtgctcccttttgattgtcgagattatgctgtagttttaagaaagtatgctgacaaaatctacagtatttctatgaaacatccacaggaaatgaagacatacagtgtatcatttgattcacttttttctgcagtaaagaattttacagaaattgcttccaagttcagtgagagactccaggactttgacaaaagcaagcatgtcatctatgctccaagcagccacaacaagtatgcaggggagtcattcccaggaatttatgatgctctgtttgatattgaaagcaaagtggacccttccaaggcctggggagaagtgaagagacagatttatgttgcagccttcacagtgcaggcagctgcagagactttgagtgaagtagcctaagaggattttttagagaatccgtattgaatttgtgtggtatgtcactcagaaagaatcgtaatgggtatattgataaattttaaaattggtatatttgaaataaagttgaatattata

SEQ ID NO: 63081 - DNA, 1734 bp, Homo sapiens
taggttaaaaatgcccagctggcaggggccaaaggagtcattctctactccgaccctgctgactactttgctcctggggtgaagtcctatccagacggttggaatcttcctggaggtggtgtccagcgtggaaatatcctaaatctgaatggtgcaggagaccctctcacaccaggttacccagcaaatgaatatgcttataggcgtggaattgcagaggctgttggtcttccaagtattcctgttcatccaattggatactatgatgcacagaagctcctagaaaaaatgggtggctcagcaccaccagatagcagctggagaggaagtctcaaagtgccctacaatgttggacctggctttactggaaacttttctacacaaaaagtcaagatgcacatccactctaccaatgaagtgacgagaatttacaatgtgataggtactctcagaggagcagtggaaccagacagatatgtcattctgggaggtcaccgggactcatgggtgtttggtggtattgaccctcagagtggagcagctgttgttcatgaaattgtgaggagctttggaacactgaaaaaggaagggtggagacctagaagaacaattttgtttgcaagctgggatgcagaagaatttggtcttcttggttctactgagtgggcagaggagaattcaagactccttcaagagcgtggcgtggcttatattaatgctgactcatctatagaaggaaactacactctgagagttgattgtacaccgctgatgtacagcttggtacacaacctaacaaaagagctgaaaagccctgatgaaggctttgaaggcaaatctctttatgaaagttggactaaaaaaagtccttccccagagttcagtggcatgcccaggataagcaaattgggatctggaaatgattttgaggtgttcttccaacgacttggaattgcttcaggcagagcacggtatactaaaaattgggaaacaaacaaattcagcggctatccactgtatcacagtgtctatgaaacatatgagttggtggaaaagttttatgatccaatgtttaaatatcacctcactgtggcccaggttcgaggagggatggtgtttgagctagccaattccatagtgctcccttttgattgtcgagattatgctgtagttttaagaaagtatgctgacaaaatctacagtatttctatgaaacatccacaggaaatgaagacatacagtgtatcatttgattcacttttttctgcagtaaagaattttacagaaattgcttccaagttcagtgagagactccaggactttgacaaaagcaacccaatagtattaagaatgatgaatgatcaactcatgtttctggaaagagcatttattgatccattagggttaccagacaggcctttttataggcatgtcatctatgctccaagcagccacaacaagtatgcaggggagtcattcccaggaatttatgatgctctgtttgatattgaaagcaaagtggacccttccaaggcctggggagaagtgaagagacagatttatgttgcagccttcacagtgcaggcagctgcagagactttgagtgaagtagcctaagaggattttttagagaatccgtattgaatttgtgtggtatgtcactcagaaagaatcgtaatgggtatattgataaattttaaaattggtatatttgaaataaagttgaatattata

SEQ ID NO: 63082 - DNA, 1876 bp, Homo sapiens
cagggtcggcggctcagcgccgtagagacaaagccgcccgcccgccagcccgctagctcctcgcgcgagctcctcctccacgggaacctccctcccctcccaggcgccgccgcagccggagcggctcccgggccctgggccgccgccggccaggaagaaatacttgtgttggctgcatttccagggatgctaccagagctcaaggctgtcacctggtcttgcccagaagagccgttcttagaggcaggacttgatgaaggctttcctgctgatggaataggtttgctagagctggccttggaattagaacccttcatgtggcctttataaatatgcgtttgagacagagttatatgcagaagttgaaaatgcctggaagatttctggtttctttcactacttatcctgcctttttgcatcgctgccagatttggatgatatgatattcagaggggcaccttaatcaaagccattcttcaacaagacccacctggcataagattgcacacataattcaagatggccagtcaacctcctgaagacactgcggagtctcaggcctctgatgagctggagtgcaaaatctgttacaatcgatacaatctgaaacagaggaaacccaaagtgctggagtgttgtcatagggtttgtgccaaatgcctctacaagatcatagactttggggactccccacaaggtgtcattgtctgtcctttctgcaggtttgagacgtgcctgccagatgatgaagttagtagcctgcccgatgacaacaacatccttgtaaacttgacttgtggaggcaaagggaagaagtgcctgccagagaaccctactgagctgctgctcacccccaagaggctggcctctctggtcagtccttctcacacgtcctccaactgcctggtcataaccatcatggaggtgcagagagagagctccccgtccctgagctccactcctgtggtagaattttataggcctgcgaagtttcgactctgtcaccactgtgtcacacaactggactgtgtggaactgcacgtccctgctgtttcagacatccatccgggtgttagtgtggttgctaggtttgctctacttcagctccttacccttaggaatctacttactggtgtctaagaaagtcacccttggggtcgtctttgtcagcctggtcccttcgagcctcgttattcttatggtgtatggtttttgccagtgtgtttgtcatgaatttctagactgtatggcacctccttcttaactgatatgcaaaataagaaattggacacacattgccctgtttgagtgtgaagttagataatttataatttattttcttttatgttctttatgattagtatccatgacattaacaaaacccttggccacatgttgacttgattggttttcctgtaggctggaagtaaaaatgttcatttctacttaggggttagcaaaattgtataagctcacacttcatggagcactgacagcagtgagtcttcccagagaaaggacagggtttctctcagcactgccagacagacggcaggggtgtggtgtgttatactatagggagagcatggatccctcctttcgtattcatggatgttctatgatggcagttggacacaagaggaaagttgctctgagacacaaagtgtgtactcctttcccaccccatacccctggtattggaacaccctagaattgtcttcaggtgttttctctcttaagtcactctctgtggtcggcgatcccattgagatacttgtttcctctgcccattctcccttgccaagaggaaactcggttccattcccttgggtagtttcaactgaataccagttttgccacattactaaggagaatg

SEQ ID NO: 63083 - DNA, 1721 bp, Homo sapiens
cagggtcggcggctcagcgccgtagagacaaagccgcccgcccgccagcccgctagctcctcgcgcgagctcctcctccacgggaacctccctcccctcccaggcgccgccgcagccggagcggctcccgggccctgggccgccgccggccagacccttcatgtggcctttataaatatgcgtttgagacagagttatatgcagaagttgaaaatgcctggaagatttctggtttctttcactacttatcctgcctttttgcatcgctgccagatttggatgatatgatattcagaggggcaccttaatcaaagccattcttcaacaagacccacctggcataagattgcacacataattcaagatggccagtcaacctcctgaagacactgcggagtctcaggcctctgatgagctggagtgcaaaatctgttacaatcgatacaatctgaaacagaggaaacccaaagtgctggagtgttgtcatagggtttgtgccaaatgcctctacaagatcatagactttggggactccccacaaggtgtcattgtctgtcctttctgcaggtttgagacgtgcctgccagatgatgaagttagtagcctgcccgatgacaacaacatccttgtaaacttgacttgtggaggcaaagggaagaagtgcctgccagagaaccctactgagctgctgctcacccccaagaggctggcctctctggtcagtccttctcacacgtcctccaactgcctggtcataaccatcatggaggtgcagagagagagctccccgtccctgagctccactcctgtggtagaattttataggcctgcgaagtttcgactctgtcaccactgtgtcacacaactggactgtgtggaactgcacgtccctgctgtttcagacatccatccgggtgttagtgtggttgctaggtttgctctacttcagctccttacccttaggaatctacttactggtgtctaagaaagtcacccttggggtcgtctttgtcagcctggtcccttcgagcctcgttattcttatggtgtatggtttttgccagtgtgtttgtcatgaatttctagactgtatggcacctccttcttaactgatatgcaaaataagaaattggacacacattgccctgtttgagtgtgaagttagataatttataatttattttcttttatgttctttatgattagtatccatgacattaacaaaacccttggccacatgttgacttgattggttttcctgtaggctggaagtaaaaatgttcatttctacttaggggttagcaaaattgtataagctcacacttcatggagcactgacagcagtgagtcttcccagagaaaggacagggtttctctcagcactgccagacagacggcaggggtgtggtgtgttatactatagggagagcatggatccctcctttcgtattcatggatgttctatgatggcagttggacacaagaggaaagttgctctgagacacaaagtgtgtactcctttcccaccccatacccctggtattggaacaccctagaattgtcttcaggtgttttctctcttaagtcactctctgtggtcggcgatcccattgagatacttgtttcctctgcccattctcccttgccaagaggaaactcggttccattcccttgggtagtttcaactgaataccagttttgccacattactaaggagaatg

SEQ ID NO: 63084 - DNA, 1736 bp, Homo sapiens
ctccgggcaccacgggggccgccgtcctggcaccaacttgaggggctgtgcggcggagggcggctgcggagcgcccgcgcgggctgcacctgctcagggagctgcccctctgttgttgttgttattttccttcttggcgtgccatcgaggcttttgggggaaaaaaagacccttcatgtggcctttataaatatgcgtttgagacagagttatatgcagaagttgaaaatgcctggaagatttctggtttctttcactacttatcctgcctttttgcatcgctgccagatttggatgatatgatattcagaggggcaccttaatcaaagccattcttcaacaagacccacctggcataagattgcacacataattcaagatggccagtcaacctcctgaagacactgcggagtctcaggcctctgatgagctggagtgcaaaatctgttacaatcgatacaatctgaaacagaggaaacccaaagtgctggagtgttgtcatagggtttgtgccaaatgcctctacaagatcatagactttggggactccccacaaggtgtcattgtctgtcctttctgcaggtttgagacgtgcctgccagatgatgaagttagtagcctgcccgatgacaacaacatccttgtaaacttgacttgtggaggcaaagggaagaagtgcctgccagagaaccctactgagctgctgctcacccccaagaggctggcctctctggtcagtccttctcacacgtcctccaactgcctggtcataaccatcatggaggtgcagagagagagctccccgtccctgagctccactcctgtggtagaattttataggcctgcgaagtttcgactctgtcaccactgtgtcacacaactggactgtgtggaactgcacgtccctgctgtttcagacatccatccgggtgttagtgtggttgctaggtttgctctacttcagctccttacccttaggaatctacttactggtgtctaagaaagtcacccttggggtcgtctttgtcagcctggtcccttcgagcctcgttattcttatggtgtatggtttttgccagtgtgtttgtcatgaatttctagactgtatggcacctccttcttaactgatatgcaaaataagaaattggacacacattgccctgtttgagtgtgaagttagataatttataatttattttcttttatgttctttatgattagtatccatgacattaacaaaacccttggccacatgttgacttgattggttttcctgtaggctggaagtaaaaatgttcatttctacttaggggttagcaaaattgtataagctcacacttcatggagcactgacagcagtgagtcttcccagagaaaggacagggtttctctcagcactgccagacagacggcaggggtgtggtgtgttatactatagggagagcatggatccctcctttcgtattcatggatgttctatgatggcagttggacacaagaggaaagttgctctgagacacaaagtgtgtactcctttcccaccccatacccctggtattggaacaccctagaattgtcttcaggtgttttctctcttaagtcactctctgtggtcggcgatcccattgagatacttgtttcctctgcccattctcccttgccaagaggaaactcggttccattcccttgggtagtttcaactgaataccagttttgccacattactaaggagaatg

SEQ ID NO: 63085 - DNA, 820 bp, Homo sapiens
acatgttccctgggcctatctcggaaggggccacaatgaccctgcaatgcacaaagtcagcgggaccctggaagatggtggtgtgggatgaggacggcttccagggccggcggcacgagttcacggccgagtgccccagcgtgctggagcttggcttcgagactgtgcgatctttgaaagtgctgagtggagcgtgggtgggcttcgagcatgctggcttccaagggcagcagtacattctggaacgaggcgaatatccaagctgggatgcctggggcggcaacacggcctaccccgccgagaggctcacctccttccggcctgcggcctgtgctaaccaccgtgactcgaggctgacaatcttcgagcaagagaacttcctgggcaagaaaggagagctgagcgatgactatccttccctccaggccatgggatgggaaggcaatgaagtagggtccttccacgtccactctggggcctgggtttgctcccagtttccgggctaccgaggatttcagtatgtgctggaatgcgatcaccattccggtgactacaaacatttccgggagtggggctctcatgccccgaccttccaggtgcagagcatccgcaggatccagcagtgaacaggggtgcggcacggaggagcgcatgcgtgcttatctgcaatggaggcgctctggaggctgtggtgtgttctctccttctgcctccccctgtaacctgtgtgaacccagcacccatgtgaactggtccgtgcacagtcagcacaaaaaactcaaacgaataaaaaagagaaagtctggtattaaaaaaactt

SEQ ID NO: 63086 - DNA, 903 bp, Homo sapiens
cagtgttggtgttcactcactatatgtctttaagaaaattaaaactatggaaaatttgtctagcatatcagaagttgtaaatgctatatctggtatccagaggctggctgtaaaaagttccttggggtcactctatctcacattttttttggttagcattttaaaaatgcaaagccacatactttgaaatatattattccaaattgagctcccttccctttgcacatattttttcctccccttattgaagtcagctctaaccccaaattctagtatccaaaagtatttttatttgtataatgctatctgaaaaatgtgtttatattatattttcagagctgcaattcttattcgccatttcaatacctagagatagagagtcttgtatttgaagccacacacactggtgtaatatgcttagtactctaggtcaaggatttgttggtaaatggaacattttagcatagtcatgatttttggttgcctagacatcaggtaaacattcagtacactaaagaaactatcctggacactccctcctgcttccaccaatttttttctcacccccttttcaaaaattgaaaactctatgagtgtctttttgagaccataaagcagactttagtaactttctatttctgtaagtactaaatgtctggcattttaaacttttgtagaatacattatgttggacactggaataatactatttattttcacctgtgaaaaatgacttcattgtacttgaaacacctcctttgcatttctccatttgtgccattcactagtggaaataaattgtattataccatgatctactggctttttaaaactgtattaaatatgcacatttttggtatagctattatcatttgtatgtatatattgtatatacatatgagt

SEQ ID NO: 63087 - DNA, 485 bp, Homo sapiens
gggggcttctgctagattccaccaacaggacgaacaagagggaaacaaaggcaagaggaagaagggacttgctccattctaatcagccttattgcacccctcagagatcacagcagcagtcagtgctctcctcagagatctgaattctactttcatgcggcccctcccctgagctcctgagatagccaatgtttgagccacctcctcagaagtttgagcctcaacaccgtgggatcccttctttgtgctccagagatccagtaacagccagccatcaccctctcttcattcttcataggcctgaactaaggtgttcagggccctccttcaagcttttaggttctgatgactccaaccacttcttttgttccatcctttcctagctctaggaatggtagctgctacctgcagtgattacctgttaccttttataattccttttgaccaatttcccatattaaaatatttctcaataactaaaaaga

SEQ ID NO: 63088 - DNA, 1007 bp, Homo sapiens
  misc_feature (41)..(41): n is a, c, g, or t
  misc_feature (495)..(495): n is a, c, g, or t
  misc_feature (825)..(825): n is a, c, g, or t
  misc_feature (901)..(901): n is a, c, g, or t
ctaatctaaaatttgtttgtatgttttataggtatgatttncccaattttgctgtcctgagaggaaatattacaaatgatagctaggtttcttagataattggagaaagtgctgtgtaaacatcaaaatattcagggcatttgttattatttatgcagaaatatagccaaaatactggcatattttcagttagcaatataatagtaataatagaaagtaaaacattttaaaagaggtttttctggaaattttttcctcaggatcacaaaaagtttttatttttcataagtatttcagtgatataatgagcacaagatacgttttgatgaaaagtaatgtttacatgaaaaaggaaatgcttattgatatttaaagacaattccctactctctctccttttccacatggtgaagtcgggagctccagatagaaatccaaagagagagaaagacaggggcagggaaggtacagtgtggaataatgtggactgtctcncatgacacttaagaggtcatgtgatgctagtgactttgctgatgtgtcaaggctagggctgagaggctgtgtccagcactgtcatctccactacctgaggcagaagcagaactgcagccggggcctccctgtgcttccagcactgaaagtaaagtgaacaagggttatgtggtcaacatgtgtgatttcttatagggaattttggttttgtattactaaaatacatagggtctggtgcaatgactcatacctataattccagtgcttttgggaggaaaaggcaggaggatgtcttgagtccaggagtttgaaactagcctaggcaacatngcgagatgccgtctctacaaaaatgaaaaaaatttgtctgagcgtggtggcatgctcctatagtccctattacttnggaggctgaggcgggaggattgcttgagcctaggagtttgaggctacagtgataccgattgcatcactgcattccagcctaggcaacagagcaagactccatctct

SEQ ID NO: 63089 - DNA, 465 bp, Homo sapiens
cctgggcaacatagggagaccccatctttaaaaaaactaaaaaaattagctgagtgtagtggtgcttgcctgtagtcctagctacctgggaggctgacatgggtagatccccttaagtccccaggaggtccaaggctgcagtgagtccatgatggggccactgcactcccagcttgggtgaccagagcgagatattctgtctcaaaaacaagcaaaactatgaaaaaaaagtcaacatttcttgaaatacttctcatatttggtagaggagggagatatattgggataaaggacataggaagataggattttattataatattaatttctgtagttattcaacacaaattaatttttattgagcatttgctattagggcagtcactgggcttttacgtcagaatatagagattaattcctttccttaaggatctaatcatacaatggatgttttagattagaaaa

SEQ ID NO: 63090 - DNA, 307 bp, Homo sapiens
atggaatgtcgggcaaagctcccctcccctctccagcaggcttgaggatggcactgtcacctccaccttagagatggccactgtcacctgcccaagccatcgagagacaaagcacagcccctgtctacctgacagcggggtctgtcttctttctttctaccaccacctgcctccagtagagggattcctcagaaatgaccttccaggtgaaaatccattcatccctcgccctccatcccaccccataatacagtgtattctctgaggctctttttaggagctgagttaataaagactgtcaaatccc

SEQ ID NO: 63091 - DNA, 263 bp, Homo sapiens
tttctaataagaacataaaataaaggctaattaaaagaaggtgactgagtccaggaaggcactaattaaagatgatatacagccaggtaaaaaagaacaattcacaggcacaagactatataaccattgttttattttcaaatgttatacaaaatatactttactgaactataattgatcattaatagtggcacagtctttagatttggaataacttggaaataaatcccaaccctgtcacttactaaatccataatttggca

SEQ ID NO: 63092 - DNA, 402 bp, Homo sapiens
ctaaattgtaccctgtaaatatgtagaattacaatatgccaatgaaaaatttaaaaatttcattttaatgtataaataggaatgtgagttcattcttttaaggtgagactacaaatgtcagagaaaccagatgtgtgggtcagctaaaatagtttccccgaggaatacaaaatgatcagaagggtccagggtgagtgtgaatctgaataagggaaatgggtgcactactgagtggctaatgacagcaggttctaatgtatccatgttcacaaaagggagatgtctggtaggcaaactgagtctacacactggcttcacgttaggtacaggaaaatatggttactgctaagaaacccccatactctttgttttctaacctttttttttcaaattaaatgcatt

SEQ ID NO: 63093 - DNA, 558 bp, Homo sapiens
actcaataaaataaaatatctttgaaacttcatcaaatacatttggcagtgagcagaagttagattgctggtagaaagaaattatccttcttggaaagtaaaaaaaaaatgcttaagtaaaattgcagcagttttgacatgtgtattttatgtttcagaaattctacaggttataggtttataaatggagaactggtcttggatttaaatgaattggcatcgtatctcagacttctagctttctacccatgtgaatttaggtgcgtactaatcacatatgtgttttaagtttatcactggctatatacatggttacttttgtatatgcctgtgcattgaatgaaaatacctggcatgtggttgttataagcaatagacagtttttggccagagagccaggcagacaagtgttaatatcacttaagccctctgtgtctcaagttcaaaatttctaaaatgagtgaatataatatttgtttgaattaaagtatacaaagcatgtatctcagtgtctaagacattgtaagacaccaataaatgtccagtatttctgttgtt

SEQ ID NO: 63094 - DNA, 540 bp, Homo sapiens
tccagcaccacctgcagaagctagagggccgccgcctggactttgactaaaagaagcggcagggcaagatccccgatgaggagctgcgccaggcgctggagaagtttgaggactccaaggaggtagcagaaaccagcatgcacaacctcctggagaccgacattgagcagatgagtcaactccgggccctggcggaggcgcagctgaacgaccactggcaggccatgcagatcctggacgagctggcagagaagctcaagcgcaggatgcgggaagcttcctcacgccccaagcgggagtataagcccaagttctgggagccctttgacctcggagagcctgagcagtccaacgggggcttcccctgcaccacagtccccaagatcgcagcttcatcccctttccaatcttccaacaagtccatctgtactcctagcaggagcatgccgcccctagaccagccaagctgcaaggtgctgtatgacttccagcctgagaaccatggggagctgggcttccatgagggcgacgtcttcacgc

SEQ ID NO: 63095 - DNA, 581 bp, Homo sapiens
ctcctaggaagaggttgtttaggatcctaattgtagttcggaggttcattctaaaggttcttctcgattccctttttctaaagacaaggagaacgacccccttgcaggcaccccgtttggtttctagtttggaagtgcattctaaagggtcttctccatggctttttctcccaaattaagttcagtgggtttgtctgcactgagactttttgttgacactaagttaagagggatagaaggaatttccatggccctgcttcgcaactgattctctagaaagccctttctgttatcctgtccttccctcacctaaccacaggctgctcctactgtgggggcaagcacagctctccccaccttcattgaatttgaacctttcatctgttaaataagaagtgaaacctacaatgcagggttccaggtttccttctcagaaccaaaccagataaaatgtgtaaagtaggtcctttccctgaggctgcacgattctgggctctcccagcccttccttggtttttttttttttttttttttgaaacagtctccctctgtcacccaggctggagttcagtggcatgatt

SEQ ID NO: 63096 - DNA, 711 bp, Homo sapiens
aggctcagaaggtccagaaatcaggggaaggagacccctatctgtccttcttctggaagagctggaaaggaagtctgctcaggaaataaccttggaagatggtggccacgaagacctttgctctgctgctgctgtccctgttcctggcagtgggactaggagagaagaaagagggtcacttcagcgctctcccctccctgcctgttggatctcatgctaaggtgagcagccctcaacctcgaggccccaggtacgcggaagggactttcatcagtgactacagtattgccatggacaagattcaccaacaagactttgtgaactggctgctggcccaaaaggggaagaagaatgactggaaacacaacatcacccagagggaggctcgggcgctggagctggccagtcaagctaataggaaggaggaggaggcagtggagccacagagctccccagccaagaaccccagcgatgaagatttgctgcgggacttgctgattcaagagctgttggcctgcttgctggatcagacaaacctctgcaggctcaggtctcggtgactctgaccacacccagctcaggactcgattctgcccttcacttagcacctgcctcagccccactccagaatagccaagagaacccaaaccaataaagtttatgctaagtcgagcccattgtgaaaatttattaaaatgactactgagcact

SEQ ID NO: 63097 - DNA, 504 bp, Homo sapiens
tcgcaaattattacgtggggtataaagaaaacaaagaggaagctgtgaccaggtaccaggcttatggtatgggacttttcaaagccaagccttgaaggatgagaaggagctatgcacacagcaggtgaaggagaaggggcagtgaactggctggagaagagcaggtgcaaaggccctgcacgggaaggtggttcagcatctgcaggattagcgaggaggcctgtacaactgccacagggcaggcaagggaaggagagatatgaaaggaacctgcggaacattatggagaatattatgaagaatttgtatttttcctaaggaatccgttttgggacagggaactgatttaatttacatttttgaaaaaccctctcaggaggctgaggtgggtggatcacgaggtcaagagatcgagaccatcctggccaacgtggtgaaaccctgtctctactaaaaatacaaaaactagctgggtgtgatagcacgtgcctgtagtcccagcta

SEQ ID NO: 63098 - DNA, 459 bp, Homo sapiens
gttttaacatctgcttgcaaatcataatcacctgggagcttaataaactggagacgtcctggccctacccttgggagatttgatttggcaggcctgggtgggaccttatcctaggcgtttttgaccagccccccaggtgacttgaatgccattagatatatgggttgatgggatgactttcaggatgactgccaaggaaatcgttggccaaggattacttcctgttttctagaactgcatttccggagccttatctgtgacctcatggttaatagagagtagaactctgctgctgcttctacggagccagctgaggggcactggggaattctggccccattgtgattctcagtcagagagaatgctggggagtcctccggtggggccagtaggatgggaaagggagagtcccactttgatttcagcatctgaggcttttggtattagcgacagaatagg

SEQ ID NO: 63099 - DNA, 1549 bp, Homo sapiens
agctcagtggcatgatcgtggctcactgcagtctcgacctcctgggctcgggtggtcctcccgcctcagcctcctgagtggtgggaccacaggtgtgcaccaccgtgtccagctaatttttgtagagatggggtctcatcatgctgcccaggctggtctcaaactccagggctcgagtgatccgccatccttggcctcccaaagtgctggattacagacctgagccaccacaccaggctgccccacacattgtaaagtttcgcttccctctaatgtcagattccaaagacagcagccttcatgagtcagaaagaaacatcggtcattttgaaatcaacatccaactgaagtgtagaaaggcctctggatttttgaaacggcaacaacagatgatgtaatacaaagacgcccccaccccactgctttcccactgcatgctttacatgacatggcacagcttccacgccagcagcttcaatcatgtaaagcgaatgcagtcccatcaagaccacagcattggctgagcagctactccatgctgggcaccgtcctgggcactggaagtacagcagagaacgaaaccaagaccacaccctccagaagcctgcattccagcaggacagacagacttccatacacagagcaggaaaatgcacagcgtgtcagatgatgatgattactatgagaaaaataaagcaggcaaagagaacaggactatttggatgagggtggtgcaaattcaaataatcagacagcctttgctgggaaggtgatatctgagcaaagattcgagaaggtggggagagccccggagccttccccgcagagcagaggaggcccgggaagctctggactcatagcggttcagcacggccacgacacggccacttccagacagagcccctggctgctgggtagggaccgcagcacctcagagaaccctttctggggtcacttctggcaccctctgcaaacctcaagggggagcgtgaggctgggggctgtccatcagggtccaggcacctcctgaaggaacctctcaaagccagccgatcaccggctccagacccacgctgtcagacatctctgtggccaccagaccactgccactctcacgggtgtgatgacatgggacctgcctactggtagtcttctgccttcgtggaattctgcaacttccttcctgcctcggccacagcatgtcagccaagcacctgtcagggtccctccctggcaggacgatgtttagaagctcaacaccgtgctcctgcctcctcttcagacccatcagaacttgctaccatgggtgtgttttaataaataacttcatttctgcagcaaataaataaataaataaatgtagttgcaatattgcctttaaaagcacttttaagcatcaattgtgaaataaaaagcccgagcaaaagccctctttgagcgtgaagtgtctaaacgtttatttgtactactattgttgtaaagggtagattttgtagcattttgaggtggtgattcaactgcattaacagcatcccgagaccgcctgcca

SEQ ID NO: 63100 - DNA, 986 bp, Homo sapiens
agctcagtggcatgatcgtggctcactgcagtctcgacctcctgggctcgggtggtcctcccgcctcagcctcctgagtggtgggaccacaggtgtgcaccaccgtgtccagctaatttttgtagagatggggtctcatcatgctgcccaggctggtctcaaactccagggctcgagtgatccgccatccttggcctcccaaagtgctggattacagacctgagccaccacaccaggctgccccacacattgtaaagtttcgcttccctctaatgtcagattccaaagacagcagccttcatgagtcagaaagaaacatcggtcattttgaaatcaacatccaactgaagtgtagaaaggcctctggatttttgaaacggcaacaacagatgatgtaatacaaagacgcccccaccccactgctttcccactgcatgctttacatgacatggcacagcttccacgccagcagcttcaatcatgtaaagcgaatgcagtcccatcaagaccacagcattggctgagcagctactccatgctgggcaccgtcctgggcactggaagtacagcagagaacgaaaccaagaccacaccctccagaagcctgcattccagcaggacagacagacttccatacacagagcaggaaaatgcacagcgtgtcagatgatgatgattactatgagaaaaataaagcaggcaaagagaacaggactatttggatgagggtggtgcaaattcaaataatcagacagcctttgctgggaaggtgatatctgagcaaagattcgagaaggtggggagagccccggagccttccccgcagagcagaggagagcatagcacctgcagcaagatggatgtgggcagcaaagaggtcctgatggagagcccaccggactactccgcagctccccggggccgatttggcattccctgctgcccagtgcacctgaaacgccttcttatcgtggtggtggtggtgg

SEQ ID NO: 63101 - DNA, 1971 bp, Homo sapiens
ttatcacaactgatcactccgtggggtcaccgctgctctggcgtctacctcccccaacaggttggggtttctaggagggcagctccagaggttgcagaacactccgctgcctctccagagccaggcacacagcaggcgctccataaatgttcgttggtcttttctccttgctcagcttcaatgtgttccggagtggggacggggtggctgaacctcgcaggtggcagagaggctcccctggggctgtggggctctacgtggatccgatggagccgctggtgacctgggtggtccccctcctcttcctcttcctgctgtccaggcagggcgctgcctgcagaaccagtgagtgctgttttcaggacccgccatatccggatgcagactcaggctcggcctcgggccctagggacctgagatgctatcggatatccagtgatcgttacgagtgctcctggcagtatgagggtcccacagctggggtcagccacttcctgcggtgttgccttagctccgggcgctgctgctacttcgccgccggctcagccaccaggctgcagttctccgaccaggctggggtgtctgtgctgtacactgtcacactctgggtggaatcctgggccaggaaccagacagagaagtctcctgaggtgaccctgcagctctacaactcagttaaatatgagcctcctctgggagacatcaaggtgtccaagttggccgggcagctgcgtatggagtgggagaccccggataaccaggttggtgctgaggtgcagttccggcaccggacacccagcagcccatggaagttgggcgactgcggacctcaggatgatgatactgagtcctgcctctgccccctggagatgaatgtggcccaggaattccagctccgacgacggcagctggggagccaaggaagttcctggagcaagtggagcagccccgtgtgcgttccccctgaaaaccccccacagcctcaggtgagattctcggtggagcagctgggccaggatgggaggaggcggctgaccctgaaagagcagccaacccagctggagcttccagaaggctgtcaagggctggcgcctggcacggaggtcacttaccgactacagctccacatgctgtcctgcccgtgtaaggccaaggccaccaggaccctgcacctggggaagatgccctatctctcgggtgctgcctacaacgtggctgtcatctcctcgaaccaatttggtcctggcctgaaccagacgtggcacattcctgccgacacccacacagatggcatgatctcagctcactgcaacctccgccttccagattcaagagattctcctgctcagcctctggagtagctgggactacagacatgcaccaccacacctggttaattttttatttttattttttgtagagacaggtgtctctctacgttgcccaggctggtctcgaactcctgggctcaagtgatccacccatctccacctcccaaagtgctaggattacaggcgtgagccaccgtacccagcctggtcccatatcatagtgaaatggtgcctgtaaagctctcagcattggcttggcacatgcagttggtactcaataaacggctgttggtgaatggcaagttatgtattcggcccgaatggggttcatgggcaattccctctaaggggggatataaaaacagggccggttttaaaacggcgaatgggaaacctggtccccaatatagttgtggaaaacctttttcccacgggaaatagaaggccccctcatggcttccaaatgggccctcagcgcgtgaatcaagcgctatttctctaaagcggcctaatttacactctttttttcaacgcgtcgggtgactctttaatcctctccctcgcgtgtgttcttatacacttcttgtgctccttctcatcctcctctgcttccatctttctctcttcttctctcttctcg

SEQ ID NO: 63102 - DNA, 2878 bp, Homo sapiens
ttatcacaactgatcactccgtggggtcaccgctgctctggcgtctacctcccccaacaggttggggtttctaggagggcagctccagaggttgcagaacactccgctgcctctccagagccaggcacacagcaggcgctccataaatgttcgttggtcttttctccttgctcagcttcaatgtgttccggagtggggacggggtggctgaacctcgcaggtggcagagaggctcccctggggctgtggggctctacgtggatccgatggagccgctggtgacctgggtggtccccctcctcttcctcttcctgctgtccaggcagggcgctgcctgcagaaccagtgagtgctgttttcaggacccgccatatccggatgcagactcaggctcggcctcgggccctagggacctgagatgctatcggatatccagtgatcgttacgagtgctcctggcagtatgagggtcccacagctggggtcagccacttcctgcggtgttgccttagctccgggcgctgctgctacttcgccgccggctcagccaccaggctgcagttctccgaccaggctggggtgtctgtgctgtacactgtcacactctgggtggaatcctgggccaggaaccagacagagaagtctcctgaggtgaccctgcagctctacaactcagttaaatatgagcctcctctgggagacatcaaggtgtccaagttggccgggcagctgcgtatggagtgggagaccccggataaccaggttggtgctgaggtgcagttccggcaccggacacccagcagcccatggaagttgggcgactgcggacctcaggatgatgatactgagtcctgcctctgccccctggagatgaatgtggcccaggaattccagctccgacgacggcagctggggagccaaggaagttcctggagcaagtggagcagccccgtgtgcgttccccctgaaaaccccccacagcctcaggtgagattctcggtggagcagctgggccaggatgggaggaggcggctgaccctgaaagagcagccaacccagctggagcttccagaaggctgtcaagggctggcgcctggcacggaggtcacttaccgactacagctccacatgctgtcctgcccgtgtaaggccaaggccaccaggaccctgcacctggggaagatgccctatctctcgggtgctgcctacaacgtggctgtcatctcctcgaaccaatttggtcctggcctgaaccagacgtggcacattcctgccgacacccacacagaaccagtggctctgaatatcagcgtcggaaccaacgggaccaccatgtattggccagcccgggctcagagcatgacgtattgcattgaatggcagcctgtgggccaggacgggggccttgccacctgcagcctgactgcgccgcaagacccggatccggctggaatggcaacctacagctggagtcgagagtctggggcaatggggcaggaaaagtgttactacattaccatctttgcctctgcgcaccccgagaagctcaccttgtggtctacggtcctgtccacctaccactttgggggcaatgcctcagcagctgggacaccgcaccacgtctcggtgaagaatcatagcttggactctgtgtctgtggactgggcaccatccctgctgagcacctgtcccggcgtcctaaaggagtatgttgtccgctgccgagatgaagacagcaaacaggtgtcagagcatcccgtgcagcccacagagacccaagttaccctcagtggcctgcgggctggtgtagcctacacggtgcaggtgcgagcagacacagcgtggctgaggggtgtctggagccagccccagcgcttcagcatcgaagtgcaggtttctgattggctcatcttcttcgcctccctggggagcttcctgagcatccttctcgtgggcgtccttggctaccttggcctgaacagggccgcacggcacctgtgcccgccgctgcccacaccctgtgccagctccgccattgagttccctggagggaaggagacttggcagtggatcaacccagtggacttccaggaagaggcatccctgcaggaggccctggtggtagagatgtcctgggacaaaggcgagaggactgagcctctcgagaagacagagctacctgagggtgcccctgagctggccctggatacagagttgtccttggaggatggagacaggtgcaaggccaagatgtgatcgttgaggctcagagagggtgagtgactcgcccgaggctacgtagcacacacaggagtcacatttggacccaaataacccagagctcctccaggctccagtgcacctgcctcctctctgccccgtgcctgttgccacccatcctgcgggggaaccctagatgctgccatgaaatggaagctgctgcaccctgctgggcctggcatccgtggggcaggagcagaccctgccatttacctgttctggcgtagaatggactgggaatgggggcaaggggggctcagatggatccctggaccctgggctgggcatccacccccaggagcactggatggggagtctggactcaagggctccctgcagcattgcggggtcttgtagcttggaggatccaggcatatagggaagggggctgtaaactttgtgggaaaaatgacggtcctcccatcccaccccccaccccaccctcacccccctataaaatgggggtggtgataatgaccttacacagctgttcaaaatcatcgtaaatgagcctcctcttgggtatttttttcctgtttgaagcttgaatgtcctgctcaaaatctcaaaacacgagccttggaattcaaaaaaacatt

SEQ ID NO: 63103 - DNA, 294 bp, Homo sapiens
cctggtggtagagatgtcctgggacaaaggcgagaggactgagcctctcgagaagacagagctacctgagggtgcccctgagctggccctggatacagagttgtccttggaggatggagacaggtgcaaggccaaggtcctggggcccagtgggccagacggtcaggggtgcaaccctgcccggggggtgggggggctagacatccatcgctcctgggatatcagggcctggaggcctgagggagaaacgaaaacatccactttgtcttacagacacgaagagcgactatctca

SEQ ID NO: 63104 - DNA, 4559 bp, Homo sapiens
  misc_feature (1126)..(1126): n is a, c, g, or t
  misc_feature (1132)..(1132): n is a, c, g, or t
  misc_feature (1135)..(1135): n is a, c, g, or t
  misc_feature (1152)..(1152): n is a, c, g, or t
  misc_feature (1157)..(1157): n is a, c, g, or t
  misc_feature (1162)..(1162): n is a, c, g, or t
  misc_feature (1181)..(1181): n is a, c, g, or t
  misc_feature (1188)..(1189): n is a, c, g, or t
  misc_feature (1220)..(1220): n is a, c, g, or t
  misc_feature (1230)..(1230): n is a, c, g, or t
gcttcaggtcaaattagggctttgggtcaaatcagggctacctggtctgggagaggcacacttctaactgctgatgccaccctcaaagggtctccagaagcttccactgactgctgttggctgcaccaggcagtgagtatcagtacatttaatcatcacaaaaaccgggcaggcagatgttggcggattgtctgtgggctgctgaagagctggtagagctcagcgcgtctgtgactggaccacagtgcgagtagctggggctgacagtggaccctgggctgctgcacccgctgcaacccccaggtggagggatccacgcagcctggtgacgatttggccctggccctgagccatgccccgcgtgacgcagtgctgtctgccagcctgggaggctcctcacctgtctttgcctgagccagggcctgggagtttcaggactgggaaaggaaagaaaaccccaaggctggggtcaggaagaggagggctattttgctgctcagtcctgctcccccaaaccagaccttcagctctttgcaaacgaaagagggggcaaggccaaagcggggttccttatgcaagtttgcttcctgccctgaaaaaccaaaaaaacggaaaacttttccaagcaagtgtaagcactgtgtgaggacagagtgggcgtttccttctgaaataggagactaggcccccagtgggcaaagagaccctgacccgcttctccatctgtgcgggggaatgaatgagcaggctcaccctgttgtcatcctgcctgctgctgtggggcccccctagatcttaggaattgctgggtacttccggacagtgaggttgtctgagctgcctgcaggttccctgagtctgggtactcaggggctgggcaggagatgcccattaagcaggtgttactctaatgagtgagcttttcaatgagatgaacaggaaaattagcaaaatcatgttcctaatcattcctcctgcggcggccccaattttgctaactgttaacattatatgatgcataagtaggggaatgcatttttaaaattatggtaaagcctatgtaacattttataaaattgaccattttattttattattaatttttttttttttaagacagggtctngctctntcncccaggctggagtgcantggtntgatntcggctcactgcaacctcngcctccnnggttcaagcgattctcctgcctcagcctccngagtagctgngattacagcctgtgttggaacatccttccttcttaaggctgaagaacattccattgtccagctgggagctccccgacctccaggagggcaagatccaagccatcagcgactcggacggggtgaactacccctggtacggcaacaccacagagacctgcaccatcgtgggccccaccaagagggactccaagttcatcatcagcatgaatgacaacttttaccccagcgtcacatgggccgtgcccgtcagcgagagcaacgtggccaagctcaccaacatctaccgggaccagagcttcaccacctggctggtggccaccaacacctccaccaacgacatgatcatcctgcagacgctgcactggcgcatgcagctcagcatcgaggtgaaccccaaccggcccctgggccagcgcgcccggctgcgggagcccatcgcccaggaccagcccaaaatcctgagcaagaatgagcccatcccgcccagcgccctggtcaagcccaatgccaacgatgcccaggtcctcatgtggcggcccaagtatgggcagccgctggtggtgatcccgcccaagcaccggtgacagccaggaccacccgctaggttagactcacaaataataataccgctgaaaacaaaactcagactcactcttcagtcattcagcaagatacaaccattctaccctctccagcgggcggatctcactgtgctgatgcccccgggaaggcctccccggctctcggcacctgcttcctttcagggagaggggagatctaagcaggacagacagaccccacgtgcgccctcagggtgacctctggtctccttgcctctcctttttctcagtttcagtcgctcacttgtaacagattccctgaaacactgctttttccgttttttaaaaaaactcctcttttgggggctcaggggcaggaggagggggagctgattaggagggaagctccagcccccgatcaaagagacagatccacactgctgccgatttgtggcgctggccggccttccccccaggtccctccgccctctgtcatgcggccttatgtagacttgctttgccaaacttttgccttaagctgaattgaaaggaagaaaaccaatcggagaaagaaagcaggatctcttttctaccggacttttcctcttctgccagaggtggagggagggttggggtcgcccgcgagagtctcttgagcccttcttcccggttgtcttgggagaagggtgaggatgggcatttagacccgaaaccagctgctcactctttctttttggcagaaataaaaccacaggtagattctgcctgaacagccccttctctccctccacccccaggtcgtatccctgcacctgcggagaggggctgtgagctctggcggggggtggctccaccagtcgcctggcctcttctcccctctcttcccagcagccttaacttcccttgggcggctctaggaggagagaggcaggctcctgtgagcccagggaattttcaccctctcagtcctcaggacccacccccagttgagtccctggcccttcctccaggtgtgtggctttttccttctccatccacactggtcccaaatgcctgggggccggccacctggaccgccgacacacagcctcaatgttagtctcaaaggtaaggaaggcattcacgtcccttcttgcagggcattttaagacttgaatcgggtgggccccggcccctgtggctggctggcccctggtgtactgtaaaagggccaagacagggctcgttctcaggggcgcccctcccaggccctcagggcagcgggacggtgcagtcaggctctgggtgccacagtgatggaggtggaaggcacccaagctctagggaagtcttgggaggcagtcggccgagcccctgcttcctgtcctcaaataagtgaatccaggccaagggctgggagggctgggtgggcttatcgtcgagagggttcagagccactctggaggctgggctggcacagtggagagcgacaggtgaggacagacgtctggaagcccatccctgggacctgccctcccttggtcccaggtcactggagctccagggcttacttagtcctgacccattgtgccagggttctgagcagtgtcggccttgtggccacttgcaggggctattaggggacatcccgctgaagccacgctccttccagcttgccaaacccacagctacccgcccgggacccacactcagcctaataattatcaagcacagaaaaccgtccatttagaaaaataatccatttctgctgcagatgagccacttgtaagagtctccgtgacagcgtgggacggtgtgggaaccaaagtccctgccctgctcctttgtccacgggctattgcgtttattcaaggggtgcttaatgaccgtttagccactgccgtcggtctccgggcccagctcgtgccaggaggctgtcctgggacacactgggctggagctgccggctggcacggtgctcagggggcccctgatgggggccaggacctccccgcagaaactgcaggttctcttgtgaggatggaggccgtgccaccccgaaaggcagtagccttaggggaacagtgggtcccagctgcatgtctgaggatgggtggggacagggctgggactcagctttcattcactggagacttctccactcaggtctttgttgcactaaagcagggacaggaccctgggggttcaggaagcgggtctcaggccgctggtttattcctggaggtggggctggagaccagaatggaaaggggcttcctgagctgctagggggtgaaggacccccgaacccgcatttcttgagtgagagcaaacactcgaggcaggagccagcacccctcccactgcatgcccggcccccagcccaccttgccccctgacccaccttcacccgtgccccttctttctgcccttcctcaccgaagaagggctaggaacaccctggagaggctgcaggtccggccacggacgctcagctgagccccggtctgctccttcagcctccttgctcttgttggagcacaggccccaggcttcctgccagggccccgattcttcttatgtcctccagccccgccctggcgtggacatccactcactccttccagcaataagaaccgtccttggtcgtggagagtactgtgaaacaaaccaatgcacttaccaggaggcacaagactcttgaagaagatgtaaaatgaaccttttttttttttacaaaaaacaaaaagcaaatattcataaagagaaataaaatgtaattttaaagta

SEQ ID NO: 63105 - DNA, 3322 bp, Homo sapiens
ggcgtgcagccacatggagttctacaaccagtacggcgagcagggcatgtccagctgggagctccccgacctccaggagggcaagatccaagccatcagcgactcggacggggtgaactacccctggtacggcaacaccacagagacctgcaccatcgtgggccccaccaagagggactccaagttcatcatcagcatgaatgacaacttttaccccagcgtcacatgggccgtgcccgtcagcgagagcaacgtggccaagctcaccaacatctaccgggaccagagcttcaccacctggctggtggccaccaacacctccaccaacgacatgatcatcctgcagacgctgcactggcgcatgcagctcagcatcgaggtgaaccccaaccggcccctgggccagcgcgcccggctgcgggagcccatcgcccaggaccagcccaaaatcctgagcaagaatgagcccatcccgcccagcgccctggtcaagcccaatgccaacgatgcccaggtcctcatgtggcggcccaagtatgggcagccgctggtggtgatcccgcccaagcaccggtgacagccaggaccacccgctaggttagactcacaaataataataccgctgaaaacaaaactcagactcactcttcagtcattcagcaagatacaaccattctaccctctccagcgggcggatctcactgtgctgatgcccccgggaaggcctccccggctctcggcacctgcttcctttcagggagaggggagatctaagcaggacagacagaccccacgtgcgccctcagggtgacctctggtctccttgcctctcctttttctcagtttcagtcgctcacttgtaacagattccctgaaacactgctttttccgttttttaaaaaaactcctcttttgggggctcaggggcaggaggagggggagctgattaggagggaagctccagcccccgatcaaagagacagatccacactgctgccgatttgtggcgctggccggccttccccccaggtccctccgccctctgtcatgcggccttatgtagacttgctttgccaaacttttgccttaagctgaattgaaaggaagaaaaccaatcggagaaagaaagcaggatctcttttctaccggacttttcctcttctgccagaggtggagggagggttggggtcgcccgcgagagtctcttgagcccttcttcccggttgtcttgggagaagggtgaggatgggcatttagacccgaaaccagctgctcactctttctttttggcagaaataaaaccacaggtagattctgcctgaacagccccttctctccctccacccccaggtcgtatccctgcacctgcggagaggggctgtgagctctggcggggggtggctccaccagtcgcctggcctcttctcccctctcttcccagcagccttaacttcccttgggcggctctaggaggagagaggcaggctcctgtgagcccagggaattttcaccctctcagtcctcaggacccacccccagttgagtccctggcccttcctccaggtgtgtggctttttccttctccatccacactggtcccaaatgcctgggggccggccacctggaccgccgacacacagcctcaatgttagtctcaaaggtaaggaaggcattcacgtcccttcttgcagggcattttaagacttgaatcgggtgggccccggcccctgtggctggctggcccctggtgtactgtaaaagggccaagacagggctcgttctcaggggcgcccctcccaggccctcagggcagcgggacggtgcagtcaggctctgggtgccacagtgatggaggtggaaggcacccaagctctagggaagtcttgggaggcagtcggccgagcccctgcttcctgtcctcaaataagtgaatccaggccaagggctgggagggctgggtgggcttatcgtcgagagggttcagagccactctggaggctgggctggcacagtggagagcgacaggtgaggacagacgtctggaagcccatccctgggacctgccctcccttggtcccaggtcactggagctccagggcttacttagtcctgacccattgtgccagggttctgagcagtgtcggccttgtggccacttgcaggggctattaggggacatcccgctgaagccacgctccttccagcttgccaaacccacagctacccgcccgggacccacactcagcctaataattatcaagcacagaaaaccgtccatttagaaaaataatccatttctgctgcagatgagccacttgtaagagtctccgtgacagcgtgggacggtgtgggaaccaaagtccctgccctgctcctttgtccacgggctattgcgtttattcaaggggtgcttaatgaccgtttagccactgccgtcggtctccgggcccagctcgtgccaggaggctgtcctgggacacactgggctggagctgccggctggcacggtgctcagggggcccctgatgggggccaggacctccccgcagaaactgcaggttctcttgtgaggatggaggccgtgccaccccgaaaggcagtagccttaggggaacagtgggtcccagctgcatgtctgaggatgggtggggacagggctgggactcagctttcattcactggagacttctccactcaggtctttgttgcactaaagcagggacaggaccctgggggttcaggaagcgggtctcaggccgctggtttattcctggaggtggggctggagaccagaatggaaaggggcttcctgagctgctagggggtgaaggacccccgaacccgcatttcttgagtgagagcaaacactcgaggcaggagccagcacccctcccactgcatgcccggcccccagcccaccttgccccctgacccaccttcacccgtgccccttctttctgcccttcctcaccgaagaagggctaggaacaccctggagaggctgcaggtccggccacggacgctcagctgagccccggtctgctccttcagcctccttgctcttgttggagcacaggccccaggcttcctgccagggccccgattcttcttatgtcctccagccccgccctggcgtggacatccactcactccttccagcaataagaaccgtccttggtcgtggagagtactgtgaaacaaaccaatgcacttaccaggaggcacaagactcttgaagaagatgtaaaatgaaccttttttttttttacaaaaaacaaaaagcaaatattcataaagagaaataaaatgtaattttaaagta

SEQ ID NO: 63106 - DNA, 644 bp, Homo sapiens
cggtcccacaggcaggtgtactgtaagcgtggctggggaggctcaggaaactgacaatcacggcagaaggcgaaggggaagcaggcacgtctggccatgttggacaggctgatctcgaactcctgacctcaagtgatccacccgccctagcctcccagagtgctgggattacagacgtgagccaccgtgcccagccaatttttaatttttttaagaaatgaaatcttgctctgttgctcaggctggagtggagtagtgccatctttgttcactgcagccttgaacccctgggctcaagtgatcctcctgcctcagcctcccgagtagctggaaccacaggcgtgagccactatacccggccctattcctctgaaaagcttagtaaacagcagttctttataccagggaagaggaagagacattttaatgatgtgatagtttattcagtgaagagtacagaaatgagttagggcccctgctctctaagaattacagaccttacaaggtaggcctgggccgggcgtggtggtggcgcctggattcccagcactgtgggagcatgaggcaggagaatcgctggacctgggaaggcggaggttgcagtgagccgagatcctgccattgcactccagcccgggcgacga

SEQ ID NO: 63107 - DNA, 501 bp, Homo sapiens
ccatacatgtacatttccacccactatctgaatgaatctgttccaaggtgcccaaagaggaaggactaattattcatttactgaaatatggatagttcatcttttaagaacctagtaaggcttttattatctatcattttacatttttttcttattaaataaacatcctttaaaggaaaaaggatttgagcagacatcatgaagtgaagccaactgtttagactagaatgttatgagattaaacccacaggagattattcatagacataaaccctcattttaattagtggatctggatttttgtcatatgtggaatcataatttaaacaaaatcaactaagatgatccaagttccacacaactgcacttcaatattcaagtcggtgtgaagatgcctgactactgcgtcacaagattctgagctgtcgtaaaaagcctggctcgtggtttctatttatagtgtacacatgttgggttataatcacaaacctggaactctgt

SEQ ID NO: 63108 - DNA, 194 bp, Homo sapiens
aaaaaaagaacattccactggggaaaaaggactaacaaagaacaaagaattaaaaggaaaacaaacagcaaataagcattaaaatattcatttttttagtaatcaaagaagtgaacttaaaatagcaactagataccattttctaccatcaaaatgggaaaaatatgtatgtataataagcaatatttgtgaga

SEQ ID NO: 63109 - DNA, 429 bp, Homo sapiens
tgcagtggcacgatctcagctcactgcaacctctgcctcccaggttcaagcaattctcctgcctcagcctcccaagtagctgagaatacaggcgcacaccaccacgcccagttaattttttgtattttagtagagacggggtttcacagtgttgcccaggctggtctccaactcctgagctcaggcaatccacctgcctcggcctcccaaagtgttgggattacaggcatgagccattgcaccagttgtaacctatctcttttgactcaatctaaaagtttctgtcttttaatacaaaaccataatccatatgaattcattaattcacaactgacatttagcatcttatttctgttatcctatttcatattttatgattccttgtttctgctcttttgatatatatactatgttttatttgcacttatc

SEQ ID NO: 63110 - DNA, 507 bp, Homo sapiens
tttttcttctcctttgggcaactgcttaaattcagaggcagctaccaaaaggaaacgtctctctaccccctactgtttcttctgtgcaaaagaatgtaaaatatgaggcttctctttcgcatagaaaacagaagaaaagttgcaacagagtgaaaaatcaggaaaacctcatcgagatagatattctgccagagacaaaacgaaacctcatcgagatagatattctgccagagaaaaatgagacatcagatatgtgtgatcacaggtcatagactcagtgaagtgccactgtcacaatgctctcatgccaaaccttgactgcaaagctgagatgttaatatggaacacctgagagggctggcacttcagcgtccttattcctccagaaccacaccacaaaagtcaccttctccccagacagattctctacaaaatgccttgcagccgaggtgtggtggaaagaatattgtatttggaataaaaaatttttgattttgcaccatcatg

SEQ ID NO: 63111 - DNA, 652 bp, Homo sapiens
tttttcttctcctttgggcaactgcttaaattcagaggcagctaccaaaaggaaacgtctctctaccccctactgtttcttctgtgcaaaagaatgtaaaatatgaggcttctctttcgcatgtaggcctgagaagttttgacaagaatgtgtatgcagggagaaatgactggtgaaagaatttagaaagaatgtatggggacaaaaaggaatcacatgagctgatttaaattcttcttgtgacaaggggtgtgtgcaaacatgaaggaactagggttttgtttgtaaatgtttatcggtttgggagaggcaaagatcacagactgtgatattcttgggataaacagctcaatatgttggtcccaagcgacaccatgtggaattgagaagagggccattctcatctaaacacccatcggagcccaggtttggcgttctgaagatcagggacttccatttgtttataagctcatttgattgacaagtatttattgagcaactactttatgatagtccctgtttttgctgttggtaatgtaaaaatgaaaaagacacgtttttctgttcttaaggcagttaccgagttaaaaaaaaatagtatgtaatcatcttatatggtacatgtatatttatataaaaatatgttataatg

SEQ ID NO: 63112 - DNA, 1021 bp, Homo sapiens
tgacgcatggactataataggatgaactccttcttagagtacccactctgtaaccggggacccagcgcctacagcgcccacagcgccccaacctcctttcccccaagctcggctcaggcggttgacagctatgcaagcgagggccgctacggtggggggctgtccagccctgcgtttcagcagaactccggctatcccgcccagcagccgccttcgaccctgggggtgcccttccccagctccgcgccctcggggtatgctcctgccgcctgcagccccagctacgggccttctcagtactaccctctgggtcaatcagaaggagacggaggctattttcatccctcgagctacggggcccagctagggggcttgtccgatggctacggagcaggtggagccggtccggggccatatcctccgcagcatcccccttatgggaacgagcagaccgcgagctttgcaccggcctatgctgatctcctctccgaggacaaggaaacaccctgcccttcagaacctaacacccccacggcccggaccttcgactggatgaaggttaagagaaacccacccaagacagcgaaggtgtcagagccaggcctgggctcgcccagtggcctccgcaccaacttcaccacaaggcagctgacagaactggaaaaggagttccatttcaacaagtacctgagccgggcccggagggtggagattgccgccaccctggagctcaatgaaacacaggtcaagatttggttccagaaccgacgaatgaagcagaagaagcgcgagcgagagggaggtcgggtccccccagccccaccaggctgccccaaggaggcagctggagatgcctcagaccagtcgacatgcacctccccggaagcctcacccagctctgtcacctcctgaactgaacctagccaccaatggggcttccaggcactggagcgccccagtccagccctatcccaggctctcccaacccaggcctggcttcactgcctgggatctctaggct

SEQ ID NO: 63113 - DNA, 389 bp, Homo sapiens
catactaaatgacactgtcgctttccaaaatataatataataattataggcattggtcaggtactaaactgggtgctgcacatatactatttgcattctcaaaacaattcagtaggcattatttatacaattttacatataaatacagtgttagagatgattgctgcccaacatccattttcttcttctttagcagcataattctgattatatttgtaactgacaatgtacctagttaaaagcctaaatctctaccctctcttatttagctaggtgaggtcatgtgaccacattctgttcactgagatgtaagtgaatgtattgtttgagatttctgggagtctattgaaggaacttaactgggcttctgactgtctcctttttattct

SEQ ID NO: 63114 - DNA, 331 bp, Homo sapiens
aaaacctctcccagctctcacctggagaatcaccccacagaagcatcagagcccaaaggatttttgaatgggaggtggaggaaatttcttcctgagatggggaaactgaggcacagatgtggtcttctggaggtcgggaagccatcagtggagagtggtctctggctctacccctctacccacctttgtccagggcccctgcccactgttaatgttctggtatatttccctccaggctttttctccgtgtgtgtgtgtgtgtgtgtgtgtgtgtgtgtgtgtgtgtgtgtgtgtgtgtgtgtgtattttaaataacattgagatggtgcag

SEQ ID NO: 63115 - DNA, 220 bp, Homo sapiens
  misc_feature (1)..(1): n is a, c, g, or t
  misc_feature (3)..(5): n is a, c, g, or t
  misc_feature (164)..(164): n is a, c, g, or t
ncnnngtcagaggccagggaaagaggcaccaaggggattaaaggtgaccatgacctgtgcacacgcagaaccatgaagagtgcccgtcccaccagcccagctgggaaaactcgtttttcaccacacatggggttaatacgcagaaggctcttagctcactagtngaggataattagctctggaccaagcactatctgattcccagctaacaaatcttaaa

SEQ ID NO: 63116 - DNA, 3450 bp, Homo sapiens
aggcatcgaactgcggtagtacgggttacggaatcactgtcgatgccctagctggatcaatgtttcgatctgatacgccagcttggcacgaggctgcctcaggaagcttggcttccctcccatgggaagtgctggaatccactcttgcctgaccctcccataagaaacaagggaaattcctttacgtgagccgccttgctcagaacaaagcttggcgtgtttcttattcctcatcaatctgacaaaatgggtatttatttgtgcctctcaagcgtgtggcttggacatgatgttccgcatcgtggaagtggccgtgcaccaagtggaatatctgttactatagtaacagttcctttttattgataccagaataaacaggaatgcaaaggctgtctcacttgttggcacatttcagcagcctccgttcccaggggtttaagaaccgccctctagaggcagccctccttgctagtctgggacttcccggtggagtgaggaacccagcaacacgctcctgacttcccttcccaaggactcgacctgagaaccgccatgtactcggagatccagagggagcgggcagacattgggggcctgatggcccggccagaatacagagagtggaatccggagctcatcaagcccaagaagctgctgaaccccgtgaaggcctctcggagtcaccaggagctccaccgggagctgctcatgaaccacagaaggggccttggtgtggacagcaagccagagctgcagcgtgtcctagagcaccgccggcggaaccagctcatcaagaagaagaaggaggagctggaagccaagcggctgcagtgcccctttgagcaggagctgctgagacggcagcagaggctgaaccagctggaaaaaccaccagagaaggaagaggatcacgcccccgagtttattaaagtcagggaaaacctgcggagaattgccacactgaccagcgaagagagagagctgtagggccagctgccgggctcaggccactgcccaccctggcctggacagcctccttcagcccttctgtacctggcaggccctgggacgtctgtgatgttcccacctgcttctgtagaaatgtgtcaccccagagggcctggctctccctgggaggctggggcccctaagctcctaggttttccttccaagcacccagccctcctgctccaagagggataacctgcacccctccctgcaaggggttcagagcccagcacaggagctttctctggcagaattgaggaggaagaggtggccctctgacttgacaagccttctgttctgcccaggccttcccaccaggaatctccgaggctccccagggccccgcttctccgtacaccccagctcctaggtctcagagaactcccccacctgtggttttacctgcagccagcagagcttagcttcaaggacacctgccttcaaagccactgaggggaggaagggcagggcagactgcaggtggccttgttgctggcatcccggccaggtgggcggggactaacaaagacagctgtttagggtcttctcccctcacccatgctttcatcatcccctccgcacagcctccccgtccaggccttctaaccacacctacccagggctgccgcattcctgcactcagaagtctgcagcggtgcctcacaaacttgattgtgcataaaaatcactggggatcttgttaatacagcttctaactcaatagatctgggagatcctgcatttctaacaagctcccaggtaaggcggaggctgctggtgtgaggaccatgctgtgagcagcagggcgagagtgcccagggctgatatatattggaaatatcacccctgaagccatcgctggcccccacctcctgtggactgatgccccagggattcccaccccacttctgcaaccccaggtatccttcattatccaccccatcccagactcccaccccagggattgcccgtgaagactttggcctagcaaattgtgttggttatgtgagtgttgttttaatcagagatgtacatgattgccaatctgcatttcttaccagtgtgaccacactgttacgatgcaattctagccaaaaaaaaaaaaaaaaaaaaaaaaaaattttttttttttactttttcctagtcttatggaaagcaaatatacaatgattttcagtaggcttctggaatagaaacagtggtttgaagaccccactgccacctttatggactggcccctttgagtctgaatccccggcctctgtcacctgagacccaacccctagctgggccaactccagtgaattcacccatttttcttcttcagaaggcctttcctgtgtgagacccacatattttaaccttttgctcctatcccatttttaaagaattagagaataaaccaggcctgtttcttttcccctgaaatccctgcctctggcttcctaaacccatcatctaaggtgacagagcagtgctggaatagcatctcctttcactttcccaaaactgccacagatagctgccactggcatgctctttgattcctggaagcaaacgtgggactgtcggaggaaagggattgttctggtcttactcataactgggtggtttgagggtgactgaagtcgtgcttttcctgtgtgtgctgccagcacagggctgtaaatgcagatattgcgcctgtgtgcgtgtgtataagtcaagctccaagaggctcctgaatgtgactggcgtgctgagaatgtgtttacgctgtttaatgtctgccaggtgagggttacactgaagatgcacaatccctaaaataaagatcaccacttccccaaagaagcagccctcgggtccatgtgttgttcagacatgtgaagagaagcaagacagagggtctcagatggacgagggctctccaagggaatgcctggggattcacccagtggtccccagaggtgctccatggaggcaacaagtcattccatgaagccccagaggtagaagggacctcaagcaccacgccctccagggcagccgtgcagacgaccttggttcacttttcaggggtcgtcccaactctgtatctccagccactccaactgtggaggctgtaaatccagattttcactgttccagtctcctttgcagcttaggatggctatgtgatcaggtgtggccaatgaaattgaagaggaagtctacctgggcttctgggaaagcttttccaataaaagacacaggcatggctaacacctccctgggcctcttcttcctaccttgattgagggtgtgatgcctggagccacagcagccactttgctaccatgacaaaaaggccaagagaatcacagagtcattgaccctatcattatttcaccaagccaataccagccgccatccttctccagaattcttgtaaataaaataaatccctctttgtttaaacca

SEQ ID NO: 63117 - DNA, 1011 bp, Homo sapiens
ggagtctgctctcagagtatctgctgtgggagagccccggaccccaagcatcttcaaaggtctattattaatggggctgtccagctgaagctgacatccgcacgcagccctcccagagctctgcacctcagccagcccacggcctccaccgtctggccctgtcggctgagtggtgcccagcaaggtgagaaggccaagtcctgcccgctgggccaggcagaggtcacccgccgcgcctgagctaccggtgtgtgatgagaggactgccccacgtcttccctcatttcccagctgcctcagtttcccttcctgagagaggcagggttctgggaggtgaggagctgcagggacccaagaagggcatagaagccgcctggggacactggcccctctgtcaggatcaatcgccctaagcctgtctgaggcgctccgggcttaggagcagctgtgaaagccgcctttgtgcctgggagaatgagccgcaagaggacagggggccctcgccccgggagccccttgggtcctggctcctgagatcaacgccagcagggaggaccccagcctggcccctgcagcccacccaggcctggtgcccacttcgtgccatgggagcagcccagggaagaagaaaaagaaatgaaggcccagacacgttacgccatttgcccaagaccacacagccagaagagagtggctgggatggacctatacctgccatctcttcacctgcatctgctgggaaccccatccctcagcactggggccatttccagctcctgcatcatagggcctccttgtcccctttcccatgaccaggccctgaaaatgctcccaccccaatcctgccagctcccccatctcctgagaaagtcccctctgagagccaagagtccctgcagatctcaggaaggtgtccaggggaaagagatgcatgcaaagccccattccagctctgccgactcactgcttattcattaataaaagaatgcccaggctattttgggcacctgt

SEQ ID NO: 63118 - DNA, 785 bp, Homo sapiens
agcggctttccccggcggcgtctcctcgcccgcccctccggccgccgccgtaacttgaccctcagcggggtttgggacttggggccgcgtcaccgtcgcggaggcgcttcggctccggactacgctcctgctgtgcgctcgcggggccagcagtgctggctctgcagtaggaggcgcgggggcatggcgcagaggctgggcgagtgggcccgggggccctccgatgccaccgggctctaccgggctgtgctgctccggtcggccgccatgtactcggagatccagagggagcgggcagacattgggggcctgatggcccggccagaatacagagagtggaatccggagctcatcaagcccaagaagctgctgaaccccgtgaaggcctctcggagtcaccaggagctccaccgggagctgctcatgaaccacagaaggggccttggtgtggacagcaagccagagctgcagcgtgtcctagagcaccgccggcggaaccagctcatcaagaagaagaaggaggagctggaagccaagcggctgcagtgcccctttgagcaggagctgctgagacggcagcagaggctgaaccagctggaaaaaccaccagagaaggaagaggatcacgcccccgagtttattaaagtcagggaaaacctgcggagaattgccacactgaccagcgaagagagagagctgtagggccagctgccgggctcaggccactgcccaccctggcctggacagcctccttcagcccttctgtacctggcagccctgggccc

SEQ ID NO: 63119 - DNA, 397 bp, Homo sapiens
ctcaatagatctgggagatcctgcatttctaacaagctcccaggtaaggcggaggctgctggtgtgaggaccatgctgtgagcagcagggcgagagtgcccagggctgatatatattggaaatatcacccctgaagccatcgctggcccccacctcctgtggactgatgccccagggattcccaccccacttctgcaaccccaggtatccttcattatccaccccatcccagactcccaccccagggattgcccgtgaagactttggcctagcaaattgtgttggttatgtgagtgttgttttaatcagagatgtacatgattgccaatctgcatttcttaccagtgtgaccacactgttacgatgcaattctagccaaaaaaaaaaaaaaaaaaaa

SEQ ID NO: 63120 - DNA, 689 bp, Homo sapiens
gtaaagttccttgtgagaacttttcccccaaggttgtgaaggtttgcagggaaaacctcgaaggcaacacgctcctgacttcccttcccaaggactcgacctgagaaccgccatgtactcggagatccagagggagcgggcagacattgggggcctgatggcccggccagaatacagagagtggaatccggagctcatcaagcccaagaagctgctgaaccccgtgaaggcctctcggagtcaccacacccaagtgaaagtctttctccaaccctggggaggaaggccttttggctttccaattggaaaagccaaaccaggtaaagggggggccccttttgtggccttggtgtggacagcaagccagagctgcagcgtgtcctagagcaccgccggcggaaccagctcatcaagaagaagaaggaggagctggaagccaagcggctgcagtgcccctttgagcaggagctgctgagacggcagcagaggctgaaccagctggaaaaaccaccagagaaggaagaggatcacgcccccgagtttattaaagtcagggaaaacctgcggagaattgccacactgaccagcgaagagagagagctgtagggccagctgccgggctcaggccactgcccaccctggcctggacagcctccttcagcccttctgtacctggcagccctgggccc

SEQ ID NO: 63121 - DNA, 366 bp, Homo sapiens
ctgggctggggaagagggctgggctggggaagagggggaagaggtggccctctgacttgacaagccttctgttctgcccaggccttcccaccaggaatctccgaggctccccagggccccgcttctccgtacaccccagctcctaggtctcagagaactcccccacctgtggttttacctgcagccagcagagcttagcttcaaggacacctgccttcaaagccactgaggggaggaagggcagggcagactgcagatggccttgttgctggcatcccggccaggtgggcggggactaacaaagacagctgtttagggtcttctcccctcacccatgctttcatcatcccctccgcacagcctccc

SEQ ID NO: 63122 - DNA, 4067 bp, Homo sapiens
aggcatcgaactgcggtagtacgggttacggaatcactgtcgatgccctagctggatcaatgtttcgatctgatacgccagcttggcacgaggctgcctcaggaagcttggcttccctcccatgggaagtgctggaatccactcttgcctgaccctcccataagaaacaagggaaattcctttacgtgagccgccttgctcagaacaaagcttggcgtgtttcttattcctcatcaatctgacaaaatgggtatttatttgtgcctctcaagcgtgtggcttggacatgatgttccgcatcgtggaagtggccgtgcaccaagtggaatatctgttactatagtaacagttcctttttattgataccagaataaacaggaatgcaaaggctgtctcacttgttggcacatttcagcagcctccgttcccaggggtttaagaaccgccctctagaggcagccctccttgctagtctgggacttcccggtggagtgaggaacccagcaacacgctcctgacttcccttcccaaggactcgacctgagaaccgccatgtactcggagatccagagggagcgggcagacattgggggcctgatggcccggccagaatacagagagtggaatccggagctcatcaagcccaagaagctgctgaaccccgtgaaggcctctcggagtcaccaggagctccaccgggagctgctcatgaaccacagaaggggccttggtgtggacagcaagccagagctgcagcgtgtcctagagcaccgccggcggaaccagctcatcaagaagaagaaggaggagctggaagccaagcggctgcagtgcccctttgagcaggagctgctgagacggcagcagaggctgaaccagctggaaaaaccaccagagaaggaagaggatcacgcccccgagtttattaaagtcagggaaaacctgcggagaattgccacactgaccagcgaagagagagagctgtagggccagctgccgggctcaggccactgcccaccctggcctggacagcctccttcagcccttctgtacctggcaggccctgggacgtctgtgatgttcccacctgcttctgtagaaatgtgtcaccccagagggcctggctctccctgggaggctggggcccctaagctcctaggttttccttccaagcacccagccctcctgctccaagagggataacctgcacccctccctgcaaggggttcagagcccagcacaggagctttctctggcagaattgaggaggaagaggtggccctctgacttgacaagccttctgttctgcccaggccttcccaccaggaatctccgaggctccccagggccccgcttctccgtacaccccagctcctaggtctcagagaactcccccacctgtggttttacctgcagccagcagagcttagcttcaaggacacctgccttcaaagccactgaggggaggaagggcagggcagactgcaggtggccttgttgctggcatcccggccaggtgggcggggactaacaaagacagctgtttagggtcttctcccctcacccatgctttcatcatcccctccgcacagcctccccgtccaggccttctaaccacacctacccagggctgccgcattcctgcactcagaagtctgcagcggtgcctcacaaacttgattgtgcataaaaatcactggggatcttgttaatacagcttctaactcaatagatctgggagatcctgcatttctaacaagctcccaggtaaggcggaggctgctggtgtgaggaccatgctgtgagcagcagggcgagagtgcccagggctgatatatattggaaatatcacccctgaagccatcgctggcccccacctcctgtggactgatgccccagggattcccaccccacttctgcaaccccaggtatccttcattatccaccccatcccagactcccaccccagggattgcccgtgaagactttggcctagcaaattgtgttggttatgtgagtgttgttttaatcagagatgtacatgattgccaatctgcatttcttaccagtgtgaccacactgttacgatgcaattctagccaaaaaaaaaaaaaaaaaaaaaaaaaaattttttttttttactttttcctagtcttatggaaagcaaatatacaatgattttcagtaggcttctggaatagaaacagtggtttgaagaccccactgccacctttatggactggcccctttgagtctgaatccccggcctctgtcacctgagacccaacccctagctgggccaactccagtgaattcacccatttttcttcttcagaaggcctttcctgtgtgagacccacatattttaaccttttgctcctatcccatttttaaagaattagagaataaaccaggcctgtttcttttcccctgaaatccctgcctctggcttcctaaacccatcatctaaggtgacagagcagtgctggaatagcatctcctttcactttcccaaaactgccacagatagctgccactggcatgctctttgattcctggaagcaaacgtgggactgtcggaggaaagggattgttctggtcttactcataactgggtggtttgagggtgactgaagtcgtgcttttcctgtgtgtgctgccagcacagggctgtaaatgcagatattgcgcctgtgtgcgtgtgtataagtcaagctccaagaggctcctgaatgtgactggcgtgctgagaatgtgtttacgctgtttaatgtctgccaggtgagggttacactgaagatgcacaatccctaaaataaagatcaccacttccccaaagaagcagccctcgggtccatgtgttgttcagacatgtgaagagaagcaagacagagggtctcagatggacgagggctctccaagggaatgcctggggattcacccagtggtccccagaggtgctccatggaggcaacaagtcattccatgaagccccagaggtagaagggacctcaagcaccacgccctccagggcagccgtgcagacgaccttggttcacttttcaggggtcgtcccaactctgtatctccagccactccaactgtggaggctgtaaatccagattttcactgttccagtctcctttgcagcttaggatggctatgtgatcaggtgtggccaatgaaattgaagaggaagtctacctgggcttctgggaaagcttttccaataaaagacacaggcatggctaacacctccctgggcctcttcttcctaccttgattgagggtgtgatgcctggagccacagcagccactttgctaccatgacaaaaaggccaagagaatcacagagtcattgaccctatcattatttcaccaagccaataccagccgccatccttctccagaattcttgtaaataaaataaatccctctttgtttaaaccaaaaaaaaaaaaaaaaaaaaaaaaaaaagaaaaaagaaaaaaaacgaaaaagaagaaaaagaaaaaaaagaggggggcggcggcgcaaaaaagtagtatcaccaggggggcgaccacacgacagacgcgaccgcagccacgttttcgctagcagaaagggcggcgcccacatgtgtggaggcgacacactaattagcaccgagaagcacatggcgcggccgtcatttttaacagagcgagcgtgggatgagggttggaaacaacgttgctgaccggggcgaaacttctatggtggaggaggaggaacacccttctatagtgcgctgagggcgcacacaacctaattgtggggaaaaaacctactccatcagagagagtaataatatagaggactccctggtagggcggcgaaagacctaaacaacaagcccaccaacggatgaggtctaacgtgcggtgttaaccacaacacgaggagcgaagaataatctgattgcatgggcgtgagcgtaaaaaaatgcatctttgtcgccgccaccaggaaggagtaagtaatgatgaagggaccacatttttttctaccaacggcggacagggagcagtaaataaagggggggg

SEQ ID NO: 63123 - DNA, 3425 bp, Homo sapiens
aggcatcgaactgcggtagtacgggttacggaatcactgtcgatgccctagctggatcaatgtttcgatctgatacgccagcttggcacgaggctgcctcaggaagcttggcttccctcccatgggaagtgctggaatccactcttgcctgaccctcccataagaaacaagggaaattcctttacgtgagccgccttgctcagaacaaagcttggcgtgtttcttattcctcatcaatctgacaaaatgggtatttatttgtgcctctcaagcgtgtggcttggacatgatgttccgcatcgtggaagtggccgtgcaccaagtggaatatctgttactatagtaacagttcctttttattgataccagaataaacaggaatgcaaaggctgtctcacttgttggcacatttcagcagcctccgttcccaggggtttaagaaccgccctctagaggcagccctccttgctagtctgggacttcccggtggagtgaggaacccagcaacacgctcctgacttcccttcccaaggactcgacctgagaaccgccatgtactcggagatccagagggagcgggcagacattgggggcctgatggcccggccagaatacagagagtggaatccggagctcatcaagcccaagaagctgctgaaccccgtgaaggcctctcggagtcaccaggagctccaccgggagctgctcatgaaccacagaaggggccttggtgtggacagcaagccagagctgcagcgtgtcctagagcaccgccggcggaaccagctcatcaagaagaagaaggaggagctggaagccaagcggctgcagtgcccctttgagcaggagctgctgagacggcagcagaggctgaaccagctggaaaaaccaccagagaaggaagaggatcacgcccccgagtttattaaagtcagggaaaacctgcggagaattgccacactgaccagcgaagagagagagctgtagggccagctgccgggctcaggccactgcccaccctggcctggacagcctccttcagcccttctgtacctggcaggccctgggacgtctgtgatgttcccacctgcttctgtagaaatgtgtcaccccagagggcctggctctccctgggaggctggggcccctaagctcctaggttttccttccaagcacccagccctcctgctccaagagggataacctgcacccctccctgcaaggggttcagagcccagcacaggagctttctctggcagaattgaggaggaagaggtggccctctgacttgacaagccttctgttctgcccaggccttcccaccaggaatctccgaggctccccagggccccgcttctccgtacaccccagctcctaggtctcagagaactcccccacctgtggttttacctgcagccagcagagcttagcttcaaggacacctgccttcaaagccactgaggggaggaagggcagggcagactgcaggtggccttgttgctggcatcccggccaggtgggcggggactaacaaagacagctgtttagggtcttctcccctcacccatgctttcatcatcccctccgcacagcctccccgtccaggccttctaaccacacctacccagggctgccgcattcctgcactcagaagtctgcagcggtgcctcacaaacttgattgtgcataaaaatcactggggatcttgttaatacagcttctaactcaatagatctgggagatcctgcatttctaacaagctcccaggtaaggcggaggctgctggtgtgaggaccatgctgtgagcagcagggcgagagtgcccagggctgatatatattggaaatatcacccctgaagccatcgctggcccccacctcctgtggactgatgccccagggattcccaccccacttctgcaaccccaggtatccttcattatccaccccatcccagactcccaccccagggattgcccgtgaagactttggcctagcaaattgtgttggttatgtgagtgttgttttaatcagagatgtacatgattgccaatctgcatttcttaccagtgtgaccacactgttacgatgcaattctagccaaaaaaaaaaaaaaaaaaaaaaaaaaattttttttttttactttttcctagtcttatggaaagcaaatatacaatgattttcagtaggcttctggaatagaaacagtggtttgaagaccccactgccacctttatggactggcccctttgagtctgaatccccggcctctgtcacctgagacccaacccctagctgggccaactccagtgaattcacccatttttcttcttcagaaggcctttcctgtgtgagacccacatattttaaccttttgctcctatcccatttttaaagaattagagaataaaccaggcctgtttcttttcccctgaaatccctgcctctggcttcctaaacccatcatctaaggtgacagagcagtgctggaatagcatctcctttcactttcccaaaactgccacagatagctgccactggcatgctctttgattcctggaagcaaacgtgggactgtcggaggaaagggattgttctggtcttactcataactgggtggtttgagggtgactgaagtcgtgcttttcctgtgtgtgctgccagcacagggctgtaaatgcagatattgcgcctgtgtgcgtgtgtataagtcaagctccaagaggctcctgaatgtgactggcgtgctgagaatgtgtttacgctgtttaatgtctgccaggtgagggttacactgaagatgcacaatccctaaaataaagatcaccacttccccaaagaagcagccctcgggtccatgtgttgttcagacatgtgaagagaagcaagacagagggtctcagatggacgagggctctccaagggaatgcctggggattcacccagtggtccccagaggtgctccatggaggcaacaagtcattccatgaagccccagaggtagaagggacctcaagcaccacgccctccagggcagccgtgcagacgaccttggttcacttttcaggggtcgtcccaactctgtatctccagccactccaactgtggaggctgtaaatccagattttcactgttccagtctcctttgcagcttaggatggctatgtgatcaggtgtggccaatgaaattgaagaggaagtctacctgggcttctgggaaagcttttccaataaaagacacaggcatggctaacacctccctgggcctcttcttcctaccttgattgagggtgtgatgcctggagccacagcagccactttgctaccatgacaaaaagtcacacaggatcaaagaatgaccgacgactaccgaatacggcccggaccataccccgccgccaacatcggacgagattgttgtgaatt

SEQ ID NO: 63124 - DNA, 3398 bp, Homo sapiens
aggcatcgaactgcggtagtacgggttacggaatcactgtcgatgccctagctggatcaatgtttcgatctgatacgccagcttggcacgaggctgcctcaggaagcttggcttccctcccatgggaagtgctggaatccactcttgcctgaccctcccataagaaacaagggaaattcctttacgtgagccgccttgctcagaacaaagcttggcgtgtttcttattcctcatcaatctgacaaaatgggtatttatttgtgcctctcaagcgtgtggcttggacatgatgttccgcatcgtggaagtggccgtgcaccaagtggaatatctgttactatagtaacagttcctttttattgataccagaataaacaggaatgcaaaggctgtctcacttgttggcacatttcagcagcctccgttcccaggggtttaagaaccgccctctagaggcagccctccttgctagtctgggacttcccggtggagtgaggaacccagcaacacgctcctgacttcccttcccaaggactcgacctgagaaccgccatgtactcggagatccagagggagcgggcagacattgggggcctgatggcccggccagaatacagagagtggaatccggagctcatcaagcccaagaagctgctgaaccccgtgaaggcctctcggagtcaccaggagctccaccgggagctgctcatgaaccacagaaggggccttggtgtggacagcaagccagagctgcagcgtgtcctagagcaccgccggcggaaccagctcatcaagaagaagaaggaggagctggaagccaagcggctgcagtgcccctttgagcaggagctgctgagacggcagcagaggctgaaccagctggaaaaaccaccagagaaggaagaggatcacgcccccgagtttattaaagtcagggaaaacctgcggagaattgccacactgaccagcgaagagagagagctgtagggccagctgccgggctcaggccactgcccaccctggcctggacagcctccttcagcccttctgtacctggcaggccctgggacgtctgtgatgttcccacctgcttctgtagaaatgtgtcaccccagagggcctggctctccctgggaggctggggcccctaagctcctaggttttccttccaagcacccagccctcctgctccaagagggataacctgcacccctccctgcaaggggttcagagcccagcacaggagctttctctggcagaattgaggaggaagaggtggccctctgacttgacaagccttctgttctgcccaggccttcccaccaggaatctccgaggctccccagggccccgcttctccgtacaccccagctcctaggtctcagagaactcccccacctgtggttttacctgcagccagcagagcttagcttcaaggacacctgccttcaaagccactgaggggaggaagggcagggcagactgcaggtggccttgttgctggcatcccggccaggtgggcggggactaacaaagacagctgtttagggtcttctcccctcacccatgctttcatcatcccctccgcacagcctccccgtccaggccttctaaccacacctacccagggctgccgcattcctgcactcagaagtctgcagcggtgcctcacaaacttgattgtgcataaaaatcactggggatcttgttaatacagcttctaactcaatagatctgggagatcctgcatttctaacaagctcccaggtaaggcggaggctgctggtgtgaggaccatgctgtgagcagcagggcgagagtgcccagggctgatatatattggaaatatcacccctgaagccatcgctggcccccacctcctgtggactgatgccccagggattcccaccccacttctgcaaccccaggtatccttcattatccaccccatcccagactcccaccccagggattgcccgtgaagactttggcctagcaaattgtgttggttatgtgagtgttgttttaatcagagatgtacatgattgccaatctgcatttcttaccagtgtgaccacactgttacgatgcaattctagccaaaaaaaaaaaaaaaaaaaaaaaaaaattttttttttttactttttcctagtcttatggaaagcaaatatacaatgattttcagtaggcttctggaatagaaacagtggtttgaagaccccactgccacctttatggactggcccctttgagtctgaatccccggcctctgtcacctgagacccaacccctagctgggccaactccagtgaattcacccatttttcttcttcagaaggcctttcctgtgtgagacccacatattttaaccttttgctcctatcccatttttaaagaattagagaataaaccaggcctgtttcttttcccctgaaatccctgcctctggcttcctaaacccatcatctaaggtgacagagcagtgctggaatagcatctcctttcactttcccaaaactgccacagatagctgccactggcatgctctttgattcctggaagcaaacgtgggactgtcggaggaaagggattgttctggtcttactcataactgggtggtttgagggtgactgaagtcgtgcttttcctgtgtgtgctgccagcacagggctgtaaatgcagatattgcgcctgtgtgcgtgtgtataagtcaagctccaagaggctcctgaatgtgactggcgtgctgagaatgtgtttacgctgtttaatgtctgccaggtgagggttacactgaagatgcacaatccctaaaataaagatcaccacttccccaaagaagcagccctcgggtccatgtgttgttcagacatgtgaagagaagcaagacagagggtctcagatggacgagggctctccaagggaatgcctggggattcacccagtggtccccagaggtgctccatggaggcaacaagtcattccatgaagccccaccttggttcacttttcaggggtcgtcccaactctgtatctccagccactccaactgtggaggctgtaaatccagattttcactgttccagtctcctttgcagcttaggatggctatgtgatcaggtgtggccaatgaaattgaagaggaagtctacctgggcttctgggaaagcttttccaataaaagacacaggcatggctaacacctccctgggcctcttcttcctaccttgattgagggtgtgatgcctggagccacagcagccactttgctaccatgacaaaaaggccaagagaatcacagagtcattgaccctatcattatttcaccaagccaataccagccgccatccttctccagaattcttgtaaataaaataaatccctctttgtttaaacca

SEQ ID NO: 63125 - DNA, 734 bp, Homo sapiens
gatgtgacaggcgctgcaacagtggtgccggcagcagtgcgagggctaccgcgacgtgaatatctagcaacatggccacgtcgttccgcgacggcctggctttctgcgccatcctgcaccgccaccggcccgacctcataaacttcagtgctctcaagaaggaaaatatttatgaaaacaataaactggccttccgcgtggccgaggagcacttgggcatcccagccttgctggatgccgaggacatggtggccttgaaggtgcctgaccggctgagcatcttgacctacgtgtcccagtattacaactacttccacggctgccatagacgaccttggttcacttttcaggggtcgtcccaactctgtatctccagccactccaactgtggaggctgtaaatccagattttcactgttccagtctcctttgcagcttaggatggctatgtgatcaggtgtggccaatgaaattgaagaggaagtctacctgggcttctgggaaagcttttccaataaaagacacaggcatggctaacacctccctgggcctcttcttcctaccttgattgagggtgtgatgcctggagccacagcagccactttgctaccatgacaaaaaggccaagagaatcacagagtcattgaccctatcattatttcaccaagccaataccagccgccatccttctccagaattcttgtaaataaaataaatccctctttgtttaaacca

SEQ ID NO: 63126 - DNA, 1192 bp, Homo sapiens
ggagtctgctctcagagtatctgctgtgggagagccccggaccccaagcatcttcaaaggtctattattaatggggctgtccagctgaagctgacatccgcacgcagccctcccagagctctgcacctcagccagcccacggcctccaccgtctggccctgtcggctgagtggtgcccagcaaggtgagaaggccaagtcctgcccgctgggccaggcagaggtcacccgccgcgcctgagctaccggtgtgtgatgagaggactgccccacgtcttccctcatttcccagctgcctcagtttcccttcctgagagaggcagggttctgggaggtgaggagctgcagggacccaagaagggcatagaagccgcctggggacactggcccctctgtcaggatcaatcgccctaagcctgtctgaggcgctccgggcttaggagcagctgtgaaagccgcctttgtgcctgggagaatgagccgcaagaggacagggggccctcgccccgggagccccttgggtcctggctcctgagatcaacgccagcagggaggaccccagcctggcccctgcagcccacccaggcctggtgcccacttcgtgccatgggagcagcccagggaagaagaaaacatactctcctcaggccagatttcatagtgaaaatgagaagcagagacgaaatggctcagccgccatgtactcggagatccagagggagcgggcagacattgggggcctgatggcccggccagaatacagagagtggaatccggagctcatcaagcccaagaagctgctgaaccccgtgaaggcctctcggagtcaccactcccaggtaaggcggaggctgctggtgtgaggaccatgctgtgagcagcagggcgagagtgcccagggctgatatatattggaaatatcacccctgaagccatcgctggcccccacctcctgtggactgatgccccagggattcccaccccacttctgcaaccccaggtatccttcattatccaccccatcccagactcccaccccagggattgcccgtgaagactttggcctagcaaattgtgttggttatgtgagtgttgttttaatcagagatgtacatgattgccaatctgcatttcttaccagtgtgaccacactgttacgatgcaattctagccaaaaaaaaaaaaaaaaaaaa

SEQ ID NO: 63127 - DNA, 3548 bp, Homo sapiens
aggcatcgaactgcggtagtacgggttacggaatcactgtcgatgccctagctggatcaatgtttcgatctgatacgccagcttggcacgaggctgcctcaggaagcttggcttccctcccatgggaagtgctggaatccactcttgcctgaccctcccataagaaacaagggaaattcctttacgtgagccgccttgctcagaacaaagcttggcgtgtttcttattcctcatcaatctgacaaaatgggtatttatttgtgcctctcaagcgtgtggcttggacatgatgttccgcatcgtggaagtggccgtgcaccaagtggaatatctgttactatagtaacagttcctttttattgataccagaataaacaggaatgcaaaggctgtctcacttgttggcacatttcagcagcctccgttcccaggggtttaagaaccgccctctagaggcagccctccttgctagtctgggacttcccggtggagtgaggaacccagcaacacgctcctgacttcccttcccaaggactcgacctgagaaggacacagcagtctctgaatttcatgctctcctctttgatgtgaagaaaatgaaaagctgaacagttgtggaactgtggatagagttagacaataaggccgccatgtactcggagatccagagggagcgggcagacattgggggcctgatggcccggccagaatacagagagtggaatccggagctcatcaagcccaagaagctgctgaaccccgtgaaggcctctcggagtcaccaggagctccaccgggagctgctcatgaaccacagaaggggccttggtgtggacagcaagccagagctgcagcgtgtcctagagcaccgccggcggaaccagctcatcaagaagaagaaggaggagctggaagccaagcggctgcagtgcccctttgagcaggagctgctgagacggcagcagaggctgaaccagctggaaaaaccaccagagaaggaagaggatcacgcccccgagtttattaaagtcagggaaaacctgcggagaattgccacactgaccagcgaagagagagagctgtagggccagctgccgggctcaggccactgcccaccctggcctggacagcctccttcagcccttctgtacctggcaggccctgggacgtctgtgatgttcccacctgcttctgtagaaatgtgtcaccccagagggcctggctctccctgggaggctggggcccctaagctcctaggttttccttccaagcacccagccctcctgctccaagagggataacctgcacccctccctgcaaggggttcagagcccagcacaggagctttctctggcagaattgaggaggaagaggtggccctctgacttgacaagccttctgttctgcccaggccttcccaccaggaatctccgaggctccccagggccccgcttctccgtacaccccagctcctaggtctcagagaactcccccacctgtggttttacctgcagccagcagagcttagcttcaaggacacctgccttcaaagccactgaggggaggaagggcagggcagactgcaggtggccttgttgctggcatcccggccaggtgggcggggactaacaaagacagctgtttagggtcttctcccctcacccatgctttcatcatcccctccgcacagcctccccgtccaggccttctaaccacacctacccagggctgccgcattcctgcactcagaagtctgcagcggtgcctcacaaacttgattgtgcataaaaatcactggggatcttgttaatacagcttctaactcaatagatctgggagatcctgcatttctaacaagctcccaggtaaggcggaggctgctggtgtgaggaccatgctgtgagcagcagggcgagagtgcccagggctgatatatattggaaatatcacccctgaagccatcgctggcccccacctcctgtggactgatgccccagggattcccaccccacttctgcaaccccaggtatccttcattatccaccccatcccagactcccaccccagggattgcccgtgaagactttggcctagcaaattgtgttggttatgtgagtgttgttttaatcagagatgtacatgattgccaatctgcatttcttaccagtgtgaccacactgttacgatgcaattctagccaaaaaaaaaaaaaaaaaaaaaaaaaaattttttttttttactttttcctagtcttatggaaagcaaatatacaatgattttcagtaggcttctggaatagaaacagtggtttgaagaccccactgccacctttatggactggcccctttgagtctgaatccccggcctctgtcacctgagacccaacccctagctgggccaactccagtgaattcacccatttttcttcttcagaaggcctttcctgtgtgagacccacatattttaaccttttgctcctatcccatttttaaagaattagagaataaaccaggcctgtttcttttcccctgaaatccctgcctctggcttcctaaacccatcatctaaggtgacagagcagtgctggaatagcatctcctttcactttcccaaaactgccacagatagctgccactggcatgctctttgattcctggaagcaaacgtgggactgtcggaggaaagggattgttctggtcttactcataactgggtggtttgagggtgactgaagtcgtgcttttcctgtgtgtgctgccagcacagggctgtaaatgcagatattgcgcctgtgtgcgtgtgtataagtcaagctccaagaggctcctgaatgtgactggcgtgctgagaatgtgtttacgctgtttaatgtctgccaggtgagggttacactgaagatgcacaatccctaaaataaagatcaccacttccccaaagaagcagccctcgggtccatgtgttgttcagacatgtgaagagaagcaagacagagggtctcagatggacgagggctctccaagggaatgcctggggattcacccagtggtccccagaggtgctccatggaggcaacaagtcattccatgaagccccagaggtagaagggacctcaagcaccacgccctccagggcagccgtgcagacgaccttggttcacttttcaggggtcgtcccaactctgtatctccagccactccaactgtggaggctgtaaatccagattttcactgttccagtctcctttgcagcttaggatggctatgtgatcaggtgtggccaatgaaattgaagaggaagtctacctgggcttctgggaaagcttttccaataaaagacacaggcatggctaacacctccctgggcctcttcttcctaccttgattgagggtgtgatgcctggagccacagcagccactttgctaccatgacaaaaaggccaagagaatcacagagtcattgaccctatcattatttcaccaagccaataccagccgccatccttctccagaattcttgtaaataaaataaatccctctttgtttaaacca

SEQ ID NO: 63128 - DNA, 534 bp, Homo sapiens
gacgggagtctatctccaagactcgacctgagaaccgccatgtactcggagatccagagggagcgggcagacattgggggcctgatggcccggccagaatacagagagtggaatccggagctcatcaagcccaagaagctgctgaaccccgtgaaggcctctcggagtcaccactcccaggtaaggcggaggctgctggtgtgaggaccatgctgtgagcagcagggcgagagtgcccagggctgatatatattggaaatatcacccctgaagccatcgctggcccccacctcctgtggactgatgccccagggattcccaccccacttctgcaaccccaggtatccttcattatccaccccatcccagactcccaccccagggattgcccgtgaagactttggcctagcaaattgtgttggttatgtgagtgttgttttaatcagagatgtacatgattgccaatctgcatttcttaccagtgtgaccacactgttacgatgcaattctagccaaaaaaaaaaaaaaaaaaaa

SEQ ID NO: 63129 - DNA, 3396 bp, Homo sapiens
aggcatcgaactgcggtagtacgggttacggaatcactgtcgatgccctagctggatcaatgtttcgatctgatacgccagcttggcacgaggctgcctcaggaagcttggcttccctcccatgggaagtgctggaatccactcttgcctgaccctcccataagaaacaagggaaattcctttacgtgagccgccttgctcagaacaaagcttggcgtgtttcttattcctcatcaatctgacaaaatgggtatttatttgtgcctctcaagcgtgtggcttggacatgatgttccgcatcgtggaagtggccgtgcaccaagtggaatatctgttactatagtaacagttcctttttattgataccagaataaacaggaatgcaaaggctgtctcacttgttggcacatttcagcagcctccgttcccaggggtttaagaaccgccctctagaggcagccctccttgctagtctgggacttcccggtggagtgaggaacccagcaacacgctcctgacttcccttcccaaggactcgacctgagaaccgccatgtactcggagatccagagggagcgggcagacattgggggcctgatggcccggccagaatacagagagtggaatccggagctcatcaagcccaagaagctgctgaaccccgtgaaggcctctcggagtcaccaggagctccaccgggagctgctcatgaaccacagaaggggccttggtgtggacagcaagccagagctgcagcgtgtcctagagcaccgccggcggaaccagctcatcaagaagaagaaggaggagctggaagccaagcggctgcagtgcccctttgagcaggagctgctgagacggcagcagaggctgaaccagctggaaaaaccaccagagaaggaagaggatcacgcccccgagtttattaaagtcagggaaaacctgcggagaattgccacactgaccagcgaagagagagagctgtagggccagctgccgggctcaggccactgcccaccctggcctggacagcctccttcagcccttctgtacctggcaggccctgggacgtctgtgatgttcccacctgcttctgtagaaatgtgtcaccccagagggcctggctctccctgggaggctggggcccctaagctcctaggttttccttccaagcacccagccctcctgctccaagagggataacctgcacccctccctgcaaggggttcagagcccagcacaggagctttctctggcagaattgaggaggaagaggtggccctctgacttgacaagccttctgttctgcccaggccttcccaccaggaatctccgaggctccccagggccccgcttctccgtacaccccagctcctaggtctcagagaactcccccacctgtggttttacctgcagccagcagagcttagcttcaaggacacctgccttcaaagccactgaggggaggaagggcagggcagactgcaggtggccttgttgctggcatcccggccaggtgggcggggactaacaaagacagctgtttagggtcttctcccctcacccatgctttcatcatcccctccgcacagcctccccgtccaggccttctaaccacacctacccagggctgccgcattcctgcactcagaagtctgcagcggtgcctcacaaacttgattgtgcataaaaatcactggggatcttgttaatacagcttctaactcaatagatctgggagatcctgcatttctaacaagctcccaggtaaggcggaggctgctggtgtgaggaccatgctgtgagcagcagggcgagagtgcccagggctgatatatattggaaatatcacccctgaagccatcgctggcccccacctcctgtggactgatgccccagggattcccaccccacttctgcaaccccaggtatccttcattatccaccccatcccagactcccaccccagggattgcccgtgaagactttggcctagcaaattgtgttggttatgtgagtgttgttttaatcagagatgtacatgattgccaatctgcatttcttaccagtgtgaccacactgttacgatgcaattctagccaaaaaaaaaaaaaaaaaaaaaaaaaaattttttttttttactttttcctagtcttatggaaagcaaatatacaatgattttcagtaggcttctggaatagaaacagtggtttgaagaccccactgccacctttatggactggcccctttgagtctgaatccccggcctctgtcacctgagacccaacccctagctgggccaactccagtgaattcacccatttttcttcttcagaaggcctttcctgtgtgagacccacatattttaaccttttgctcctatcccatttttaaagaattagagaataaaccaggcctgtttcttttcccctgaaatccctgcctctggcttcctaaacccatcatctaaggtgacagagcagtgctggaatagcatctcctttcactttcccaaaactgccacagatagctgccactggcatgctctttgattcctggaagcaaacgtgggactgtcggaggaaagggattgttctggtcttactcataactgggtggtttgagggtgactgaagtcgtgcttttcctgtgtgtgctgccagcacagggctgtaaatgcagatattgcgcctgtgtgcgtgtgtataagtcaagctccaagaggctcctgaatgtgactggcgtgctgagaatgtgtttacgctgtttaatgtctgccaggtgagggttacactgaagatgcacaatccttcagacatgtgaagagaagcaagacagagggtctcagatggacgagggctctccaagggaatgcctggggattcacccagtggtccccagaggtgctccatggaggcaacaagtcattccatgaagccccagaggtagaagggacctcaagcaccacgccctccagggcagccgtgcagacgaccttggttcacttttcaggggtcgtcccaactctgtatctccagccactccaactgtggaggctgtaaatccagattttcactgttccagtctcctttgcagcttaggatggctatgtgatcaggtgtggccaatgaaattgaagaggaagtctacctgggcttctgggaaagcttttccaataaaagacacaggcatggctaacacctccctgggcctcttcttcctaccttgattgagggtgtgatgcctggagccacagcagccactttgctaccatgacaaaaaggccaagagaatcacagagtcattgaccctatcattatttcaccaagccaataccagccgccatccttctccagaattcttgtaaataaaataaatccctctttgtttaaacca

SEQ ID NO: 63130 - DNA, 3431 bp, Homo sapiens
aggcatcgaactgcggtagtacgggttacggaatcactgtcgatgccctagctggatcaatgtttcgatctgatacgccagcttggcacgaggctgcctcaggaagcttggcttccctcccatgggaagtgctggaatccactcttgcctgaccctcccataagaaacaagggaaattcctttacgtgagccgccttgctcagaacaaagcttggcgtgtttcttattcctcatcaatctgacaaaatgggtatttatttgtgcctctcaagcgtgtggcttggacatgatgttccgcatcgtggaagtggccgtgcaccaagtggaatatctgttactatagtaacagttcctttttattgataccagaataaacaggaatgcaaaggctgtctcacttgttggcacatttcagcagcctccgttcccaggggtttaagaaccgccctctagaggcagccctccttgctagtctgggacttcccggtggagtgaggaacccagcaacacgctcctgacttcccttcccaaggactcgacctgagaaccgccatgtactcggagatccagagggagcgggcagacattgggggcctgatggcccggccagaatacagagagtggaatccggagctcatcaagcccaagaagctgctgaaccccgtgaaggcctctcggagtcaccaggagctccaccgggagctgctcatgaaccacagaaggggccttggtgtggacagcaagccagagctgcagcgtgtcctagagcaccgccggcggaaccagctcatcaagaagaagaaggaggagctggaagccaagcggctgcagtgcccctttgagcaggagctgctgagacggcagcagaggctgaaccagctggaaaaaccaccagagaaggaagaggatcacgcccccgagtttattaaagtcagggaaaacctgcggagaattgccacactgaccagcgaagagagagagctgtagggccagctgccgggctcaggccactgcccaccctggcctggacagcctccttcagcccttctgtacctggcaggccctgggacgtctgtgatgttcccacctgcttctgtagaaatgtgtcaccccagagggcctggctctccctgggaggctggggcccctaagctcctaggttttccttccaagcacccagccctcctgctccaagagggataacctgcacccctccctgcaaggggttcagagcccagcacaggagctttctctggcagaattgaggaggaagaggtggccctctgacttgacaagccttctgttctgcccaggccttcccaccaggaatctccgaggctccccagggccccgcttctccgtacaccccagctcctaggtctcagagaactcccccacctgtggttttacctgcagccagcagagcttagcttcaaggacacctgccttcaaagccactgaggggaggaagggcagggcagactgcaggtggccttgttgctggcatcccggccaggtgggcggggactaacaaagacagctgtttagggtcttctcccctcacccatgctttcatcatcccctccgcacagcctccccgtccaggccttctaaccacacctacccagggctgccgcattcctgcactcagaagtctgcagcggtgcctcacaaacttgattgtgcataaaaatcactggggatcttgttaatacagcttctaactcaatagatctgggagatcctgcatttctaacaagctcccaggtaaggcggaggctgctggtgtgaggaccatgctgtgagcagcagggcgagagtgcccagggctgatatatattggaaatatcacccctgaagccatcgctggcccccacctcctgtggactgatgccccagggattcccaccccacttctgcaaccccaggtatccttcattatccaccccatcccagactcccaccccagggattgcccgtgaagactttggcctagcaaattgtgttggttatgtgagtgttgttttaatcagagatgtacatgattgccaatctgcatttcttaccagtgtgaccacactgttacgatgcaattctagccaaaaaaaaaaaaaaaaaaaaaaaaaaattttttttttttactttttcctagtcttatggaaagcaaatatacaatgattttcagtaggcttctggaatagaaacagtggtttgaagaccccactgccacctttatggactggcccctttgagtctgaatccccggcctctgtcacctgagacccaacccctagctgggccaactccagtgaattcacccatttttcttcttcagaaggcctttcctgtgtgagacccacatattttaaccttttgctcctatcccatttttaaagaattagagaataaaccaggcctgtttcttttcccctgaaatccctgcctctggcttcctaaacccatcatctaaggtgacagagcagtgctggaatagcatctcctttcactttcccaaaactgccacagatagctgccactggcatgctctttgattcctggaagcaaacgtgggactgtcggaggaaagggattgttctggtcttactcataactgggtggtttgagggtgactgaagtcgtgcttttcctgtgtgtgctgccagcacagggctgtaaatgcagatattgcgcctgtgtgcgtgtgtataagtcaagctccaagaggctcctgaatgtgactggcgtgctgagaatgtgtttacgctgtttaatgtctgccaggtgagggttacactgaagatgcacaatccctaaaataaagatcaccacttccccaaagaagcagccctcgggtccatgtgttgttcagacatgtgaagagaagcaagacagagggtctcagatggacgagggctctccaagggaatgcctggggattcacccagtggtccccagaggtgctccatggaggcaacaagtcattccatgaagccccagaggtagaagggacctcaagcaccacgccctccagggcagccgtgcagacgaccttggttcacttttcaggggtcgtcccaactctgtatctccagccactccaactgtggaggctgtaaatccagattttcactgttccagtctcctttgcagcttaggatggctatgtgatcaggtgtggccaatgaaattgaagaggaagtctacctgggcttctgggaaagcttttccaataaaagacacaggcatggctaacacctccctgggcctcttcttcctaccttgattgagggtgtgatgcctggagccacagcagccactttgctaccatgacaaaaaggccaagagaatcacagagtcattgaccctatcattatttcaccaagccaataccagccgccattgggctgccattcgggccggctgccattggg

SEQ ID NO: 63131 - DNA, 3595 bp, Homo sapiens
ggagtctgctctcagagtatctgctgtgggagagccccggaccccaagcatcttcaaaggtctattattaatggggctgtccagctgaagctgacatccgcacgcagccctcccagagctctgcacctcagccagcccacggcctccaccgtctggccctgtcggctgagtggtgcccagcaaggtgagaaggccaagtcctgcccgctgggccaggcagaggtcacccgccgcgcctgagctaccggtgtgtgatgagaggactgccccacgtcttccctcatttcccagctgcctcagtttcccttcctgagagaggcagggttctgggaggtgaggagctgcagggacccaagaagggcatagaagccgcctggggacactggcccctctgtcaggatcaatcgccctaagcctgtctgaggcgctccgggcttaggagcagctgtgaaagccgcctttgtgcctgggagaatgagccgcaagaggacagggggccctcgccccgggagccccttgggtcctggctcctgagatcaacgccagcagggaggaccccagcctggcccctgcagcccacccaggcctggtgcccacttcgtgccatgggagcagcccagggaagaagaaaacatactctcctcaggccagatttcatagtgaaaatgagaagcagagacgaaatggctcagccgccatgtactcggagatccagagggagcgggcagacattgggggcctgatggcccggccagaatacagagagtggaatccggagctcatcaagcccaagaagctgctgaaccccgtgaaggcctctcggagtcaccaggagctccaccgggagctgctcatgaaccacagaaggggccttggtgtggacagcaagccagagctgcagcgtgtcctagagcaccgccggcggaaccagctcatcaagaagaagaaggaggagctggaagccaagcggctgcagtgcccctttgagcaggagctgctgagacggcagcagaggctgaaccagctggaaaaaccaccagagaaggaagaggatcacgcccccgagtttattaaagtcagggaaaacctgcggagaattgccacactgaccagcgaagagagagagctgtagggccagctgccgggctcaggccactgcccaccctggcctggacagcctccttcagcccttctgtacctggcaggccctgggacgtctgtgatgttcccacctgcttctgtagaaatgtgtcaccccagagggcctggctctccctgggaggctggggcccctaagctcctaggttttccttccaagcacccagccctcctgctccaagagggataacctgcacccctccctgcaaggggttcagagcccagcacaggagctttctctggcagaattgaggaggaagaggtggccctctgacttgacaagccttctgttctgcccaggccttcccaccaggaatctccgaggctccccagggccccgcttctccgtacaccccagctcctaggtctcagagaactcccccacctgtggttttacctgcagccagcagagcttagcttcaaggacacctgccttcaaagccactgaggggaggaagggcagggcagactgcaggtggccttgttgctggcatcccggccaggtgggcggggactaacaaagacagctgtttagggtcttctcccctcacccatgctttcatcatcccctccgcacagcctccccgtccaggccttctaaccacacctacccagggctgccgcattcctgcactcagaagtctgcagcggtgcctcacaaacttgattgtgcataaaaatcactggggatcttgttaatacagcttctaactcaatagatctgggagatcctgcatttctaacaagctcccaggtaaggcggaggctgctggtgtgaggaccatgctgtgagcagcagggcgagagtgcccagggctgatatatattggaaatatcacccctgaagccatcgctggcccccacctcctgtggactgatgccccagggattcccaccccacttctgcaaccccaggtatccttcattatccaccccatcccagactcccaccccagggattgcccgtgaagactttggcctagcaaattgtgttggttatgtgagtgttgttttaatcagagatgtacatgattgccaatctgcatttcttaccagtgtgaccacactgttacgatgcaattctagccaaaaaaaaaaaaaaaaaaaaaaaaaaattttttttttttactttttcctagtcttatggaaagcaaatatacaatgattttcagtaggcttctggaatagaaacagtggtttgaagaccccactgccacctttatggactggcccctttgagtctgaatccccggcctctgtcacctgagacccaacccctagctgggccaactccagtgaattcacccatttttcttcttcagaaggcctttcctgtgtgagacccacatattttaaccttttgctcctatcccatttttaaagaattagagaataaaccaggcctgtttcttttcccctgaaatccctgcctctggcttcctaaacccatcatctaaggtgacagagcagtgctggaatagcatctcctttcactttcccaaaactgccacagatagctgccactggcatgctctttgattcctggaagcaaacgtgggactgtcggaggaaagggattgttctggtcttactcataactgggtggtttgagggtgactgaagtcgtgcttttcctgtgtgtgctgccagcacagggctgtaaatgcagatattgcgcctgtgtgcgtgtgtataagtcaagctccaagaggctcctgaatgtgactggcgtgctgagaatgtgtttacgctgtttaatgtctgccaggtgagggttacactgaagatgcacaatccctaaaataaagatcaccacttccccaaagaagcagccctcgggtccatgtgttgttcagacatgtgaagagaagcaagacagagggtctcagatggacgagggctctccaagggaatgcctggggattcacccagtggtccccagaggtgctccatggaggcaacaagtcattccatgaagccccagaggtagaagggacctcaagcaccacgccctccagggcagccgtgcagacgaccttggttcacttttcaggggtcgtcccaactctgtatctccagccactccaactgtggaggctgtaaatccagattttcactgttccagtctcctttgcagcttaggatggctatgtgatcaggtgtggccaatgaaattgaagaggaagtctacctgggcttctgggaaagcttttccaataaaagacacaggcatggctaacacctccctgggcctcttcttcctaccttgattgagggtgtgatgcctggagccacagcagccactttgctaccatgacaaaaaggccaagagaatcacagagtcattgaccctatcattatttcaccaagccaataccagccgccatccttctccagaattcttgtaaataaaataaatccctctttgtttaaacca

SEQ ID NO: 63132 - DNA, 1288 bp, Homo sapiens
aggcatcgaactgcggtagtacgggttacggaatcactgtcgatgccctagctggatcaatgtttcgatctgatacgccagcttggcacgaggctgcctcaggaagcttggcttccctcccatgggaagtgctggaatccactcttgcctgaccctcccataagaaacaagggaaattcctttacgtgagccgccttgctcagaacaaagcttggcgtgtttcttattcctcatcaatctgacaaaatgggtatttatttgtgcctctcaagcgtgtggcttggacatgatgttccgcatcgtggaagtggccgtgcaccaagtggaatatctgttactatagtaacagttcctttttattgataccagaataaacaggaatgcaaaggctgtctcacttgttggcacatttcagcagcctccgttcccaggggtttaagaaccgccctctagaggcagccctccttgctagtctgggacttcccggtggagtgaggaacccagcaacacgctcctgacttcccttcccaaggactcgacctgagaaccgccatgtactcggagatccagagggagcgggcagacattgggggcctgatggcccggccagaatacagagagtggaatccggagctcatcaagcccaagaagctgctgaaccccgtgaaggcctctcggagtcaccaggagctccaccgggagctgctcatgaaccacagaaggggccttggtgtggacagcaagccagagctgcagcgtgtcctagagcaccgccggcggaaccagctcatcaagaagaagaaggaggagctggaagccaagcggctgcagtgcccctttgagcaggagctgctgagacggcagcagaggctgaaccaggtgggtgatgggcacccagcagggaccacgcatcctccagggctgtcctccagggaggagctctgctgtggccacagctagtaagagggaagaggatcggcggacagagcactggactgagagtccactcctggcctgagtcctccctctgccattcactttgctaggtccttagggcgagtgcttccctgaacctcagcttcctcactggcccagtgtactgcatgctgattctgatttcattcttataactgtcttgtgagccaggtggcattcccattttagagatggggaagctgaggcccagagggggtgagtgatttgaaccaggctgcacaaggagaactcagtctcatgctctgtgccccagctaccaggctgatagcaaaactcatccccaggttggttc

SEQ ID NO: 63133 - DNA, 485 bp, Homo sapiens
cctgactttaggtgatctgcccacctcggccttccaaagtgctaggattacaggtgtgagccaccgtgcccagcccaaatatacttattttttaaacattttttatttcttgtcattattttcaaatgtctgttttatttcttaaagcatattaagtatatttattgtatagtttacttctgatatttctagtatctgcaagtctgtgaaagtgtgatgttgttgtctgctatttcctctggctcttacttggtgtgccttttgcctagtatactttgtctttgtgtgttgggaggggagttcatgttctttagaatgttatctgcaggattttttgagaactggttaaagttggtgtccttcagaaaggattttcttttacttcgattgcctgggaggactaccagttctctctgtgattgtttttttttttttttcttgtcatgctttccacttccactgcatttctcactggctcaactata

SEQ ID NO: 63134 - DNA, 1011 bp, Homo sapiens
ggcagccaccgagccgagtcaccgccctgcgccgccagcccaggccccgcagcctacgtcgggcgcagacgctcccctggcggggcgggcgggggctgccaggagaatcaccagtacccgcctcctcgccccgcatcctcgggcctgagcgcccgcccaccggcacgcggaggggcttcctggaacgattaggcggaccgtcgcccccaggctcctttctcccctggcggagtttctgcccgctgcgatcttctctaactaccactctgcggtcgcagaagaccatccagaggggagatgaggactgggaagcccgcttgagtgatgcacatctgtggcttgttacgagagccgcgtgaattaaagcaaggcaggggacaccgccctgccactgctttctaaccttgattttcatctttccttctcggatggaatctagaagccgcaggagttttcacttgcgtctgtgatggagtttcccgctccccgcccccccgcaccaacccgagctcttttttcgcttggagcccgtaagttgctagagggcaccacgatggctctaggagcgctgtcggtgttttcttctggaggtgatcctgaaatttcctccccaaagcaagctctgttgcgaggagcaggctggggatatgtgcaagtgaatgtgtattccaagagggggatgatacgcagatcttttggtgtataggaattaatacttttagattatcagtaaaatgtatactttcactggactgagagagaacaaggcttacggttacatcaaccggatcaacaaatatttattgtacttgtaatgagtaatacttagtctattatataaacataaatggaaccataaaaaaaaaaaaaaaaaaaaaaaaaaaaagggggggggcaaaaaatcccagggggccaagttagggcccgtttttggaaagggggccaaagaggggtaaaaaaggagggcgcgtaaaaggggggggaaaggcagggattgggagaccatcgggg

SEQ ID NO: 63135 - DNA, 2052 bp, Homo sapiens
  misc_feature (405)..(405): n is a, c, g, or t
cgggattggtatcaaaggcttccactgccttctgctgaaggcatgatgtatgcggctccacttgagaccaggtatcaggatgttcagagggagccagctctttatgttggccccaggccagtactaagcaaattaaaaagaccgacatgggcttcctccctcatatcatttcattctaaagcagcaagcttgtcatacccatggggtcctatgttgatagaaatggagaggtagggatacagtttattctccaaaaatggactgcccacttccatgctgagtgatgctcagggaagtgatgcccgcagaaggcgtctgggcctaaggatccatggaagtcaggagcattaaatcccaaaccaaatcaactccagatatatcagtgtcaaaagcccaagaaaaganaaaaaagaaaaaaacaatccccaggggttctatgaccctattgactcctacagttctttcccttctcttggcaatggaagctccagtacccagattggagattaggatgagacaactttgtgtatatgtgcacgtgtgtggtgtgtgtgtgttttattaaggactaagatacacacttatctattctgtctccttctagcttttaggcagcctactcttggaaactggaggaaactgccctgagaattattagaatgctaataatagtaattggtaacattaacaatcagtgttagacaacagtgaggcatatcatgtgtttttattaaaaatgataaagatgtgtttcttctcatctaaaggaggtaactttgtgataattagtttgattaaaagtttgaagtatgaggactccttgttatgcctttaaggtaatttttaaaaaaaatctgagtagagatagtactaatattggcaagaaggtccccaggatagacctagcaaggagataagaatagatcattaaaaaataaatataaatggattggatagaattcccattcagctgttttaacacagaaattcaaaatagtgacttaacatggaagctatttctctcttacttaaaggcaaactggttttacagctctggtgtgtgatgttaccagacgcctaggccctctcctgttgctctgtcatcctaatgtgctgcatccacctcatggaccaagatggctgccacagctcctgccatcacatttacatttaagatagtagagaggaagtggagggaagttgcacatattgcttccagtcacatctcatgggttaaaacctagacatttgccacatctagctgcaaagaaggctagggaatgtctttattattgattgtcatgtgccttgataagcataggaggttctgttattaaagaaacaatgtgaaataatgtggaaattaatactgataaagactatcagtatctgatacaaaagggaaccaaacgatatttaagtgctttttaatgtcacttacttcatcatatgttttgcgaaagataagactaaaattcatcactttgtgtagcatttaatggttttcagaacatttttgcatgtgctgtctcatttggtcctcattacattcttgtgtgctaaataggacctctattcattacaccacttgctagtttgggatggagagtcagatatgttgaaagatttcccaacgactctaatttatgagcaagaaagttgcttagagccccagccttttgacttcatagtctttccgactactttatgcagctcagcatcagtactgggattgggaactgcaagaatatgaaatgtaaatctttattgatttatatccttccttaccttttttgacatggaaaatgccaaagacactggtcaagtttactctcagctccctacctccagtgagggggcctcttattaggaatgaaatatccaagagatgggcggtgctgcaggggagaccaaaactcagaggaggcattcaaacacttctagcaggttgtctactccatccaactcaaaacctattcaatatgaaggccgagggaatgtgctcacaactccctattaagggaaatcaatataaacccgcccccaccaacc

SEQ ID NO: 63136 - DNA, 3777 bp, Homo sapiens
  misc_feature (405)..(405): n is a, c, g, or t
cgggattggtatcaaaggcttccactgccttctgctgaaggcatgatgtatgcggctccacttgagaccaggtatcaggatgttcagagggagccagctctttatgttggccccaggccagtactaagcaaattaaaaagaccgacatgggcttcctccctcatatcatttcattctaaagcagcaagcttgtcatacccatggggtcctatgttgatagaaatggagaggtagggatacagtttattctccaaaaatggactgcccacttccatgctgagtgatgctcagggaagtgatgcccgcagaaggcgtctgggcctaaggatccatggaagtcaggagcattaaatcccaaaccaaatcaactccagatatatcagtgtcaaaagcccaagaaaaganaaaaaagaaaaaaacaatccccaggggttctatgaccctattgactcctacagttctttcccttctcttggcaatggaagctccagtacccagattggagattaggatgagacaactttgtgtatatgtgcacgtgtgtggtgtgtgtgtgttttattaaggactaagatacacacttatctattctgtctccttctagcttttaggcagcctactcttggaaactggaggaaactgccctgagaattattagaatgctaataatagtaattggtaacattaacaatcagtgttagacaacagtgaggcatatcatgtgtttttattaaaaatgataaagatgtgtttcttctcatctaaaggaggtaactttgtgataattagtttgattaaaagtttgaagtatgaggactccttgttatgcctttaaggtaatttttaaaaaaaatctgagtagagatagtactaatattggcaagaaggtccccaggatagacctagcaaggagataagaatagatcattaaaaaataaatataaatggattggatagaattcccattcagctgttttaacacagaaattcaaaatagtgacttaacatggaagctatttctctcttacttaaaggcaaactggttttacagctctggtgtgtgatgttaccagacgcctaggccctctcctgttgctctgtcatcctaatgtgctgcatccacctcatggaccaagatggctgccacagctcctgccatcacatttacatttaagatagtagagaggaagtggagggaagttgcacatattgcttccagtcacatctcatgggttaaaacctagacatttgccacatctagctgcaaagaaggctagggaatgtctttattattgattgtcatgtgccttgataagcataggaggttctgttattaaagaaacaatgtgaaataatgtggaaattaatactgataaagactatcagtatctgatacaaaagggaaccaaacgatatttaagtgctttttaatgtcacttacttcatcatatgttttgcgaaagataagactaaaattcatcactttgtgtagcatttaatggttttcagaacatttttgcatgtgctgtctcatttggtcctcattacattcttgtgtgctaaataggacctctattcattacaccacttgctagtttgggatggagagtcagatatgttgaaagatttcccaacgactctaatttatgagcaagaaagttgcttagagccccagccttttgacttcatagtctttccgactactttatgcagctcagcatcagtactgggattgggaactgcaagaatatgaaatgtaaatctttattgatttatatccttccttaccttttttgacatggaaaatgccaaagacactggtcaagtttactctcagctccctacctccagtgagggggcctcttattaggaatgaaatatccaagagatgggcggtgctgcaggggagaccaaaactcagaggaggcattcaaacacttctagcaggttgtctactccatccaactcaaaacctattcaatatgaaggccgagggaatgtgctcacaactccctattaagggaaatcaatataaacccgcccccaccaaccaaaaaaaaaaaaagaaagaaaactctccctttttaatgtcttcttccccaggctcctggtactttgtcagcaacatactgctttcattcttaaaggtttcattggctgttaaatgagtccctttgcatactcactggagagaggaaatgctttaagttgtcctaagataacatctgcacacagagagtttatctgattccttatcaaccatgatctctatctgaggtcctgtatagtgggatcatttagagatgggggttagggagagtaggagtaactctagagaaaattgtggctcctaaaggaggcagatctttccaaggtggaaaggtaatgaattaaatatatgacatgtaatactgaaaaaatagaaaaatgactaagatacagtctctgtcctctagaactagggcagcctggaaacatatggactataattattttagctatttaaaagaaatgaatgaagaggatcttgagacaggaccagagcattggaatggttgtagggactgaaagctgagttggaaggatcagatcaaagagaaagctgggttggacttacacaagaataccctgatctgatcgcagctgtgactccaaggttttcctttcccatagttgctgtgaccccattggtcaccagagcaactgcatgtcttcaggctgggtattagggctggctgggtctgatgattctacccattttgtgccatctgaggagcatgcgagggttctttctccaaggcactttcggccttccttcttctccccttccgccatctccactggacataagccaatgcctgctctcttctcaccacattcacctggacaaatctgaactaattccttgagacttcaaattagcccttctgagcaagtgggcaggttctgaaacctgtgtgttttgtagcctaatgaattgatggaatgcacatgaacccatcttcacagcatgtgaaagaaccaacctgcctggcagaggtgcagaaatttccagaggactggcctagctataaacaccagcaacatctgcaacacaaaagcccttgaacttctaggcaaggactcatgctaacctagcagtactccagattgagaacgcagatggacaggtgtctcttgagcctgtgttccaagatgtctgtggaaaggattgcaactgtcatcctttggcacactcagtggaacctgtgtgagctacatgttctgctgcattatgggaactcatcaaagggccagattgacatcttgccagaaaaaccagtgttttgaggagcaaaagttttgtgtacttcagtaattgtcacatgtgtcttccacctccttgacatttatttgttaatcatatgatcatttttttttcactttcctttttttctttctcagaagtacttctggggctttgattgcattatttctcttttaatgtatcatttcagtgttggaaagaaaaatctggatctttatgtggggacctattttacatgtagatagttattcagtagatagtaaattatttctcttaagagatatttccttttatttctgtacaataatatgtatgaactcagttactaggggactgtattgtgacattatcaacctttattgctatttaaaaatgatagtttgtagaactgaagatttccattgatgtgaagcacaatttaatgaataagttaaaatattaaactgttgtgatgtcaagagaaaaaaaat

SEQ ID NO: 63137 - DNA, 565 bp, Homo sapiens
atgatcatatgattaacaaataaatgtcaaggaggtggaagacacatgtgacaattactgaagatttccattaaattgtgcttcacatcaatggaaatcttcagttctacaaactatcatttttaaatagcaataaaggttgataattgtcacatgtgtcttccacctccttgacatttatttgttaatcatatgatcatttttttttcactttcctttttttctttctcagaagtacttctggggctttgattgcattatttctcttttaatgtatcatttcagtgttggaaagaaaaatctggatctttatgtggggacctattttacatgtagatagttattcagtagatagtaaattatttctcttaagagatatttccttttatttctgtacaataatatgtatgaactcagttactaggggactgtattgtgacattatcaacctttattgctatttaaaaatgatagtttgtagaactgaagatttccattgatgtgaagcacaatttaatgaataagttaaaatattaaactgttgtgatgtcaagagaaaaaaaat

SEQ ID NO: 63138 - DNA, 2802 bp, Homo sapiens
  misc_feature (1405)..(1405): n is a, c, g, or t
  misc_feature (1565)..(1567): n is a, c, g, or t
  misc_feature (1917)..(1917): n is a, c, g, or t
  misc_feature (1946)..(1946): n is a, c, g, or t
  misc_feature (1950)..(1950): n is a, c, g, or t
  misc_feature (1999)..(1999): n is a, c, g, or t
taggtttcaattgtaaagagagagaagtggataaatcagtgctgctttctttaggacgaaagaagtatggagcagtgggatcactttcacaatcaacaggaggacactgatagctgctccgaatctgtgaaatttgatgctcgctcaatgacagctttgcttcctccgaatcctaaaaacagcccttcccttcaagagaaactgaagtccttcaaagctgcactgattgccctttacctcctcgtgtttgcagttctcatccctctcattggaatagtggcagctcaactcctgaagtgggaaacgaagaattgctcagttagttcaactaatgcaaatgatataactcaaagtctcacgggaaaaggaaatgacagcgaagaggaaatgagatttcaagaagtctttatggaacacatgagcaacatggagaagagaatccagcatattttagacatggaagccaacctcatggacacagagcatttccaaaatttcagcatgacaactgatcaaagatttaatgacattcttctgcagctaagtaccttgttttcctcagtccagggacatgggaatgcaatagatgaaatctccaagtccttaataagtttgaataccacattgcttgatttgcagctcaacatagaaaatctgaatggcaaaatccaagagaataccttcaaacaacaagaggaaatcagtaaattagaggagcgtgtttacaatgtatcagcagaaattatggctatgaaagaagaacaagtgcatttggaacaggaaataaaaggagaagtgaaagtactgaataacatcactaatgatctcagactgaaagattgggaacattctcagaccttgagaaatatcactttaattcaaggtcctcctggacccccgggtgaaaaaggagatcgaggtcccactggagaaagtggtccacgaggatttccaggtccaataggtcctccgggtcttaaaggtgatcggggagcaattggctttcctggaagtcgaggactcccaggatatgccggaaggccaggaaattctggaccaaaaggccagaaaggggaaaaggggagtggaaacacattaagaccagtacaactcactgatcatattagggcagggccctcttaagatcaggtgggttgggcgggacatcctctgctaccatctcattaaaaggcccttcacctctggacaagtcatctgcaacaactgacttccaagatccttttgtgactcctccaaatgactttggttcccgtgttgtacctgacttccacatggccttctctcctggtccctggtgctgtttgggcctctgctcccatgctcatacctcttcttactccaattactccaccatcacctctctcccctatcacccccagcctgnacacctctcatgcacggactggagggctgctccaaccagtcctcagttctctgccacccattgacctagagtcttgaacccaatttaatttattgggttctaggagaactgctgtgttctcaccctaacttggaagagtgatgtttcagtcaagcaaagnnnttcctaccatacaatataacacttgtgtgaggctctgtcctaaatatctcaattaccaatatgtggtttggtagtatttctcgccatgctttgctcatgcgcaatgagactaccactagggtgtaaattttaagtatcccatctaaaactcatacaatgataggaaaaatccatttgtttttcatttgatttttactgaggaatcagctcaatcttcaatgaatactggtctctttccaaagcatttttgatcaaagtaaagactgagtcaagggctttttttttttctttttcttgttttaagagacagagccttgctctattgcacaggctggactacacgcattcanctagagtctagaacacaatttaatttatngggntctaggagaactgtcatgagtattgataatatgagagttctttatattnaaacattattctcaaccagagatagggatgtcatagaagaaaatccattcattcaatcattaattcattaattcacatgtccattatgtacctccatgagctggacataacagctaataagagataattgtctctggttttacagagctaattgtccctaagagatgtagacaaatgaacaagcaattacaatacatctaagctatactgggggaggaacagggctggataggtatgcagaggagataaaaaaattttaattccttagaatattttttaaaaattgattcttattttaccttctcatcttcttattttccaaattacagcatatatatatatttttttaagttttgaagtgtagtcgagcttgggcaatttatccaacccatttaaaccaaaaataaaacttttcatgtattacctggtcatttcaaacaaaaatattttgatcatgaaaaagaataccaatattcttttgttctaaaaatctcttatgggattacatgttatatttttggtttctctctactgatcaacagactacattttcacaactcttctttcctttacgttttaacacacagacccaagattcatactattaagattctagtagaactctagatggtatgcctctgtgtatctcagcatttttattcccactcttgtataatgaacatgttaacacctacctcacagggttgttgtgaggatcaagtaagatattgtgtgtgtgaagatgctctgtgaaatcataaagtcctttaaagatgtaaggtatgcttcgcagtgatctctct

SEQ ID NO: 63139 - DNA, 3639 bp, Homo sapiens
  misc_feature (15)..(15): n is a, c, g, or t
  misc_feature (66)..(66): n is a, c, g, or t
  misc_feature (149)..(149): n is a, c, g, or t
  misc_feature (2301)..(2301): n is a, c, g, or t
gcacgagctcagggntatagaacagccgccttcagctattctcccccagggctctgcagaaccttnccacctttcagcaggctggagtgcagtggcatgatcgtgactcactgcagccttccactcctgggctcaagcaatcctactgnctcaggctcccagaagtatggagcagtgggatcactttcacaatcaacaggaggacactgatagctgctccgaatctgtgaaatttgatgctcgctcaatgacagctttgcttcctccgaatcctaaaaacagcccttcccttcaagagaaactgaagtccttcaaagctgcactgattgccctttacctcctcgtgtttgcagttctcatccctctcattggaatagtggcagctcaactcctgaagtgggaaacgaagaattgctcagttagttcaactaatgcaaatgatataactcaaagtctcacgggaaaaggaaatgacagcgaagaggaaatgagatttcaagaagtctttatggaacacatgagcaacatggagaagagaatccagcatattttagacatggaagccaacctcatggacacagagcatttccaaaatttcagcatgacaactgatcaaagatttaatgacattcttctgcagctaagtaccttgttttcctcagtccagggacatgggaatgcaatagatgaaatctccaagtccttaataagtttgaataccacattgcttgatttgcagctcaacatagaaaatctgaatggcaaaatccaagagaataccttcaaacaacaagaggaaatcagtaaattagaggagcgtgtttacaatgtatcagcagaaattatggctatgaaagaagaacaagtgcatttggaacaggaaataaaaggagaagtgaaagtactgaataacatcactaatgatctcagactgaaagattgggaacattctcagaccttgagaaatatcactttaattcaaggtcctcctggacccccgggtgaaaaaggagatcgaggtcccactggagaaagtggtccacgaggatttccaggtccaataggtcctccgggtcttaaaggtgatcggggagcaattggctttcctggaagtcgaggactcccaggatatgccggaaggccaggaaattctggaccaaaaggccagaaaggggaaaaggggagtggaaacacattaagtactggtccaatatggctgaatgaagtgttttgttttgggagagaatcatctattgaagaatgtaaaattcggcaatgggggacaagagcctgttcacattctgaagatgctggagtcacttgcactttataatgcatcatattttcattcacaactatgaaatcgctgctcaaaaatgattttattaccttgttcctgtaaaatccatttaatcaatatttaagagattaagaatattgcccaaataatattttagattacaggattaatatattgaacaccttcatgcttactattttatgtctatatttaaatcattttaacttctataggtttttaaatggaattttctaatataatgacttatatgctgaattgaacattttgaagtttatagcttccagattacaaaggccaagggtaatagaaatgcataccagtaattggctccaattcataatatgttcaccaggagattacaattttttgctcttcttgtctttgtaatctatttagttgattttaattactttctgaataacggaagggatcagaagatatcttttgtgcctagattgcaaaatctccaatccacacatattgttttaaaataagaatgttatccaactattaagatatctcaatgtgcaataacttgtgtattagatatcaatgttaatgatatgtcttggccactatggaccagggagcttatttttcttgtcatgtactgacaactgtttaattgaatcatgaagtaaattgaaagcaggacatatgagaaaactgaccatcagtatatttgtccagataattggtggatcaaaaatgccacttaacaggaagtttagtttgttatgcactttaaatggaataattagcttgttacaattctaggacatggtgtttaaaatttaaatctgattaatccattttaacaaacaatgcaaacatcttcagtgcagaaggaagagtggtttcaactgtttggagtcttttatgaagtcagtcaacatttacaaccaaagggcgggggggggggggggtgcgtctttagtcctaaagggacaataactctgagcatgccccaaaaaagtagnttagcaaccttttgttggtagtcaacccatccccagggccatagtgtagagtgtgaaaagctaccctgaaacccagtaattctaccctgaaagtgactgcctgcagaaagaccagcagttgatattaaagcgcaaatgaattcaacctcagccctgaaaataacagaattctgaagtttcctatgactaattcacaaaaaaagtaattgtaaactagtactattatggaattactctactgttctttctttaatagtggcaaatgaaagcataagcttaagcattttttcatattctgaagtctcaccacacataataaccaagtggtagactcacagccgtccaacttaaaaaggcaaaaccttaccttggaattggaattactgtaaacagcctactgaaaatgcatttttatcatgtaacattcttctacttgtttaacattgctgattttctctggcagcataattttgtggttaagagaatgaattctgaatgtacactttctgtctcaaaccctggctgtaatttcagctagttaataattctttgtgttcagttccactatctaggtattttcttcaaaaggtaaatacaatggtttctgaaagaatcatttgcattatcagcctgtttgggatgtctgagatcagtgcctctgggttgttaatactgtattgctgtatggtatatgtatgctgatttactacttatgcgtaagtggtatgcatgggatgtctgaaatcagtgcctatgggttgtcaatagtattaactattagtgttaactgttagtattaactattagtattattaacactaataatagtactattactattactatttttattttaaaataaaatttacctttaaaataataatagtactattgctagtactagtactattgctattactagtactattactagtactagtactatgacactgttaatagtactattaacaacccataggcacttgggatgtctgagatcagtgcctatgggttgttaatactatattgctgtatggtatatgcatgctgatttaccacttatgcatagatatatctttaataagtaatctaaaaatcctttttgtatttgagagaatctactaagttcagtccagtcaagaaaagaacctaatagcaccaatacaaattgaggacttaatttactttggaatgttgaattgcatttgttccattaaaaaaaacagaaatttgcgatttggtttttttgaaaaaatagctcagctgaccagaatgaatgtattctacttgttgagccatccagcatcacgttaaatgcaaaatgtatatataaataaa

SEQ ID NO: 63140 - DNA, 3002 bp, Homo sapiens
  misc_feature (2390)..(2390): n is a, c, g, or t
taggtttcaattgtaaagagagagaagtggataaatcagtgctgctttctttaggacgaaagaagtatggagcagtgggatcactttcacaatcaacaggaggacactgatagctgctccgaatctgtgaaatttgatgctcgctcaatgacagctttgcttcctccgaatcctaaaaacagcccttcccttcaagagaaactgaagtccttcaaagctgcactgattgccctttacctcctcgtgtttgcagttctcatccctctcattggaatagtggcagctcaactcctgaagtgggaaacgaagaattgctcagttagttcaactaatgcaaatgatataactcaaagtctcacgggaaaaggaaatgacagcgaagaggaaatgagatttcaagaagtctttatggaacacatgagcaacatggagaagagaatccagcatattttagacatggaagccaacctcatggacacagagcatttccaaaatttcagcatgacaactgatcaaagatttaatgacattcttctgcagctaagtaccttgttttcctcagtccagggacatgggaatgcaatagatgaaatctccaagtccttaataagtttgaataccacattgcttgatttgcagctcaacatagaaaatctgaatggcaaaatccaagagaataccttcaaacaacaagaggaaatcagtaaattagaggagcgtgtttacaatgtatcagcagaaattatggctatgaaagaagaacaagtgcatttggaacaggaaataaaaggagaagtgaaagtactgaataacatcactaatgatctcagactgaaagattgggaacattctcagaccttgagaaatatcactttaattcaaggtcctcctggacccccgggtgaaaaaggagatcgaggtcccactggagaaagtggtccacgaggatttccaggtccaataggtcctccgggtcttaaaggtgatcggggagcaattggctttcctggaagtcgaggactcccaggatatgccggaaggccaggaaattctggaccaaaaggccagaaaggggaaaaggggagtggaaacacattaactccatttacgaaagttcgactggtcggtgggagcggccctcacgaggggagagtggagatactccacagcggccagtggggtacaatttgtgacgatcgctgggaagtgcgcgttggacaggtcgtctgtaggagcttgggatacccaggtgttcaagccgtgcacaaggcagctcactttggacaaggtactggtccaatatggctgaatgaagtgttttgttttgggagagaatcatctattgaagaatgtaaaattcggcaatgggggacaagagcctgttcacattctgaagatgctggagtcacttgcactttataatgcatcatattttcattcacaactatgaaatcgctgctcaaaaatgattttattaccttgttcctgtaaaatccatttaatcaatatttaagagattaagaatattgcccaaataatattttagattacaggattaatatattgaacaccttcatgcttactattttatgtctatatttaaatcattttaacttctataggtttttaaatggaattttctaatataatgacttatatgctgaattgaacattttgaagtttatagcttccagattacaaaggccaagggtaatagaaatgcataccagtaattggctccaattcataatatgttcaccaggagattacaattttttgctcttcttgtctttgtaatctatttagttgattttaattactttctgaataacggaagggatcagaagatatcttttgtgcctagattgcaaaatctccaatccacacatattgttttaaaataagaatgttatccaactattaagatatctcaatgtgcaataacttgtgtattagatatcaatgttaatgatatgtcttggccactatggaccagggagcttatttttcttgtcatgtactgacaactgtttaattgaatcatgaagtaaattgaaagcaggacatatgagaaaactgaccatcagtatatttgtccagataattggtggatcaaaaatgccacttaacaggaagtttagtttgttatgcactttaaatggaataattagcttgttacaattctaggacatggtgtttaaaatttaaatctgattaatccattttaacaaacaatgcaaacatcttcagtgcagaaggaagagtggtttcaactgtttggagtcttttatgaagtcagtcaacatttacaaccaaagggcgggggggggggggggtgcgtctttagtcctaaagggacaataactctgagcatgccccaaaaaagtagnttagcaaccttttgttggtagtcaacccatccccagggccatagtgtagagtgtgaaaagctaccctgaaacccagtaattctaccctgaaagtgactgcctgcagaaagaccagcagttgatattaaagcgcaaatgaattcaacctcagccctgaaaataacagaattctgaagtttcctatgactaattcacaaaaaaagtaattgtaaactagtactattatggaattactctactgttctttctttaatagtggcaaatgaaagcataagcttaagcattttttcatattctgaagtctcaccacacataataaccaagtggtagactcacagccgtccaacttaaaaaggcaaaaccttaccttggaattggaattactgtaaacagcctactgaaaatgcatttttatcatgtaacattcttctacttgtttaacattgctgattttctctggcagcataattttgtggttaagagaatgaattctgaatgtacactttctgtctcaaaccctggctgtaatttcagctagttaataattctttgtgttcagttccactatctaggtattttcttcaaaaggtaaatacaatggtttctgaaaga

SEQ ID NO: 63141 - DNA, 2699 bp, Homo sapiens
  misc_feature (1405)..(1405): n is a, c, g, or t
  misc_feature (1565)..(1567): n is a, c, g, or t
  misc_feature (1917)..(1917): n is a, c, g, or t
  misc_feature (1946)..(1946): n is a, c, g, or t
  misc_feature (1950)..(1950): n is a, c, g, or t
  misc_feature (1999)..(1999): n is a, c, g, or t
taggtttcaattgtaaagagagagaagtggataaatcagtgctgctttctttaggacgaaagaagtatggagcagtgggatcactttcacaatcaacaggaggacactgatagctgctccgaatctgtgaaatttgatgctcgctcaatgacagctttgcttcctccgaatcctaaaaacagcccttcccttcaagagaaactgaagtccttcaaagctgcactgattgccctttacctcctcgtgtttgcagttctcatccctctcattggaatagtggcagctcaactcctgaagtgggaaacgaagaattgctcagttagttcaactaatgcaaatgatataactcaaagtctcacgggaaaaggaaatgacagcgaagaggaaatgagatttcaagaagtctttatggaacacatgagcaacatggagaagagaatccagcatattttagacatggaagccaacctcatggacacagagcatttccaaaatttcagcatgacaactgatcaaagatttaatgacattcttctgcagctaagtaccttgttttcctcagtccagggacatgggaatgcaatagatgaaatctccaagtccttaataagtttgaataccacattgcttgatttgcagctcaacatagaaaatctgaatggcaaaatccaagagaataccttcaaacaacaagaggaaatcagtaaattagaggagcgtgtttacaatgtatcagcagaaattatggctatgaaagaagaacaagtgcatttggaacaggaaataaaaggagaagtgaaagtactgaataacatcactaatgatctcagactgaaagattgggaacattctcagaccttgagaaatatcactttaattcaaggtcctcctggacccccgggtgaaaaaggagatcgaggtcccactggagaaagtggtccacgaggatttccaggtccaataggtcctccgggtcttaaaggtgatcggggagcaattggctttcctggaagtcgaggactcccaggatatgccggaaggccaggaaattctggaccaaaaggccagaaaggggaaaaggggagtggaaacacattaagaccagtacaactcactgatcatattagggcagggccctcttaagatcaggtgggttgggcgggacatcctctgctaccatctcattaaaaggcccttcacctctggacaagtcatctgcaacaactgacttccaagatccttttgtgactcctccaaatgactttggttcccgtgttgtacctgacttccacatggccttctctcctggtccctggtgctgtttgggcctctgctcccatgctcatacctcttcttactccaattactccaccatcacctctctcccctatcacccccagcctgnacacctctcatgcacggactggagggctgctccaaccagtcctcagttctctgccacccattgacctagagtcttgaacccaatttaatttattgggttctaggagaactgctgtgttctcaccctaacttggaagagtgatgtttcagtcaagcaaagnnnttcctaccatacaatataacacttgtgtgaggctctgtcctaaatatctcaattaccaatatgtggtttggtagtatttctcgccatgctttgctcatgcgcaatgagactaccactagggtgtaaattttaagtatcccatctaaaactcatacaatgataggaaaaatccatttgtttttcatttgatttttactgaggaatcagctcaatcttcaatgaatactggtctctttccaaagcatttttgatcaaagtaaagactgagtcaagggctttttttttttctttttcttgttttaagagacagagccttgctctattgcacaggctggactacacgcattcanctagagtctagaacacaatttaatttatngggntctaggagaactgtcatgagtattgataatatgagagttctttatattnaaacattattctcaaccagagatagggatgtcatagaagaaaatccattcattcaatcattaattcattaattcacatgtccattatgtacctccatgagctggacataacagctaataagagataattgtctctggttttacagagctaattgtccctaagagatgtagacaaatgaacaagcaattacaatacatctaagctatactgggggaggaacagggctggataggtatgcagaggagataaaaaaattttaattccttagaatattttttaaaaattgattcttattttaccttctcatcttcttattttccaaattacagcatatatatatatttttttaagttttgaagtgtagtcgagcttgggcaatttatccaacccatttaaaccaaaaataaaacttttcatgtattacctggtcatttcaaacaaaaatattttgatcatgaaaaagaataccaatattcttttgttctaaaaatctcttatgggattacatgttatatttttggtttctctctactgatcaacagactacattttcacaactcttctttcctttacgttttaacacacagacccaagattcatactattaagattctagtagaactctagatggtatgcctctgtgtatctcagctctgttagacaataaaatcttgaaattgccaggtaacgggagatcctc

SEQ ID NO: 63142 - DNA, 1865 bp, Homo sapiens
  misc_feature (468)..(468): n is a, c, g, or t
  misc_feature (628)..(630): n is a, c, g, or t
  misc_feature (980)..(980): n is a, c, g, or t
  misc_feature (1009)..(1009): n is a, c, g, or t
  misc_feature (1013)..(1013): n is a, c, g, or t
  misc_feature (1062)..(1062): n is a, c, g, or t
gattttttccttagtgactggaggccagtttcaatccactgaagcacagattccaaattttcaatctggttttcttgagtagtgactgagtgccaaaaatgaagcaatgacacaacatcaccatcaagacactccccagcgatgggagtggaaacacattaagaccagtacaactcactgatcatattagggcagggccctcttaagatcaggtgggttgggcgggacatcctctgctaccatctcattaaaaggcccttcacctctggacaagtcatctgcaacaactgacttccaagatccttttgtgactcctccaaatgactttggttcccgtgttgtacctgacttccacatggccttctctcctggtccctggtgctgtttgggcctctgctcccatgctcatacctcttcttactccaattactccaccatcacctctctcccctatcacccccagcctgnacacctctcatgcacggactggagggctgctccaaccagtcctcagttctctgccacccattgacctagagtcttgaacccaatttaatttattgggttctaggagaactgctgtgttctcaccctaacttggaagagtgatgtttcagtcaagcaaagnnnttcctaccatacaatataacacttgtgtgaggctctgtcctaaatatctcaattaccaatatgtggtttggtagtatttctcgccatgctttgctcatgcgcaatgagactaccactagggtgtaaattttaagtatcccatctaaaactcatacaatgataggaaaaatccatttgtttttcatttgatttttactgaggaatcagctcaatcttcaatgaatactggtctctttccaaagcatttttgatcaaagtaaagactgagtcaagggctttttttttttctttttcttgttttaagagacagagccttgctctattgcacaggctggactacacgcattcanctagagtctagaacacaatttaatttatngggntctaggagaactgtcatgagtattgataatatgagagttctttatattnaaacattattctcaaccagagatagggatgtcatagaagaaaatccattcattcaatcattaattcattaattcacatgtccattatgtacctccatgagctggacataacagctaataagagataattgtctctggttttacagagctaattgtccctaagagatgtagacaaatgaacaagcaattacaatacatctaagctatactgggggaggaacagggctggataggtatgcagaggagataaaaaaattttaattccttagaatattttttaaaaattgattcttattttaccttctcatcttcttattttccaaattacagcatatatatatatttttttaagttttgaagtgtagtcgagcttgggcaatttatccaacccatttaaaccaaaaataaaacttttcatgtattacctggtcatttcaaacaaaaatattttgatcatgaaaaagaataccaatattcttttgttctaaaaatctcttatgggattacatgttatatttttggtttctctctactgatcaacagactacattttcacaactcttctttcctttacgttttaacacacagacccaagattcatactattaagattctagtagaactctagatggtatgcctctgtgtatctcagcatttttattcccactcttgtataatgaacatgttaacacctacctcacagggttgttgtgaggatcaagtaagatattgtgtgtgtgaagatgctctgtgaaatcataaagtcctttaaagatgtaaggtatgcttcgcagtgatctctct

SEQ ID NO: 63143 - DNA, 408 bp, Homo sapiens
taggtttcaattgtaaagagagagaagtggataaatcagtgctgctttctttaggacgaaagaagtatggagcagtgggatcactttcacaatcaacaggaggacactgatagctgctccgaatctgtgaaatttgatgctcgctcaatgacagctttgcttcctccgaatcctaaaaacagcccttcccttcaagagaaactgaagtccttcaaagctgcactgattgccctttacctcctcgtgtttgcagttctcatccctctcattggaatagtggcagctcaactcctgaagtgggaaacgaagaattgctcagttattcgagaccagtctggccaacatagtgaaaccccatctctacaaaattaaacacttgaacccaggaggtggaggttgcagggagcc

SEQ ID NO: 63144 - DNA, 3728 bp, Homo sapiens
  misc_feature (2390)..(2390): n is a, c, g, or t
taggtttcaattgtaaagagagagaagtggataaatcagtgctgctttctttaggacgaaagaagtatggagcagtgggatcactttcacaatcaacaggaggacactgatagctgctccgaatctgtgaaatttgatgctcgctcaatgacagctttgcttcctccgaatcctaaaaacagcccttcccttcaagagaaactgaagtccttcaaagctgcactgattgccctttacctcctcgtgtttgcagttctcatccctctcattggaatagtggcagctcaactcctgaagtgggaaacgaagaattgctcagttagttcaactaatgcaaatgatataactcaaagtctcacgggaaaaggaaatgacagcgaagaggaaatgagatttcaagaagtctttatggaacacatgagcaacatggagaagagaatccagcatattttagacatggaagccaacctcatggacacagagcatttccaaaatttcagcatgacaactgatcaaagatttaatgacattcttctgcagctaagtaccttgttttcctcagtccagggacatgggaatgcaatagatgaaatctccaagtccttaataagtttgaataccacattgcttgatttgcagctcaacatagaaaatctgaatggcaaaatccaagagaataccttcaaacaacaagaggaaatcagtaaattagaggagcgtgtttacaatgtatcagcagaaattatggctatgaaagaagaacaagtgcatttggaacaggaaataaaaggagaagtgaaagtactgaataacatcactaatgatctcagactgaaagattgggaacattctcagaccttgagaaatatcactttaattcaaggtcctcctggacccccgggtgaaaaaggagatcgaggtcccactggagaaagtggtccacgaggatttccaggtccaataggtcctccgggtcttaaaggtgatcggggagcaattggctttcctggaagtcgaggactcccaggatatgccggaaggccaggaaattctggaccaaaaggccagaaaggggaaaaggggagtggaaacacattaactccatttacgaaagttcgactggtcggtgggagcggccctcacgaggggagagtggagatactccacagcggccagtggggtacaatttgtgacgatcgctgggaagtgcgcgttggacaggtcgtctgtaggagcttgggatacccaggtgttcaagccgtgcacaaggcagctcactttggacaaggtactggtccaatatggctgaatgaagtgttttgttttgggagagaatcatctattgaagaatgtaaaattcggcaatgggggacaagagcctgttcacattctgaagatgctggagtcacttgcactttataatgcatcatattttcattcacaactatgaaatcgctgctcaaaaatgattttattaccttgttcctgtaaaatccatttaatcaatatttaagagattaagaatattgcccaaataatattttagattacaggattaatatattgaacaccttcatgcttactattttatgtctatatttaaatcattttaacttctataggtttttaaatggaattttctaatataatgacttatatgctgaattgaacattttgaagtttatagcttccagattacaaaggccaagggtaatagaaatgcataccagtaattggctccaattcataatatgttcaccaggagattacaattttttgctcttcttgtctttgtaatctatttagttgattttaattactttctgaataacggaagggatcagaagatatcttttgtgcctagattgcaaaatctccaatccacacatattgttttaaaataagaatgttatccaactattaagatatctcaatgtgcaataacttgtgtattagatatcaatgttaatgatatgtcttggccactatggaccagggagcttatttttcttgtcatgtactgacaactgtttaattgaatcatgaagtaaattgaaagcaggacatatgagaaaactgaccatcagtatatttgtccagataattggtggatcaaaaatgccacttaacaggaagtttagtttgttatgcactttaaatggaataattagcttgttacaattctaggacatggtgtttaaaatttaaatctgattaatccattttaacaaacaatgcaaacatcttcagtgcagaaggaagagtggtttcaactgtttggagtcttttatgaagtcagtcaacatttacaaccaaagggcgggggggggggggggtgcgtctttagtcctaaagggacaataactctgagcatgccccaaaaaagtagnttagcaaccttttgttggtagtcaacccatccccagggccatagtgtagagtgtgaaaagctaccctgaaacccagtaattctaccctgaaagtgactgcctgcagaaagaccagcagttgatattaaagcgcaaatgaattcaacctcagccctgaaaataacagaattctgaagtttcctatgactaattcacaaaaaaagtaattgtaaactagtactattatggaattactctactgttctttctttaatagtggcaaatgaaagcataagcttaagcattttttcatattctgaagtctcaccacacataataaccaagtggtagactcacagccgtccaacttaaaaaggcaaaaccttaccttggaattggaattactgtaaacagcctactgaaaatgcatttttatcatgtaacattcttctacttgtttaacattgctgattttctctggcagcataattttgtggttaagagaatgaattctgaatgtacactttctgtctcaaaccctggctgtaatttcagctagttaataattctttgtgttcagttccactatctaggtattttcttcaaaaggtaaatacaatggtttctgaaagaatcatttgcattatcagcctgtttgggatgtctgagatcagtgcctctgggttgttaatactgtattgctgtatggtatatgtatgctgatttactacttatgcgtaagtggtatgcatgggatgtctgaaatcagtgcctatgggttgtcaatagtattaactattagtgttaactgttagtattaactattagtattattaacactaataatagtactattactattactatttttattttaaaataaaatttacctttaaaataataatagtactattgctagtactagtactattgctattactagtactattactagtactagtactatgacactgttaatagtactattaacaacccataggcacttgggatgtctgagatcagtgcctatgggttgttaatactatattgctgtatggtatatgcatgctgatttaccacttatgcatagatatatctttaataagtaatctaaaaatcctttttgtatttgagagaatctactaagttcagtccagtcaagaaaagaacctaatagcaccaatacaaattgaggacttaatttactttggaatgttgaattgcatttgttccattaaaaaaaacagaaatttgcgatttggtttttttgaaaaaatagctcagctgaccagaatgaatgtattctacttgttgagccatccagcatcacgttaaatgcaaaatgtatatataaataaa

SEQ ID NO: 63145 - DNA, 3672 bp, Homo sapiens
  misc_feature (2390)..(2390): n is a, c, g, or t
taggtttcaattgtaaagagagagaagtggataaatcagtgctgctttctttaggacgaaagaagtatggagcagtgggatcactttcacaatcaacaggaggacactgatagctgctccgaatctgtgaaatttgatgctcgctcaatgacagctttgcttcctccgaatcctaaaaacagcccttcccttcaagagaaactgaagtccttcaaagctgcactgattgccctttacctcctcgtgtttgcagttctcatccctctcattggaatagtggcagctcaactcctgaagtgggaaacgaagaattgctcagttagttcaactaatgcaaatgatataactcaaagtctcacgggaaaaggaaatgacagcgaagaggaaatgagatttcaagaagtctttatggaacacatgagcaacatggagaagagaatccagcatattttagacatggaagccaacctcatggacacagagcatttccaaaatttcagcatgacaactgatcaaagatttaatgacattcttctgcagctaagtaccttgttttcctcagtccagggacatgggaatgcaatagatgaaatctccaagtccttaataagtttgaataccacattgcttgatttgcagctcaacatagaaaatctgaatggcaaaatccaagagaataccttcaaacaacaagaggaaatcagtaaattagaggagcgtgtttacaatgtatcagcagaaattatggctatgaaagaagaacaagtgcatttggaacaggaaataaaaggagaagtgaaagtactgaataacatcactaatgatctcagactgaaagattgggaacattctcagaccttgagaaatatcactttaattcaaggtcctcctggacccccgggtgaaaaaggagatcgaggtcccactggagaaagtggtccacgaggatttccaggtccaataggtcctccgggtcttaaaggtgatcggggagcaattggctttcctggaagtcgaggactcccaggatatgccggaaggccaggaaattctggaccaaaaggccagaaaggggaaaaggggagtggaaacacattaactccatttacgaaagttcgactggtcggtgggagcggccctcacgaggggagagtggagatactccacagcggccagtggggtacaatttgtgacgatcgctgggaagtgcgcgttggacaggtcgtctgtaggagcttgggatacccaggtgttcaagccgtgcacaaggcagctcactttggacaaggtactggtccaatatggctgaatgaagtgttttgttttgggagagaatcatctattgaagaatgtaaaattcggcaatgggggacaagagcctgttcacattctgaagatgctggagtcacttgcactttataatgcatcatattttcattcacaactatgaaatcgctgctcaaaaatgattttattaccttgttcctgtaaaatccatttaatcaatatttaagagattaagaatattgcccaaataatattttagattacaggattaatatattgaacaccttcatgcttactattttatgtctatatttaaatcattttaacttctataggtttttaaatggaattttctaatataatgacttatatgctgaattgaacattttgaagtttatagcttccagattacaaaggccaagggtaatagaaatgcataccagtaattggctccaattcataatatgttcaccaggagattacaattttttgctcttcttgtctttgtaatctatttagttgattttaattactttctgaataacggaagggatcagaagatatcttttgtgcctagattgcaaaatctccaatccacacatattgttttaaaataagaatgttatccaactattaagatatctcaatgtgcaataacttgtgtattagatatcaatgttaatgatatgtcttggccactatggaccagggagcttatttttcttgtcatgtactgacaactgtttaattgaatcatgaagtaaattgaaagcaggacatatgagaaaactgaccatcagtatatttgtccagataattggtggatcaaaaatgccacttaacaggaagtttagtttgttatgcactttaaatggaataattagcttgttacaattctaggacatggtgtttaaaatttaaatctgattaatccattttaacaaacaatgcaaacatcttcagtgcagaaggaagagtggtttcaactgtttggagtcttttatgaagtcagtcaacatttacaaccaaagggcgggggggggggggggtgcgtctttagtcctaaagggacaataactctgagcatgccccaaaaaagtagnttagcaaccttttgttggtagtcaacccatccccagggccatagtgtagagtgtgaaaagctaccctgaaacccagtaattctaccctgaaagtgactgcctgcagaaagaccagcagttgatattaaagcgcaaatgaattcaacctcagccctgaaaataacagaattctgaagtttcctatgactaattcacaaaaaaagtaattgtaaactagtactattatggaattactctactgttctttctttaatagtggcaaatgaaagcataagcttaagcattttttcatattctgaagtctcaccacacataataaccaagtggtagactcacagccgtccaacttaaaaaggcaaaaccttaccttggaattggaattactgtaaacagcctactgaaaatgcatttttatcatgtaacattcttctacttgtttaacattgctgattttctctggcagcataattttgtggttaagagaatgaattctgaatgtacactttctgtctcaaaccctggctgtaatttcagctagttaataattctttgtgttcagttccactatctaggtattttcttcaaaaggtaaatacaatggtttctgaaagaatcatttgcattatcagcctgtttgggatgtctgagatcagtgcctctgggttgttaatactgtattgctgtatggtatatgtatgctgatttactacttatgcgtaagtggtatgcatgggatgtctgaaatcagtgcctatgggttgtcaatagtattaactattagtgttaactgttagtattaactattagtattattaacactaataatagtactattactattactatttttattttaaaataaaatttacctttaaaataataatagtactattgctagtactagtactattgctattactagtactattactagtactagtactatgacactgttaatagtactattatattgctgtatggtatatgcatgctgatttaccacttatgcatagatatatctttaataagtaatctaaaaatcctttttgtatttgagagaatctactaagttcagtccagtcaagaaaagaacctaatagcaccaatacaaattgaggacttaatttactttggaatgttgaattgcatttgttccattaaaaaaaacagaaatttgcgatttggtttttttgaaaaaatagctcagctgaccagaatgaatgtattctacttgttgagccatccagcatcacgttaaatgcaaaatgtatatataaataaa

SEQ ID NO: 63146 - DNA, 3489 bp, Homo sapiens
  misc_feature (2390)..(2390): n is a, c, g, or t
taggtttcaattgtaaagagagagaagtggataaatcagtgctgctttctttaggacgaaagaagtatggagcagtgggatcactttcacaatcaacaggaggacactgatagctgctccgaatctgtgaaatttgatgctcgctcaatgacagctttgcttcctccgaatcctaaaaacagcccttcccttcaagagaaactgaagtccttcaaagctgcactgattgccctttacctcctcgtgtttgcagttctcatccctctcattggaatagtggcagctcaactcctgaagtgggaaacgaagaattgctcagttagttcaactaatgcaaatgatataactcaaagtctcacgggaaaaggaaatgacagcgaagaggaaatgagatttcaagaagtctttatggaacacatgagcaacatggagaagagaatccagcatattttagacatggaagccaacctcatggacacagagcatttccaaaatttcagcatgacaactgatcaaagatttaatgacattcttctgcagctaagtaccttgttttcctcagtccagggacatgggaatgcaatagatgaaatctccaagtccttaataagtttgaataccacattgcttgatttgcagctcaacatagaaaatctgaatggcaaaatccaagagaataccttcaaacaacaagaggaaatcagtaaattagaggagcgtgtttacaatgtatcagcagaaattatggctatgaaagaagaacaagtgcatttggaacaggaaataaaaggagaagtgaaagtactgaataacatcactaatgatctcagactgaaagattgggaacattctcagaccttgagaaatatcactttaattcaaggtcctcctggacccccgggtgaaaaaggagatcgaggtcccactggagaaagtggtccacgaggatttccaggtccaataggtcctccgggtcttaaaggtgatcggggagcaattggctttcctggaagtcgaggactcccaggatatgccggaaggccaggaaattctggaccaaaaggccagaaaggggaaaaggggagtggaaacacattaactccatttacgaaagttcgactggtcggtgggagcggccctcacgaggggagagtggagatactccacagcggccagtggggtacaatttgtgacgatcgctgggaagtgcgcgttggacaggtcgtctgtaggagcttgggatacccaggtgttcaagccgtgcacaaggcagctcactttggacaaggtactggtccaatatggctgaatgaagtgttttgttttgggagagaatcatctattgaagaatgtaaaattcggcaatgggggacaagagcctgttcacattctgaagatgctggagtcacttgcactttataatgcatcatattttcattcacaactatgaaatcgctgctcaaaaatgattttattaccttgttcctgtaaaatccatttaatcaatatttaagagattaagaatattgcccaaataatattttagattacaggattaatatattgaacaccttcatgcttactattttatgtctatatttaaatcattttaacttctataggtttttaaatggaattttctaatataatgacttatatgctgaattgaacattttgaagtttatagcttccagattacaaaggccaagggtaatagaaatgcataccagtaattggctccaattcataatatgttcaccaggagattacaattttttgctcttcttgtctttgtaatctatttagttgattttaattactttctgaataacggaagggatcagaagatatcttttgtgcctagattgcaaaatctccaatccacacatattgttttaaaataagaatgttatccaactattaagatatctcaatgtgcaataacttgtgtattagatatcaatgttaatgatatgtcttggccactatggaccagggagcttatttttcttgtcatgtactgacaactgtttaattgaatcatgaagtaaattgaaagcaggacatatgagaaaactgaccatcagtatatttgtccagataattggtggatcaaaaatgccacttaacaggaagtttagtttgttatgcactttaaatggaataattagcttgttacaattctaggacatggtgtttaaaatttaaatctgattaatccattttaacaaacaatgcaaacatcttcagtgcagaaggaagagtggtttcaactgtttggagtcttttatgaagtcagtcaacatttacaaccaaagggcgggggggggggggggtgcgtctttagtcctaaagggacaataactctgagcatgccccaaaaaagtagnttagcaaccttttgttggtagtcaacccatccccagggccatagtgtagagtgtgaaaagctaccctgaaacccagtaattctaccctgaaagtgactgcctgcagaaagaccagcagttgatattaaagcgcaaatgaattcaacctcagccctgaaaataacagaattctgaagtttcctatgactaattcacaaaaaaagtaattgtaaactagtactattatggaattactctactgttctttctttaatagtggcaaatgaaagcataagcttaagcattttttcatattctgaagtctcaccacacataataaccaagtggtagactcacagccgtccaacttaaaaaggcaaaaccttaccttggaattggaattactgtaaacagcctactgaaaatgcatttttatcatgtaacattcttctacttgtttaacattgctgattttctctggcagcataattttgtggttaagagaatgaattctgaatgtacactttctgtctcaaaccctggctgtaatttcagctagttaataattctttgtgttcagttccactatctaggtattttcttcaaaaggtaaatacaatggtttctgaaagaatcatttgcattatcagcctgtttgggatgtctgagatcagtgcctctgggttgttaatactgtattgctgtatggtatatgtatgctgatttactacttatgcgtaagtggtattaacaacccataggcacttgggatgtctgagatcagtgcctatgggttgttaatactatattgctgtatggtatatgcatgctgatttaccacttatgcatagatatatctttaataagtaatctaaaaatcctttttgtatttgagagaatctactaagttcagtccagtcaagaaaagaacctaatagcaccaatacaaattgaggacttaatttactttggaatgttgaattgcatttgttccattaaaaaaaacagaaatttgcgatttggtttttttgaaaaaatagctcagctgaccagaatgaatgtattctacttgttgagccatccagcatcacgttaaatgcaaaatgtatatataaataaa

SEQ ID NO: 63147 - DNA, 555 bp, Homo sapiens
actatatacccaatagaactgaacacacatgttcacaccaaaatttgcatataaatgtccacagcagcattatccacaaggtagaaatcacccacatgtccatcaatggataaacaaaatgtggtatatccatttcatggaatattattcagccatatccaaaggtagaaaccacgcaaatgtccatcaatggatacacaaaatgtgatatatccatacagtggaatattattcagcaataaaaagtaacgaagcactgacatatgctacaacatggataaccttgaaaacattatgctcagtgaaagaagtcagtcgtaaaaagacacaaattgtatgattccatctttatgaaatgtccagaactgggaaatctatggagacaaagactattggttgcctagagctggggatcatgggaatggggaaagtgagaagtaactgctaatgggtatatggtttcttttttggagtaatgaaaatgttccaaaattgactgtggtgatggttgtacaaatgcaaaaacactaagtactattaaattgtatactttag

SEQ ID NO: 63148 - DNA, 557 bp, Homo sapiens
gttaaaaaaagggagaaggactcatcaacacattgctgcctgcaaacccagggaaagaccaccttacaccacattatatggcatctgtaaatcaacatgggccagcgggagacaccaaggccctaccaggagctgctctttgatcacgaggttcacgctgcatcttttcgggaaggttaaaaaataataaatgaccaccaggatcacagaaggaaagagctcgtgatgtccatggaattcacgcagatcacatccaggaatctttggaacaaaaaattcacaacaccatggcctcatacaaaaatgctgggctgcaggaaacctgaggcagagagctccatcatcacagtgaagtccccgccttcagcagatcccaccaacagccacagtgcttcccatcacctgaaaaaaactcatgtatcaaactattacacttcttcagaatattggaaaatggtgcatagttcatatgttctcatttgtttatcttgtgtctaaagtgtcttgtcattccaggccactctatttcttgtgtattaataaaaagtttgaggtat

SEQ ID NO: 63149 - DNA, 457 bp, Homo sapiens
tgtagagtgaatttccatatgtattccattctactagtctgtttacctaattcatgtgtgtcatactattttaattatggaggcattatagtatttttaaatgcctgcttggacctgtcttcccctgtagcttttctttctcagttttcctagctatttttagagaacattgttttgaatcacaaaaactatcaaatagaggggaaaattggatttatcttttgaaattcagcttcttaacagctaatctttccacaaggagctattacttcatttctttgataaaagtacatatcaacatgatttattacaaaagtaaaaaaaattctgtatattataaatatttttatatgaaattgtattctctcattttccatgggttattctgaacacaaaatagttcaaaggtgtttctattaaagttgtttctattcaaaaaacaaaggaaagaaaatat

SEQ ID NO: 63150 - DNA, 553 bp, Homo sapiens
atatatcctaagatcaaagagcctcattactgagaaatgaccttatgaatacttgatttttttaaatttaatgaagaattaaattggtgctctcttttaaaactatattcagattctcaaatagaagttgaagaaatactttccctatctcagtggagccagaattaataagaaattcattccctgtgttttcttaagttaaaatagtcaaactttcagcctttcagatttcggatgtgatacatacacataaacgttgtgtctgaaacagtgctgaaactaatccatgataagaaaactttatttttagatcctgtttgacccatttattaattatttgatagacatgagatactttgctgccatatttttaggttagtggctagatttagtagaactagagtaggaaaggaaatcaatctgatgttgaaccttagtgtcagctacagagatggctatattaagattaccacgttgaaagattgccggatagcctctgtgtctaatatgaagccattaattttgttttttataactcattaaaaaaaagaaa

SEQ ID NO: 63151 - DNA, 349 bp, Homo sapiens
gtatttttagtagagacggagtttcagcatgttggtcaggctggtctcgaactcccgacctcaagtgatctgccgccttgacctcccaaagtgttgggaaaacaagcatgagccaccctgcccagccccaattaataattttaacagaggcacaagacactatgttgctgatattatgttgaatagtttacattttctcattttatttagcatttcataaatattaaatcattatgttctgtacttgtacactaaagagcagtttttgttttataaaaagaaaacattgcagatcacttataaaactatttatttaaagcatatttctgtatttttcaagcactacagg

SEQ ID NO: 63152 - DNA, 1771 bp, Homo sapiens
  misc_feature (939)..(939): n is a, c, g, or t
  misc_feature (1164)..(1165): n is a, c, g, or t
  misc_feature (1168)..(1168): n is a, c, g, or t
agactcagcttaatctgacccaagggctcctaccctgaaccagtagctgggactatccccagggtacccctgagagctgccccagcctggggtgagggtaaggggtagggggctttgtcttggctgagccacatctctcacacccctgtggcctgggcatcataatcagccccaactatataaccaggtgggctgccagggcctctgtaaagctaggcctgctgggagaggatgaggaggagccctgccctcaaacgtggcctcctatggacacccagactcacagccttcctatcacccacactcagctccatagcaactctcagccccaaagccgcacctgcacccgccattgccaaaccttcagccagagttgcagacagagccatcgtggcagccggagccagagctccagccagagcccggccagccaccgcaacccaactggagcccacagctcatccggccaccagagccagagtcccaacactagtccaccaccaaagcgccacaaaaagactatgaactcccaccactctcccatgcggcccaccatcctgcactgccgctgccccaagaacagaaagaacttggaaggcaagctgaaaaagaaaaaaatggccaagaggatccagcaggtgtacaaaaccaagacgcggagctcaggtaccctttaaggaggtggggaagggccaccgagccacagatgatggagagcagaccttgggggcagtgagaggaaggctgcagccaggtcacaaaggaaccacaggcaagaaggaagagggagaagagaaacaatggcagttggctagctgaatgtatgatacgttgacggaaagtctctttgaaattggatgggttgattaggaggatggaaagatggacagatagcagataagctagatgaaagcatgaatggagttgagaggttgggtngatgactgggtgggtaaacaataaataggttatagaaaggatagttggaagaatgcattggctgaatgataggaagtttggatacgattagctggatggatggataaatggatgaatgcactggctggctagttatttggttggttaggtagatgatcagtttgaagattgtggttggtggatgaattggttagaaatagagttaaatagttgtagaagttttgnnggnttggtttgattggttaaatattatcttaatagagtaatatagagtaattgaataaacagagagaagaatagatatctagactaatggatagaatggaaagaaatgttgaataaatgaatggaatgagtgaactaatgaatgggtggatgacaaatggaagggataaatggatggatacctggattcacataggtcaaaaggacactgacggtagtctaaactctatctatgtcccatatcaatcacaaatgagtagttgtaagaccttacaggaggtcaaggaggtcactgacttcatgaagtgctcagctattaaaggttcctttcccactcttatcccttaggatggaaatccaactaatgagaccgcactccttggcttgttcctgcgtgtttcacccaaaggagaaaatgctaggatgaagtcaatcttcttgcaggaacatgttactatggtgatttctacgcaacactaattaaagcttgtacctggaagactatccctgagtagtcattttgatttcactaataaaggtgttatgtgttttgggggcctgcacaggggcagaaatgaatgggggtaggatgccaagaagcctgcag

SEQ ID NO: 63153 - DNA, 925 bp, Homo sapiens
agactcagcttaatctgacccaagggctcctaccctgaaccagtagctgggactatccccagggtacccctgagagctgccccagcctggggtgagggtaaggggtagggggctttgtcttggctgagccacatctctcacacccctgtggcctgggcatcataatcagccccaactatataaccaggtgggctgccagggcctctgtaaagctaggcctgctgggagaggatgaggaggagccctgccctcaaacgtggcctcctatggacacccagactcacagccttcctatcacccacactcagctccatagcaactctcagccccaaagccgcacctgcacccgccattgccaaaccttcagccagagttgcagacagagccatcgtggcagccggagccagagctccagccagagcccggccagccaccgcaacccaactggagcccacagctcatccggccaccagagccagagtcccaacactagtccaccaccaaagcgccacaaaaagactatgaactcccaccactctcccatgcggcccaccatcctgcactgccgctgccccaagaacagaaagaacttggaaggcaagctgaaaaagaaaaaaatggccaagaggatccagcaggtgtacaaaaccaagacgcggagctcaggatggaaatccaactaatgagaccgcactccttggcttgttcctgcgtgtttcacccaaaggagaaaatgctaggatgaagtcaatcttcttgcaggaacatgttactatggtgatttctacgcaacactaattaaagcttgtacctggaagactatccctgagtagtcattttgatttcactaataaaggtgttatgtgttttgggggcctgcacaggggcagaaatgaatgggggtaggatgccaagaagcctgcag

SEQ ID NO: 63154 - DNA, 370 bp, Homo sapiens
aacatttcagaggacgctgtcccccaagtctgggtcctggcatgagaagatacagagcagaccctggggtttgagttaccttgcttctcctgatcatgttttctcattggcaaaaagagatggatgatttgagatttttttttcttctggggcaatctcagattgtgtctaactccaaagaatgatgtaaatctgttctgttcacaaatgctttgtgagaggccatgtagtcttagtgtttttactgacaagagaattgccttgcgcagaagaattgctacagttgcagtttcagagctcctggaagaccaccatttctaccttagtgagagctccccacattaccaagaatgggactacattactgata

SEQ ID NO: 63155 - DNA, 394 bp, Homo sapiens
cttaagtgaactagtgagtaaactagaaaagggaggtgaaatatgttgcatttatcttaggtccctgaattatttcatctaagtaaaacctcaatatgattttcctctacatgacattttccttagccaattaatggcatccatttgtccgcagggatgcgttgcacatgagagtgagaacaaattgttacaatgaaattaaaaacattcagaacagtattgtgcatcaggaagacagatttgaaaggctttccgtatatggagaagatcttctgtattccatttgctgtgtacctcagcatactggtggattaggaatgggttataggcatgtgaaaaggtttatttgctcagaattgctgggtgtcaggagcacaggggttaaagtaagacc

SEQ ID NO: 63156 - DNA, 736 bp, Homo sapiens
ttaagagtacacaagtccttttattaaaagtttgctcctagcctgggcaacataatgagatcccatctctgcaaaaaaatttgtacatgggcatacacctgtagtcccagctacttgggaggctgagacgggaggatcgcttaagctcaggagttcaaggctgcagtgagctatgactgctgactgtacctgcactccagcctgggcaacagagtgagatcctgtctcaaaaacaaagtgtgctctccacatacctgcaacacaactagtcttatttctaaaatgttataatcttttttccaagtagctacattaatatagtctagaaaaaaatggacttgaatagctggtagaatattaaaatatagaaatgaaataaaagaattatatctaaaaacctcaactcagaagacagaaaaagagaaaataggccctgatatcaacagaattaacaatacataaaaggagtaacttttgaggggagaggatataaaatattttgaggaattaccaaggggaataaaacaatgttaccttgaaatgattatatatatattacatattggtatatatgtccatacctacctatatcccctgctacccttctgtctgaaatatacaaataatgataatgttgaagatatcgataaacatagctaatgtctgttcatagaggacttactaagtgccagccaccatgataagctaaagttaattattttatttgttcattcca

SEQ ID NO: 63157 - DNA, 801 bp, Homo sapiens
ccccgcatcccaggcgcacttctcactagctgtcacttggtctgctctgcgccaggtcctcagcatgcgttgtctttattccgcgtgacaatcctatgggaaggggcctccacctacgtaacagaaatgcggctcagaaagaccaagtgacagctagtgagtagtgctgggcctgaaccccaaagtccacactcttgctatagccgctgaggcaggcagaagagctccttgggaggaaagtaaggggcattcaaagccttctctgaatcactccccaagccagagtagacctggttccagttgtcccccccttgtttccgggcagagtcaggcaggtgtcataccatccctccccgcccaaccagtgctggccagactcccattcaccgaccttgactagacagcgaacagccaccttttagtattcatcccaacaggtccaggcggtcagtgtgatagccacgcagttcctaagggactgtaggtctaggaatcattaggacactcactcagccaccctcgatgcccccatcttccccacactgcccttggcctccccgctctgcacgcctggagtatttgcactggtctagcctactccaggtcagactcattaggaactcaagattctcgtaaagaaagttgtttccaaagttgtcttgtcactctatttgggggttgggagagagcccgtgggggccagcgttggcgaatacaggaaaaagggagaatgctggagaaactggactcgtgagagcttaaagacatcccaagaatccaaagaaaaagtgagtggtgaca

SEQ ID NO: 63158 - DNA, 3921 bp, Homo sapiens
gtggtgatctagaggatccctcgctatcatcggcactcgctattcatcggcacccagcccaggcaatagtgttgaggaggggagcaaggctgctaagtggaagacagagatggcagagccatccaccctgaggagtgacgggcaaggggccaggaaggggacaggattgtctgctgcctccaagtcatgggagaagaggggtataggacaaggggtggaagggcaggagctcacaccgcaccgggctggcctgacacaatggtagctctgaagggaggggaagagagaggcctgggtgtgacctgacacctgccgctgcttgagtggacagcagctggactgggtgggccccacagtggtcagcgattcctgccaagtagggtttagccgggccccatggtcacagacccctgggggaggcttccagctcagtcccacagccccttgcttctaagggatccagagacctgctccagatcctctttccccactgaagaattctgcaccctctggacttccctcttcttccttcctttctcaggctcaaggtgtggggggcaaggctgagtattaggggagcttctgagttctgaatctttgggtgacctgcttggagtctcaggtccaaatacttgaaatctgtgagaagtccaagttcatgggcttttggaactggaagaactttgtacagccatggattccaacataagccatgttgcagatgaagaaactgacccacacggtgagacaagcacaggtgggtctgactcttcctccctgccctgagatccatctgtcgagtgccctgttttttccccactttgaactgactggttactctaaggaagtgaactgaggatgttagctttaagccaacccagcctctttgtccacagcagagctgaggtgaacagctggaaccctgctacatccgtgctgctccagtctgttctgctcatggctccatccttctggctgtcactcttcctcttccccttcccaaccaaacctgagcagctttgaagcagaacttgggaaggacagggctgctgctgccagcgacacctcagaaagcatagcctcggcttcctgccccatgtgtccctggaagctgtaccctgactctgcttccagaggccagcagatggtgggttacagacgggtcagcctgccaagtgcacctgagggacctgacctgacacaagccattttgtccctagagcccagctgggactcctgcttctctaggcagggcagagggaggagacacagcacaggcacagagcatgggacagggacccccgagtctggattcaagtcctggccctgctagtaactcatgtgagccagcttgagcaagtcccttcatcttgctagagctcagcttccttgcctataaaacgtaggtggcaatgccctcttcctgaggttgctgggaggataaggcagtgcttgtgaaaaagtctagcgctgtacctggcacagagtagatgcttcatgaatgttgagtctgacaggcaactggagctggtgagaatggggtcccctgactgtcatgccagcctccctcccaggcccactcttcccccctcttccctgaggaaaccaagtctcccttatcaggaagagctgggggagctgggaggaacattacaggaacaccagagggagtctagcgggtgggcaggcttctctctgcagccccctcagcagtttcattccattcctgggctgaacccttgccctggccctgcctcccttctgggtcagcacctcctgacacaggtgtgtgctcagggaccccaggctctagtcctgtactggctgtggaagcctatcactgggacaggaagccagtggctgcaggagacaggcctcagcgcatctcgtctgtcaggatgggctcacggacaccttttcttggtagcagggagtgtctctgcactatggaaactttccctcttctagagcggattgggagttgcctgtattatgcctgaaccctccttgaactcatggtcctggggaaggcgtcttggaaccagaaacagcaacaggaaaggagcctccctctgaagggtaggatgccggcctgaggccctccctcttggctctcccagggcctgggctaccccgaggccccagcagctgctgctgtggctgtacttgcttttaatatttcccatacatggctgttgtccaagttaagtcaccaaatggtgctagaggggatggcagagagcagcttgtccagctcctctccatgacccggttaacacacgagttaaacaggcctagagcttgtctgctgtttgacctcttttaagacccggctgtgctgcatctacaaaatgaagatgacagagctagccgaggtcttcagcaaggaagaaaggggtcagtgtatatgaaagggttacctgggcagtgtcattccctccatctctgtacgcagccctttgggaaccatcacaataaggaagaggtgagggcagaggtgaaggatccactgcccaggcaaggtgctaccatgtggtgggagagtgtgaaccctcaagtgcactgggaagctttggggaaccacagtctcttccacccttgggtcgtgtgtcgtcctcttctcttgatgtcagggaagcccctatgcctccttcccgtggtggggctatctctgcagagaatcgggtgcccagcttaatgctgggcaaggactggaggaagctccagatctggaggtggcagagatactggatggaaacctggagcaagggtttgggaggggaagtgaggaaacaggttgagactatctccatcagagatggcaaggccacaggtgatctgagaactatttttgtctgaaaagaaggcatgcacaggctctctgcttttgacaggtggcgttgcagtgggaggaaggcagcttcctggcggggagatagaaatactagaacagctggtaccaagttattgaaaatttaaaagcaaacaagacacagcagcccccaggtggtgtgttctactgaggaaggctacggcagaggaagggcaagaccgtttcccccaatggtcttgaaacggaagaggaaacagggagggctctttggatggtttggggacctggggctgtttgtatcccagtattagctcctgttactaagggtctgctctgcgccaggtcctcagcatgcgttgtctttattccgcgtgacaatcctatgggaaggggcctccacctacgtaacagaaatgcggctcagaaagaccaagtgacagctagtgagtagtgctgggcctgaaccccaaagtccacactcttgctatagccgctgaggcaggcagaagagctccttgggaggaaagtaaggggcattcaaagccttctctgaatcactccccaagccagagtagacctggttccagttgtcccccccttgtttccgggcagagtcaggcaggtgtcataccatccctccccgcccaaccagtgctggccagactcccattcaccgaccttgactagacagcgaacagccaccttttagtattcatcccaacaggtccaggcggtcagtgtgatagccacgcagttcctaagggactgtaggtctaggaatcattaggacactcactcagccaccctcgatgcccccatcttccccacactgcccttggcctccccgctctgcacgcctggagtatttgcactggtctagcctactccaggtcagactcattaggaactcaagattctcgtaaagaaagttgtttccaaagttgtcttgtcactctatttgggggttgggagagagcccgtgggggccagcgttggcgaatacaggaaaaagggagaatgctggagaaactggactcgtgagagcttaaagacatcccaagaatccaaagaaaaagtgagtggtgaca

SEQ ID NO: 63159 - DNA, 5868 bp, Homo sapiens
ctcctccccctcaccgtcccaattgtattccctggaagagcagccggaaaagcctccgcctgctcataccaggataggcaagaagctggtttctcctcgcagccggctccctgaggcccaggaaccaccgcggcggccggcaccacctggacccagctccaggcgggcgcggcttcagcaccacggacagcgccccacccgcggccctccccccggcggcgcgctccagccggtgtaggcgaggcagcgagctatgcccgcggcatggcccggcgctgcggccccgtggcgctgctccttggcttcggcctcctccggctgtgctcaggggtgtggggtacggatacagaggagcggctggtggagcatctcctggatccttcccgctacaacaagcttatccgcccagccaccaatggctctgagctggtgacagtacagcttatggtgtcactggcccagctcatcagtgtgcatgagcgggagcagatcatgaccaccaatgtctggctgacccaggagtgggaagattatcgcctcacctggaagcctgaagagtttgacaacatgaagaaagttcggctcccttccaaacacatctggctcccagatgtggtcctgtacaacaatgctgacggcatgtacgaggtgtccttctattccaatgccgtggtctcctatgatggcagcatcttctggctgccgcctgccatctacaagagcgcatgcaagattgaagtaaagcacttcccatttgaccagcagaactgcaccatgaagttccgttcgtggacctacgaccgcacagagatcgacttggtgctgaagagtgaggtggccagcctggacgacttcacacctagtggtgagtgggacatcgtggcgctgccgggccggcgcaacgagaaccccgacgactctacgtacgtggacatcacgtatgacttcatcattcgccgcaagccgctcttctacaccatcaacctcatcatcccctgtgtgctcatcacctcgctagccatccttgtcttctacctgccatccgactgtggcgagaagatgacgttgtgcatctcagtgctgctggcgctcacggtcttcctgctgctcatctccaagatcgtgcctcccacctccctcgacgtgccgctcgtcggcaagtacctcatgttcaccatggtgcttgtcaccttctccatcgtcaccagcgtgtgcgtgctcaacgtgcaccaccgctcgcccaccacgcacaccatggcgccctgggtgaaggtcgtcttcctggagaagctgcccgcgctgctcttcatgcagcagccacgccatcattgcgcccgtcagcgcctgcgcctgcggcgacgccagcgtgagcgcgagggcgctggagccctcttcttccgcgaagccccaggggccgactcctgcacgtgcttcgtcaaccgcgcgtcggtgcaggggttggccggggccttcggggctgagcctgcaccagtggcgggccccgggcgctcaggggagccgtgtggctgtggcctccgggaggcggtggacggcgtgcgcttcatcgcagaccacatgcggagcgaggacgatgaccagagcgtgagtgaggactggaagtacgtcgccatggtgatcgaccgcctcttcctctggatctttgtctttgtctgtgtctttggcaccatcggcatgttcctgcagcctctcttccagaactacaccaccaccaccttcctccactcagaccactcagcccccagctccaagtgaggcccttcctcatctccatgctctttcaccctgccaccctctgctgcacagtagtgttgggtggaggatggacgagtgagctaccaggaagaggggcgctgcccccacagatccatccttttgcttcatctggagtccctcctcccccacgcctccatccacacacagcagctccaacctggaggctggaccaactgctttgttttggctgctctccatctcttgtaccagcccaggcaatagtgttgaggaggggagcaaggctgctaagtggaagacagagatggcagagccatccaccctgaggagtgacgggcaaggggccaggaaggggacaggattgtctgctgcctccaagtcatgggagaagaggggtataggacaaggggtggaagggcaggagctcacaccgcaccgggctggcctgacacaatggtagctctgaagggaggggaagagagaggcctgggtgtgacctgacacctgccgctgcttgagtggacagcagctggactgggtgggccccacagtggtcagcgattcctgccaagtagggtttagccgggccccatggtcacagacccctgggggaggcttccagctcagtcccacagccccttgcttctaagggatccagagacctgctccagatcctctttccccactgaagaattctgcaccctctggacttccctcttcttccttcctttctcaggctcaaggtgtggggggcaaggctgagtattaggggagcttctgagttctgaatctttgggtgacctgcttggagtctcaggtccaaatacttgaaatctgtgagaagtccaagttcatgggcttttggaactggaagaactttgtacagccatggattccaacataagccatgttgcagatgaagaaactgacccacacggtgagacaagcacaggtgggtctgactcttcctccctgccctgagatccatctgtcgagtgccctgttttttccccactttgaactgactggttactctaaggaagtgaactgaggatgttagctttaagccaacccagcctctttgtccacagcagagctgaggtgaacagctggaaccctgctacatccgtgctgctccagtctgttctgctcatggctccatccttctggctgtcactcttcctcttccccttcccaaccaaacctgagcagctttgaagcagaacttgggaaggacagggctgctgctgccagcgacacctcagaaagcatagcctcggcttcctgccccatgtgtccctggaagctgtaccctgactctgcttccagaggccagcagatggtgggttacagacgggtcagcctgccaagtgcacctgagggacctgacctgacacaagccattttgtccctagagcccagctgggactcctgcttctctaggcagggcagagggaggagacacagcacaggcacagagcatgggacagggacccccgagtctggattcaagtcctggccctgctagtaactcatgtgagccagcttgagcaagtcccttcatcttgctagagctcagcttccttgcctataaaacgtaggtggcaatgccctcttcctgaggttgctgggaggataaggcagtgcttgtgaaaaagtctagcgctgtacctggcacagagtagatgcttcatgaatgttgagtctgacaggcaactggagctggtgagaatggggtcccctgactgtcatgccagcctccctcccaggcccactcttcccccctcttccctgaggaaaccaagtctcccttatcaggaagagctgggggagctgggaggaacattacaggaacaccagagggagtctagcgggtgggcaggcttctctctgcagccccctcagcagtttcattccattcctgggctgaacccttgccctggccctgcctcccttctgggtcagcacctcctgacacaggtgtgtgctcagggaccccaggctctagtcctgtactggctgtggaagcctatcactgggacaggaagccagtggctgcaggagacaggcctcagcgcatctcgtctgtcaggatgggctcacggacaccttttcttggtagcagggagtgtctctgcactatggaaactttccctcttctagagcggattgggagttgcctgtattatgcctgaaccctccttgaactcatggtcctggggaaggcgtcttggaaccagaaacagcaacaggaaaggagcctccctctgaagggtaggatgccggcctgaggccctccctcttggctctcccagggcctgggctaccccgaggccccagcagctgctgctgtggctgtacttgcttttaatatttcccatacatggctgttgtccaagttaagtcaccaaatggtgctagaggggatggcagagagcagcttgtccagctcctctccatgacccggttaacacacgagttaaacaggcctagagcttgtctgctgtttgacctcttttaagacccggctgtgctgcatctacaaaatgaagatgacagagctagccgaggtcttcagcaaggaagaaaggggtcagtgtatatgaaagggttacctgggcagtgtcattccctccatctctgtacgcagccctttgggaaccatcacaataaggaagaggtgagggcagaggtgaaggatccactgcccaggcaaggtgctaccatgtggtgggagagtgtgaaccctcaagtgcactgggaagctttggggaaccacagtctcttccacccttgggtcgtgtgtcgtcctcttctcttgatgtcagggaagcccctatgcctccttcccgtggtggggctatctctgcagagaatcgggtgcccagcttaatgctgggcaaggactggaggaagctccagatctggaggtggcagagatactggatggaaacctggagcaagggtttgggaggggaagtgaggaaacaggttgagactatctccatcagagatggcaaggccacaggtgatctgagaactatttttgtctgaaaagaaggcatgcacaggctctctgcttttgacaggtggcgttgcagtgggaggaaggcagcttcctggcggggagatagaaatactagaacagctggtaccaagttattgaaaatttaaaagcaaacaagacacagcagcccccaggtggtgtgttctactgaggaaggctacggcagaggaagggcaagaccgtttcccccaatggtcttgaaacggaagaggaaacagggagggctctttggatggtttggggacctggggctgtttgtatcccagtattagctcctgttactaagggtctgctctgcgccaggtcctcagcatgcgttgtctttattccgcgtgacaatcctatgggaaggggcctccacctacgtaacagaaatgcggctcagaaagaccaagtgacagctagtgagtagtgctgggcctgaaccccaaagtccacactcttgctatagccgctgaggcaggcagaagagctccttgggaggaaagtaaggggcattcaaagccttctctgaatcactccccaagccagagtagacctggttccagttgtcccccccttgtttccgggcagagtcaggcaggtgtcataccatccctccccgcccaaccagtgctggccagactcccattcaccgaccttgactagacagcgaacagccaccttttagtattcatcccaacaggtccaggcggtcagtgtgatagccacgcagttcctaagggactgtaggtctaggaatcattaggacactcactcagccaccctcgatgcccccatcttccccacactgcccttggcctccccgctctgcacgcctggagtatttgcactggtctagcctactccaggtcagactcattaggaactcaagattctcgtaaagaaagttgtttccaaagttgtcttgtcactctatttgggggttgggagagagcccgtgggggccagcgttggcgaatacaggaaaaagggagaatgctggagaaactggactcgtgagagcttaaagacatcccaagaatccaaagaaaaagtgagtggtgaca

SEQ ID NO: 63160 - DNA, 408 bp, Homo sapiens
atcctctatttacttttctgatcctctcagttgccctatgtcatattcttcttgtgatcctgacttagtagggttcatgtacttagttggccagctctatatttcaaatcgtgtcatctgagttacggtatccgtgtgaatgaaatgagtgacagtgagaaatgatagggataaaaacttgcttcacagctaaacataagaatcactaaattcaaaactgattttagtatccatccattaacacttctaatttcttcatttgcttatagaataacaattcttttggtatgcagaggtcatcattctctttgaattataattgcatacatgtcacgtaagatgtcagctggagtaatttcttcttcaccattgtctctcaaatctatctattaaatctgtatctatcta

SEQ ID NO: 63161 - DNA, 367 bp, Homo sapiens
aaaatgaagccaacatactttaaaaaaaaaacatagtctacattttcgaccctttcaaatgccctgtgaggtgcagccaggtttagaatcgctggtggggcgagtcttcctgaaacacggcttgtggttcagaagagtcagtgagggagtttccaatactttgaaacttcagagcaatccaaaatgactctcacttttccaaggggtgatttcggagaaaaccaaattttatattttatatttttgttttaaactttatatttgtgcatataaatagcattaccgtggagctttaaaacaatgtatattaaggctcatgtatggttcatgaaaatattttaaaaaaaaaaaaagaagtagaaaagaa

SEQ ID NO: 63162 - DNA, 342 bp, Homo sapiens
atccaaccccatgatccaatcacctctcaccaagaccctcctccaacactgaggatgacaatttgacatgagatttgggcggggacacaaatttcaaaccataaaaatccaatataattttctttttaatctaggcagtctcattattttatgtttccaaataagacccaggaacactgatagtttacagatccaagaatcttttgagaatttttacttggtttggttttgcagattaagaggtaagttcttattttcattgttgtttgctgtttcactagagaaaactatgtcaaataacccttatgaatgcaattaaaaataaaagcactgttggcagca

SEQ ID NO: 63163 - DNA, 349 bp, Homo sapiens
ccgccccggcctcccaaagtactggaattacagacatgagccactgcacccagcctttatgttaaaccttgaatatacatcatctcatgggatagatgccattattattacacacatgcccattttataaatgaggaaaccgagatgcagagaggccaagaaactggcccaacgtcatgcaattagggagtggtgagaccaggatttaaacctaggtaatttggttccagagctttagccactgtgctttattgcttcattaagtagatagctggctaaattcaaagaaaccagatttttcccagccttcagagctgtacaaataaatttctgttgtttagcccaaatt

SEQ ID NO: 63164 - DNA, 1073 bp, Homo sapiens
  misc_feature (368)..(368): n is a, c, g, or t
  misc_feature (415)..(415): n is a, c, g, or t
agcgggccggctgcgagactggggccgtggctgctggtcccgggtgatgctaggcggctccctgggctccaggctgttgcggggtgtaggtgggagtcacggacggttcggggcccgaggtgtccgcgaaggtggcgcagccatggcggcaggggagagcatggctcagcggatggtctgggtggacctggagatgacaggattggacattgagaaggaccagattattgagatggcctgtctgataactgactctgatctcaacattttggctgaaggtcctaacctgattataaaacaaccagatgagttgctggacagcatgtcagattggtgtaaggagcatcacgggaagtctggccttaccnaggcagtgaagaagagtacaattacattgcagcaggcagagtatgantttctgtcctttgtacgacagcagactcctccagggctctgtccacttgcaggaaattcagttcatgaagataagaagtttcttgacaaatacatgccccagttcatgaaacatcttcattatagaataattgatgtgagcactgttaaagaactgtgcagacgctggtatccagaagaatatgaatttgcaccaaagaaggctgcttctcatagggcacttgatgacattagtgaaagcatcaaagagcttcagttttaccgaaataacatcttcaagaaaaaaatagatgaaaagaagaggaaaattatagaaaatggggaaaatgagaagaccgtgagttgatgccagttatcatgctgccactacatcgttatctggaggcaacttctggtggtttttttttctcacgctgatggcttggcagagcaccttcggttaacttgcatctccagattgattactcaagcagacagcacacgaaatactatttttctcctaatatgctgtttccattatgacacagcagctcctttgtaagtaccaggtcatgtccatcccttggtacatatatgcatttgcttttaaaccatttcttttgtttaaataaataaataagtaaataaagctagttctattgaaatgcaaaaaaaaaata

SEQ ID NO: 63165 - DNA, 1042 bp, Homo sapiens
aattgatgtttattatgatgactgagtcatgacttatgttcaagtgtgtcagtctgttttgttcagggacatcatcaagtattgggcaatgtttctcaaactgtgttccatgaactgtttataagtattctacaaatgtggtcgattaagttttagaaatactaaaatttattaattttagaaaattaataaatatattagaaatataggacagcttccttttgggaattcataatacacattagtatattaaatgctttgcaactttttatttcagtaaaaagtttactctagtttttctaaacttatttgaccgtggaattattttttctccctgtggaacatgtcgccatcttttggaacaatttgggaaactttaatcttctatattttacaaatttttttgtcaaaagtttttaaaaaacaaagcatttaaagaaaattgcttttctgaaatgttctacttttgatgatgctagacagtgacacttacagtaacatccattgttcttaagtcgttttttaaaagttgtacttttaaaatgattttcatctcctggttttggacagttcattcattgtggtatgtttgcttatagggcacttgatgacattagtgaaagcatcaaagagcttcagttttaccgaaataacatcttcaagaaaaaaatagatgaaaagaagaggaaaattatagaaaatggggaaaatgagaagaccgtgagttgatgccagttatcatgctgccactacatcgttatctggaggcaacttctggtggtttttttttctcacgctgatggcttggcagagcaccttcggttaacttgcatctccagattgattactcaagcagacagcacacgaaatactatttttctcctaatatgctgtttccattatgacacagcagctcctttgtaagtaccaggtcatgtccatcccttggtacatatatgcatttgcttttaaaccatttcttttgtttaaataaataaataagtaaataaagctagttctattgaaatgcaaaaaaaaaata

SEQ ID NO: 63166 - DNA, 499 bp, Homo sapiens
  misc_feature (45)..(45): n is a, c, g, or t
gtcacatctgtataacatcatgaattccgcgcaccgagacgcgangcgcgcgtaacggcacttgatgacattagtgaaagcatcaaagagcttcagttttaccgaaataacatcttcaagaaaaaaatagatgaaaagaagaggaaaattatagaaaatggggaaaatgagaagaccgtgagttgatgccagttatcatgctgccactacatcgttatctggaggcaacttctggtggtttttttttctcacgctgatggcttggcagagcaccttcggttaacttgcatctccagattgattactcaagcagacagcacacgaaatactatttttctcctaatatgctgtttccattatgacacagcagctcctttgtaagtaccaggtcatgtccatcccttggtacatatatgcatttgcttttaaaccatttcttttgtttaaataaataaataagtaaataaagctagttctattgaaatgcaaaaaaaaaata

SEQ ID NO: 63167 - DNA, 1393 bp, Homo sapiens
aattgatgtttattatgatgactgagtcatgacttatgttcaagtgtgtcagtctgttttgttcagggacatcatcaagtattgggcaatgtttctcaaactgtgttccatgaactgtttataagtattctacaaatgtggtcgattaagttttagaaatactaaaatttattaattttagaaaattaataaatatattagaaatataggacagcttccttttgggaattcataatacacattagtatattaaatgctttgcaactttttatttcagtaaaaagtttactctagtttttctaaacttatttgaccgtggaattattttttctccctgtggaacatgtcgccatcttttggaacaatttgggaaactttaatcttctatattttacaaatttttttgtcaaaagtttttaaaaaacaaagcatttaaagaaaattgcttttctgaaatgttctacttttgatgatgctagacagtgacacttacagtaacatccattgttcttaagtcgttttttaaaagttgtacttttaaaatgattttcatctcctggttttggacagttcattcattgtggtatgtttgcttatagggcacttgatgacattagtgaaagcatcaaagagcttcagttttaccgaaataacatcttcaagaaaaaaatagatgaaaagaagaggaaaattatagaaaatggggaaaatgagaagaccgtgagttgatgccagttatcatgctgccactacatcgttatctggaggcaacttctggtggtttttttttctcacgctgatggcttggcagagcaccttcggttaacttgcatctccagattgattactcaagcagacagcacacgaaatactatttttctcctaatatgctgtttccattatgacacagcagctcctttgtaagtaccaggtcatgtccatcccttggtacatatatgcatttgcttttaaaccatttcttttgtttaaataaataaataagtaaataaagctagttccatgtaacaacaacaaacaaacaaaaaaaaaaaaaaaacttgttgtggggcgcgcccccgcgcggccccctcgaaaagagcttttttaaaaccacttcccgtgtggggcgcgcccgccggaccccagttaggttagacgagagaccaagtggggctaaatatagagcggttccccaaagggaaaaacgccggggcaagccgacaataggcgcgttcggagttctctctcccccagttataaaaaacccgcccggggcgaaacccgagagggtttttgaagacaaattctcaagatggggagttctcaagggaccactaccgggagctctatacaccaggggtctcacgagagcggcccaaatattcaatttgca

SEQ ID NO: 63168 - DNA, 1069 bp, Homo sapiens
  misc_feature (1021)..(1021): n is a, c, g, or t
  misc_feature (1028)..(1028): n is a, c, g, or t
aattgatgtttattatgatgactgagtcatgacttatgttcaagtgtgtcagtctgttttgttcagggacatcatcaagtattgggcaatgtttctcaaactgtgttccatgaactgtttataagtattctacaaatgtggtcgattaagttttagaaatactaaaatttattaattttagaaaattaataaatatattagaaatataggacagcttccttttgggaattcataatacacattagtatattaaatgctttgcaactttttatttcagtaaaaagtttactctagtttttctaaacttatttgaccgtggaattattttttctccctgtggaacatgtcgccatcttttggaacaatttgggaaactttaatcttctatattttacaaatttttttgtcaaaagtttttaaaaaacaaagcatttaaagaaaattgcttttctgaaatgttctacttttgatgatgctagacagtgacacttacagtaacatccattgttcttaagtcgttttttaaaagttgtacttttaaaatgattttcatctcctggttttggacagttcattcattgtggtatgtttgcttatagggcacttgatgacattagtgaaagcatcaaagagcttcagttttaccgaaataacatcttcaagaaaaaaatagatgaaaagaagaggaaaattatagaaaatggggaaaatgagaagaccgtgagttgatgccagttatcatgctgccactacatcgttatctggaggcaacttctggtggtttttttttctcacgctgatggcttggcagagcaccttcggttaacttgcatctccagattgattactcaagcagacagcacacgaaatactatttttctcctaatatgctgtttccattatgacacagcagctcctttgtaagtaccaggtcatgtccatcccttggtacatatatgcatttgcttttaaaccatttcttttgtttaaataaataaataagtaaataaagctagttccngatgcgnccgttctattactaacatcaattattagttaacatagatgg

SEQ ID NO: 63169 - DNA, 292 bp, Homo sapiens
  misc_feature (51)..(51): n is a, c, g, or t
  misc_feature (94)..(94): n is a, c, g, or t
ggtttttttttctcacgctgatggcttggcagagcacctctctccgcggtntaaaccttgtggacatttcctctcacacgaagtgtgaagtttnaacctcaagcagacagcacacgaaatactatttttctcctaatatgctgtttccattatgacacagcagctcctttgtaagtaccaggtcatgtccatcccttggtacatatatgcatttgcttttaaaccatttcttttgtttaaataaataaataagtaaataaagctagttctattgaaatgcaaaaaaaaaata

SEQ ID NO: 63170 - DNA, 1000 bp, Homo sapiens
  misc_feature (368)..(368): n is a, c, g, or t
  misc_feature (415)..(415): n is a, c, g, or t
agcgggccggctgcgagactggggccgtggctgctggtcccgggtgatgctaggcggctccctgggctccaggctgttgcggggtgtaggtgggagtcacggacggttcggggcccgaggtgtccgcgaaggtggcgcagccatggcggcaggggagagcatggctcagcggatggtctgggtggacctggagatgacaggattggacattgagaaggaccagattattgagatggcctgtctgataactgactctgatctcaacattttggctgaaggtcctaacctgattataaaacaaccagatgagttgctggacagcatgtcagattggtgtaaggagcatcacgggaagtctggccttaccnaggcagtgaagaagagtacaattacattgcagcaggcagagtatgantttctgtcctttgtacgacagcagactcctccagggctctgtccacttgcaggaaattcagttcatgaagataagaagtttcttgacaaatacatgccccagttcatgaaacatcttcattatagaataattgatgtgagcactgttaaagaactgtgcagacgctggtatccagaagaatatgaatttgcaccaaagaaggctgcttctcatagcatcaaagagcttcagttttaccgaaataacatcttcaagaaaaaaatagatgaaaagaagaggaaaattatagaaaatggggaaaatgagaagaccgtgaggctgccactacatcgttatctggaggcaacttctggtggtttttttttctcacgctgatggcttggcagagcaccttcggttaacttgcatctccagattgattaagcacacgaaatactatttttctcctaatatgctgtttccattatgacacagcagctcctttgtaagtaccaggtcatgtccatcccttggtaaccatttcttttgtttaaataaataaataagtaaataaagctagttctattgaaatgcaaaaaaaaaata

SEQ ID NO: 63171 - DNA, 791 bp, Homo sapiens
  misc_feature (368)..(368): n is a, c, g, or t
  misc_feature (415)..(415): n is a, c, g, or t
agcgggccggctgcgagactggggccgtggctgctggtcccgggtgatgctaggcggctccctgggctccaggctgttgcggggtgtaggtgggagtcacggacggttcggggcccgaggtgtccgcgaaggtggcgcagccatggcggcaggggagagcatggctcagcggatggtctgggtggacctggagatgacaggattggacattgagaaggaccagattattgagatggcctgtctgataactgactctgatctcaacattttggctgaaggtcctaacctgattataaaacaaccagatgagttgctggacagcatgtcagattggtgtaaggagcatcacgggaagtctggccttaccnaggcagtgaagaagagtacaattacattgcagcaggcagagtatgantttctgtcctttgtacgacagcagactcctccagggctctgtccacttgcaggaaattcagttcatgaagataagaagtttcttgacaaatacatgccccagttcatgaaacatcttcattatagaataattgatgtgagcactgttaaagaactgtgcagacgctggtatccagaagaatatgaatttgcaccaaagaaggctgcttctcatagggcacttgatgacattagtgaaagcatcaaagagcttcagttttaccgaaataacatcttcaagaaaaaaatagatgaaaagaagtgggttaaaaatgccacacttaatataaacccatcctccccaagaggtaccttatttcttttaggtacctttgggg

SEQ ID NO: 63172 - DNA, 619 bp, Homo sapiens
tgggattttttacccggaatacctattttcccccaggaacccagtttttgccattttttcggatttttatccgcctccctattgggagatttgggccctcgagggccaagaattcggcacgaggatacatgtgccaccatgcctggataatttttgtaaagaccagggtttcaccatattggccaggctggtctcgaactcctggcctcaagtgatccacccaccttggccccccacagtgctgggattacaggtgtgggccactgcccctggcctagactgggcaattctagctgggtttggggaggccattgaggaggctggcattggaaacctgagccagggaagggcccggaggctggagtccagtatgtttagtaggtagaatcctcagaatgcggtgcctggcgcttagtactgagcgtggtccagaggagcacacgaaatactatttttctcctaatatgctgtttccattatgacacagcagctcctttgtaagtaccaggtcatgtccatcccttggtacatatatgcatttgcttttaaaccatttcttttgtttaaataaataaataagtaaataaagctagttctattgaaatgcaaaaaaaaaata

SEQ ID NO: 63173 - DNA, 870 bp, Homo sapiens
  misc_feature (368)..(368): n is a, c, g, or t
  misc_feature (415)..(415): n is a, c, g, or t
agcgggccggctgcgagactggggccgtggctgctggtcccgggtgatgctaggcggctccctgggctccaggctgttgcggggtgtaggtgggagtcacggacggttcggggcccgaggtgtccgcgaaggtggcgcagccatggcggcaggggagagcatggctcagcggatggtctgggtggacctggagatgacaggattggacattgagaaggaccagattattgagatggcctgtctgataactgactctgatctcaacattttggctgaaggtcctaacctgattataaaacaaccagatgagttgctggacagcatgtcagattggtgtaaggagcatcacgggaagtctggccttaccnaggcagtgaagaagagtacaattacattgcagcaggcagagtatgantttctgtcctttgtacgacagcagactcctccagggctctgtccacttgcaggaaattcagttcatgaagataagaagtttcttgacaaatacatgccccagttcatgaaacatcttcattatagaataattgatgtgagcactgttaaagaactgtgcagacgctggtatccagaagaatatgaatttgcaccaaagaaggctgcttctcatagagtttgagttctaccaagcgttttccagtctgacacacacttaactcccaaattcctgactgcttgaaataatgtcccttaactcttttttctcggggaaaagataaagttcaactagcataaacataacattcttttactgttaggaattctggtcaggattccagtgttccattctgagagggttatatagcctttattgctgtttcaaaactcttagatagcttggtttataggaat

SEQ ID NO: 63174 - DNA, 2369 bp, Homo sapiens
gctcagggcacatgcctcccctccccaggccgcggcccagctgaccctcggggctcccccggcagcggacagggaagggttaaaggcccccggctccctgccccctgccctggggaacccctggccctgtggggacatgaactgtgtttgccgcctggtcctggtcgtgctgagcctgtggccagatacagctgtcgcccctgggccaccacctggcccccctcgagtttccccagaccctcgggccgagctggacagcaccgtgctcctgacccgctctctcctggcggacacgcggcagctggctgcacagctgagggacaaattcccagctgacggggaccacaacctggattccctgcccaccctggccatgagtgcgggggcactgggagctctacagctcccaggtgtgctgacaaggctgcgagcggacctactgtcctacctgcggcacgtgcagtggctgcgccgggcaggtggctcttccctgaagaccctggagcccgagctgggcaccctgcaggcccgactggaccggctgctgcgccggctgcagctcctgatgtcccgcctggccctgccccagccacccccggacccgccggcgcccccgctggcgcccccctcctcagcctgggggggcatcagggccgcccacgccatcctgggggggctgcacctgacacttgactgggccgtgaggggactgctgctgctgaagactcggctgtgacccggggcccaaagccaccaccgtccttccaaagccagatcttatttatttatttatttcagtactgggggcgaaacagccaggtgatccccccgccattatctccccctagttagagacagtccttccgtgaggcctggggggcatctgtgccttatttatacttatttatttcaggagcaggggtgggaggcaggtggactcctgggtccccgaggaggaggggactggggtcccggattcttgggtctccaagaagtctgtccacagacttctgccctggctcttccccatctaggcctgggcaggaacatatattatttatttaagcaattacttttcatgttggggtggggacggaggggaaagggaagcctgggtttttgtacaaaaatgtgagaaacctttgtgagacagagaacagggaattaaatgtgtcatacatatccacttgagggcgatttgtctgagagctggggctggatgcttgggtaactggggcagggcaggtggaggggagacctccattcaggtggaggtcccgagtgggcggggcagcgactgggagatgggtcggtcacccagacagctctgtggaggcagggtctgagccttgcctggggccccgcactgcatagggccgtttgtttgttttttgagatggagtctcgctctgttgcctaggctggagtgcagtgaggcaatctaaggtcactgcaagctccacctcccgggttcaagcaattctcctgcctcagcctcccgattagctgggatcacaggtgtgcaccaccatgcccagctaattatttatttcttttgtatttttagtagagacagggtttcaccatgttggccaggctggtttcgaactcctgacctcaggtgatcctcctgcctcggcctcccaaagtgctgggattacaggtgtgagccaccacacctgacccataggtcttcaataaatatttaatggaaggttccacaagtcaccctgtgatcaacagtacccgtatgggacaaagctgcaaggtcaagatggttcattatggctgtgttcaccatagcaaactggaaagaatctagatatccaacagtgagggttaagcaacatggtgcatctgtggatagaacgccacccagccgcccggagcagggactgtcattcagggaggctaaggagagaggcttgcttgggatatagaaagatatcctgacattggccaggcatggtggctcacgcctgtaatcctggcactttgggaggacgaagcgagtggatcactgaagtccaagagtttgagaccggcctgcgagacatggcaaaaccctgtctcaaaaaagaaagaatgatgtcctgacatgaaacagcaggctacaaaaccactgcatgctgtgatcccaattttgtgtttttctttctatatatggattaaaacaaaaatcctaaagggaaatacgccaaaatgttgacaatgactgtctccaggtcaaaggagagaggtgggattgtgggtgacttttaatgtgtatgattgtctgtattttacagaatttctgccatgactgtgtattttgcatgacacattttaaaaataataaacactatttttagaataacagaaaaaaaacc

SEQ ID NO: 63175 - DNA, 1901 bp, Homo sapiens
gctcagggcacatgcctcccctccccaggccgcggcccagctgaccctcggggctcccccggcagcggacagggaagggttaaaggcccccggctccctgccccctgccctggggaacccctggccctgtggggacatgaactgtgtttgccgcctggtcctggtcgtgctgagcctgtggccagatacagctgtcgcccctgggccaccacctggcccccctcgagtttccccagaccctcgggccgagctggacagcaccgtgctcctgacccgctctctcctggcggacacgcggcagctggctgcacagctgagggacaaattcccagctgacggggaccacaacctggattccctgcccaccctggccatgagtgcgggggcactgggagctctacagctcccaggtgtgctgacaaggctgcgagcggacctactgtcctacctgcggcacgtgcagtggctgcgccgggcaggtggctcttccctgaagaccctggagcccgagctgggcaccctgcaggcccgactggaccggctgctgcgccggctgcagctcctgatgtcccgcctggccctgccccagccacccccggacccgccggcgcccccgctggcgcccccctcctcagcctgggggggcatcagggccgcccacgccatcctgggggggctgcacctgacacttgactgggccgtgaggggactgctgctgctgaagactcggctgtgacccggggcccaaagccaccaccgtccttccaaagccagatcttatttatttatttatttcagtactgggggcgaaacagccaggtgatccccccgccattatctccccctagttagagacagtccttccgtgaggcctggggggcatctgtgccttatttatacttatttatttcaggagcaggggtgggaggcaggtggactcctgggtccccgaggaggaggggactggggtcccggattcttgggtctccaagaagtctgtccacagacttctgccctggctcttccccatctaggcctgggcaggaacatatattatttatttaagcaattacttttcatgttggggtggggacggaggggaaagggaagcctgggtttttgtacaaaaatgtgagaaacctttgtgagacagagaacagggaattaaatgtgtcatacatatccacttgagggcgatttgtctgagagctggggctggatgcttgggtaactggggcagggcaggtggaggggagacctccattcaggtggaggtcccgagtgggcggggcagcgactgggagatgggtcggtcacccagacagctctgtggaggcagggtctgagccttgcctggggccccgcactgcatagggccgtttgtttgttttttgagatggagtctcgctctgttgcctaggctggagtgcagtgaggcaatctaaggtcactgcaagctccacctcccgggttcaagcaattctcctgcctcagcctcccgattagctgggatcacaggtgtgcaccaccatgcccagctaattatttatttcttttgtatttttagtagagaccggcctgcgagacatggcaaaaccctgtctcaaaaaagaaagaatgatgtcctgacatgaaacagcaggctacaaaaccactgcatgctgtgatcccaattttgtgtttttctttctatatatggattaaaacaaaaatcctaaagggaaatacgccaaaatgttgacaatgactgtctccaggtcaaaggagagaggtgggattgtgggtgacttttaatgtgtatgattgtctgtattttacagaatttctgccatgactgtgtattttgcatgacacattttaaaaataataaacactatttttagaataacagaaaaaaaacc

SEQ ID NO: 63176 - DNA, 1185 bp, Homo sapiens
gctcagggcacatgcctcccctccccaggccgcggcccagctgaccctcggggctcccccggcagcggacagggaagggttaaaggcccccggctccctgccccctgccctggggaacccctggccctgtggggacatgaactgtgtttgccgcctggtcctggtcgtgctgagcctgtggccagatacagctgtcgcccctgggccaccacctggcccccctcgagtttccccagaccctcgggccgagctggacagcaccgtgctcctgacccgctctctcctggcggacacgcggcagctggctgcacagctgagggacaaattcccagctgacggggaccacaacctggattccctgcccaccctggccatgagtgcgggggcactgggagctctacagctcccaggtgtgctgacaaggctgcgagcggacctactgtcctacctgcggcacgtgcagtggctgcgccgggcaggtggctcttccctgaagaccctggagcccgagctgggcaccctgcaggcccgactggaccggctgctgcgccggctgcagctcctgatgtcccgcctggccctgccccagccacccccggacccgccggcgcccccgctggcgcccccctcctcagcctgggggggcatcagggccgcccacgccatcctgggggggctgcacctgacacttgactgggccgtgaggggactgctgctgctgaagactcggctgtgacccggggcccaaagccaccaccgtccttccaaagccagatcttatttatttatttatttcagtactgggggcgaaacagccaggtgatccccccgccattatctccccctagttagagacagtccttccgtgaggcctggggggcatctgtgccttatttatacttatttatttcaggagcaggggtgggaggcaggtggactcctgggtccccgaggaggaggggactggggtcccggattcttgggtctccaagaagtctgtccacagacttctgccctggctcttccccatctaggcctgggcaggaacatatattatttatttaagcaattacttttcatgttggggtggggacggaggggaaagggaagcctgggtttttgtacaaaaatgtgagaaacctttgtgagacagagaacagggaattaaatgtgtcatacatatcc

SEQ ID NO: 63177 - DNA, 1186 bp, Homo sapiens
aagggaggggctgtgtttccatctcaaagaaggcatttgcagggtcctcttctgggcctgaccaaacagccaactagcccctggggtggccaccagtatgacagtattatacgctggcaacacagaggcagcccgcacacctgcgcctgggtgttgagagccatcctgcaagtctttttcaacagaacttcacagactgttagagctgctgagaagaatttgctttccgaattcagcctggaaggcgcccagggacagctgtactgagtctagatgactctgacccccgccccaggtcaaggccagcagagcagtcagtgcctctggagaaggcccttgctctcccacctggcccagactccgaggagcctgggtctggagctgccggtctggttcttccctttagagcccggatctgccacctgcggcccctcccaagccgtgaaccagctcatgagagatgaacactgtgggatccactcaggaaggctcggggctggcacaaaggaccacccagcattgccctgtgccacccagcactcagtggacattctggggacctgccttcagccttttcctgccctgtgcctgacatcagcaccctggctggtcagaatgccgccctcccagaggagcagccgagagatcccctgaaggctggaggcattctgctcaggacccctatcccagctcacagtgcccaaccatctcaccaggagaaagagccacatccccacgttaggaccacggagactgaccaccaccctgaccccccaaacccacgcaccagacgcttgcaggacaggcgccgcgcagcgggcaggggcttgcccggccgaccctcccctccccacctcccccactgcgcgttactccaggatatgccgagtgcacgtataaggtcatcttcgtcgtccccgtggacctcccccttcctctgcacgtcgtccaacgtgggactggcgtgtcgggcttccctgggaggatctggaggttgttctctgcagagaaccagcctggctcctggcgcgcacctctgctcccttctcctcactacccacccacgcatgtaccgggaaaaaaactactatgcccttctagaccatgttctgagaaaagatcgaaaatatttaacaagagataataataaatctgatgccggtctttgtgtgtgttgcggaaaaaa

SEQ ID NO: 63178 - DNA, 1068 bp, Homo sapiens
aagggaggggctgtgtttccatctcaaagaaggcatttgcagggtcctcttctgggcctgaccaaacagccaactagcccctggggtggccaccagtatgacagtattatacgctggcaacacagaggcagcccgcacacctgcgcctgggtgttgagagccatcctgcaagtctttttcaacagaacttcacagactgttagagctgctgagaagaatttgctttccgaattcagcctggaaggcgcccagggacagctgtactgagtctagatgactctgacccccgccccaggtcaaggccagcagagcagtcagtgcctctggagaaggcccttgctctcccacctggcccagactccgaggagcctgggtctggagctgccggtctggttcttccctttagagcccggatctgccacctgcggcccctcccaagccgtgaaccagctcatgagagatgaacactgtgggatccactcaggaaggctcggggctggcacaaaggaccacccagcattgccctgtgccacccagcactcagtggacattctggggacctgccttcagccttttcctgccctgtgcctgacatcagcaccctggctggtcagaatgccgccctcccagaggagcagccgagagatcccctgaaggctggaggcattctgctcaggacccctatcccagctcacagtgcccaaccatctcaccaggagaaagagccacaccccacctcccccactgcgcgttactccaggatatgccgagtgcacgtataaggtcatcttcgtcgtccccgtggacctcccccttcctctgcacgtcgtccaacgtgggactggcgtgtcgggcttccctgggaggatctggaggttgttctctgcagagaaccagcctggctcctggcgcgcacctctgctcccttctcctcactacccacccacgcatgtaccgggaaaaaaactactatgcccttctagaccatgttctgagaaaagatcgaaaatatttaacaagagataataataaatctgatgccggtctttgtgtgtgttgcggaaaaaa

SEQ ID NO: 63179 - DNA, 236 bp, Homo sapiens
attttaagctgataacaacttagcattgttttcaaagacaaacgagctaaaaaaaagactaataaagacttttaagccttaacttcatcccccatattttaaaaattttcctgtgactatttatatctaattatactatgtattgaagagttgttgtagttattattttttattggtttatagtttagtctttctacttaagatacttacacaccacagttagagcattataatat

SEQ ID NO: 63180 - DNA, 248 bp, Homo sapiens
ccacatcatatccatttgctcattggactacttcaaaagagaagctctaaggacatccaaagatcctaagtgaaaaatcaccctggctgcacgggtcaagccaggacacagggccaaaggtcggtcagcactgacacgctgagcccaggcgtttgctttccagatgagacctgcaccgctggaccagcaatgtagcagaggcagcaggaagagggagatggagccaaagggtttctggacaggcggtt

SEQ ID NO: 63181 - DNA, 306 bp, Homo sapiens
ccaagcccgtctccctcaaggaattgggaagacctggaaaaccatgctcatcaaatttcctctagcactagcctgctgtctcctgatattcttcactaaaaatggatcctttgtgcttatcatagtaatggtgacttctagaaaatgtaagcgatgaatgttcttttttgccaagcctccagctcagttcgctaaaggaatttttcaggatcatcagaaggaatcggaaaaaacagatgctttcagagacttgaattaagtatccttgcaacaaccaggcaataaagttgaatgtagtttttagac

SEQ ID NO: 63182 - DNA, 646 bp, Homo sapiens
agacagtgctagtgttatcagcatacaatagaaagctgtaaccatgttagctaatgagatagccagtgaaaagaaggacgatgatgtgattttaaaaatagaagaaaaggaacctaaatcagaactaagaaaagatagtggtaggaaatggatgcaaaaggataagagtttcagaataagaaaatggccagcattttcatttacttcagcaggtggaagtaagaaataattctttgggttgtgaaattttgtagtattgatggtttttaaggggttcagtgaaagtgagaagtaacggggtggtatttttgagagggactgtttagaacagtggggagttccattgaagtggtagaggtggaggcattaatactactctttcaagaagaaaatctcaagaaaaccaaagaaataaaggttaaccaagctttggatgaggcactagcacattttgtctcaagcatgtcaggttcaattattagtatcacccacacctcttattaagctaggtaggtcacttactgggaggtggttttgcctctgctaattgcacattagcaaatccatgccactgcatgtcactgttacttctcagatgttagttaactagaaacaatacaaatatctgatagtactctgtctcaaa

SEQ ID NO: 63183 - DNA, 432 bp, Homo sapiens
atcctctttctgtcacattgcagacatcaagccaaagtgacttgttcaactcctgttttgatgtcgaagatatcacatactttgaaaatgatttctgattattttccccatagtcttgccatctttaaaaatagtttttcaagtgaattctagctctcacccacctttcctgaagtgcgtggctttttgtaattactaaaaatgactatttctttataaccagagaaataaaatgccagaatgttaataactgattatattacataaattcattttagatctctgaattatctagattccaaaaatcactgaccatagaacattaaattattgaaagtatgtctggacatatctttaaatcatgaaatcaagtgagttttggagtgatcctaaggtatactaaacattttgtttagtttgtgatattaattt

SEQ ID NO: 63184 - DNA, 343 bp, Homo sapiens
tcttttgtgatggaagtggctcacatcacttacttatattacccactaggctccaagcatttatgtttgcaattcctgaaccaaataagtgcattagatatatatcaaaggtgaacctgattataggggttggtgtgggaagtctcttgaagaacgagagggctaaaggagttttaaagaaatggaacacaaaaaagaaaatggattgttcaatctacacagtgccaactgtttgggaaaacacttggaatcaaataagtgtgcagtgtctttagagatgtaatacaaatatgatgctgaaaggaacattatgtatttagagaatagtaatatgtaaagatgg

SEQ ID NO: 63185 - DNA, 2548 bp, Homo sapiens
  misc_feature (1)..(1): n is a, c, g, or t
  misc_feature (3)..(4): n is a, c, g, or t
  misc_feature (7)..(7): n is a, c, g, or t
  misc_feature (9)..(10): n is a, c, g, or t
ncnngcntnntgctgtgcaggagtcggcagctggcgccagggcggccggaggatgccgaggggccggagccgggcgggcccgaggccgaggcgcactctacccccagctcctaccctgtaagccccgccagcctccggacgtgctgtccctgggcccgtcgccctctgggctcccgccggaactccttcactctcagaggccgagtccctcccctccccacggctgcgtgtggccgttgccgtctgcacccagaccctgagccgccgccgccggccatggaggtggcgccggagcagccgcgctggatggcgcacccggccgtgctgaatgcgcagcaccccgactcacaccacccgggcctggcgcacaactacatggaacccgcgcagctgctgcctccagacgaggtggacgtcttcttcaatcacctcgactcgcagggcaacccctactatgccaaccccgctcacgcgcgggcgcgcgtctcctacagccccgcgcacgcccgcctgaccggaggccagatgtgccgcccacacttgttgcacagcccgggtttgccctggctggacgggggcaaagcagccctctctgccgctgcggcccaccaccacaacccctggaccgtgagccccttctccaagacgccactgcacccctcagctgctggaggccctggaggcccactctctgtgtacccaggggctgggggtgggagcgggggaggcagcgggagctcagtggcctccctcacccctacagcagcccactctggctcccaccttttcggcttcccacccacgccacccaaagaagtgtctcctgaccctagcaccacgggggctgcgtctccagcctcatcttccgcggggggtagtgcagcccgaggagaggacaaggacggcgtcaagtaccaggtgtcactgacggagagcatgaagatggaaagtggcagtcccctgcgcccaggcctagctactatgggcacccagcctgctacacaccaccccatccccacctacccctcctatgtgccggcggctgcccacgactacagcagcggactcttccaccccggaggcttcctggggggaccggcctccagcttcacccctaagcagcgcagcaaggctcgttcctgttcagaaggccgggagtgtgtcaactgtggggccacagccacccctctctggcggcgggacggcaccggccactacctgtgcaatgcctgtggcctctaccacaagatgaatgggcagaaccgaccactcatcaagcccaagcgaagactgacgacaaccaccaccttatggcgccgaaacgccaacggggaccctgtctgcaacgcctgtggcctctactacaagctgcacaatgttaacaggccactgaccatgaagaaggaagggatccagactcggaaccggaagatgtccaacaagtccaagaagagcaagaaaggggcggagtgcttcgaggagctgtcaaagtgcatgcaggagaagtcatcccccttcagtgcagctgccctggctggacacatggcacctgtgggccacctcccgcccttcagccactccggacacatcctgcccactccgacgcccatccacccctcctccagcctctccttcggccacccccacccgtccagcatggtgaccgccatgggctagggaacagatggacgtcgaggaccgggcactcccgggatgggtggaccaaacccttagcagcccagcatttcccgaaggccgacaccactcctgccagcccggctcggcccagcaccccctctcctggagggcgcccagcagcctgccagcagttactgtgaatgttccccaccgctgagaggctgcctccgcacctgaccgctgcccaggtggggtttcctgcatggacagttgtttggagaacaacaaggacaactttatgtagagaaaaggaggggacgggacagacgaaggcaaccatttttagaaggaaaaaggattaggcaaaaataatttattttgctcttgtttctaacaaggacttggagacttggtggtctgagctgtcccaagtcctccggttcttcctcgggattggcgggtccacttgccagggctctgggggcagatttgtggggacctcagcctgcaccctcttctcctctggcttccctctctgaaatagccgaactccaggctgggctgagccaaagccagagtggccacggcccagggagggtgagctggtgcctgctttgacgggccaggccctggagggcagagacaatcacgggcggtcctgcacagattcccaggccagggctgggtcacaggaaggaaacaacattttcttgaaaggggaaacgtctcccagatcgctcccttggctttgaggccgaagctgctgtgactgtgtccccttactgagcgcaagccacagcctgtcttgtcaggtggaccctgtaaatacatcctttttctgctaacccttcaaccccctcgcctcctactctgagacaaaagaaaaaatattaaaaaaatgcataggctt

SEQ ID NO: 63186 - DNA, 262 bp, Homo sapiens
aaccgtaaccctggcctccagcttcacccctaagcagcgcatcaaggctcgttcctgttcctgttcagaaggccgggagtgtgtcaactgtggggccacagccacccctctctggcggcgggacggcaccggccactacctgtgcaatgcctgtggcctctaccacaagatgaatgggcagaaccgaccactcatcaagcccaagcgaagactgtttgcgccgcctgaagagccgcacatactgccgatttcagacgcaacc

SEQ ID NO: 63187 - DNA, 3440 bp, Homo sapiens
  misc_feature (1)..(1): n is a, c, g, or t
  misc_feature (3)..(4): n is a, c, g, or t
  misc_feature (7)..(7): n is a, c, g, or t
  misc_feature (9)..(10): n is a, c, g, or t
  misc_feature (3390)..(3390): n is a, c, g, or t
  misc_feature (3437)..(3437): n is a, c, g, or t
ncnngcntnntgctgtgcaggagtcggcagctggcgccagggcggccggaggatgccgaggggccggagccgggcgggcccgaggccgaggcgcactctacccccagctcctaccctgtaagccccgccagcctccggacgtgctgtccctgggcccgtcgccctctgggctcccgccggaactccttcactctcagaggccgagtccctcccctccccacggctgcgtgtggccgttgccgtctgcacccagaccctgagccgccgccgccggccatggaggtggcgccggagcagccgcgctggatggcgcacccggccgtgctgaatgcgcagcaccccgactcacaccacccgggcctggcgcacaactacatggaacccgcgcagctgctgcctccagacgaggtggacgtcttcttcaatcacctcgactcgcagggcaacccctactatgccaaccccgctcacgcgcgggcgcgcgtctcctacagccccgcgcacgcccgcctgaccggaggccagatgtgccgcccacacttgttgcacagcccgggtttgccctggctggacgggggcaaagcagccctctctgccgctgcggcccaccaccacaacccctggaccgtgagccccttctccaagacgccactgcacccctcagctgctggaggccctggaggcccactctctgtgtacccaggggctgggggtgggagcgggggaggcagcgggagctcagtggcctccctcacccctacagcagcccactctggctcccaccttttcggcttcccacccacgccacccaaagaagtgtctcctgaccctagcaccacgggggctgcgtctccagcctcatcttccgcggggggtagtgcagcccgaggagaggacaaggacggcgtcaagtaccaggtgtcactgacggagagcatgaagatggaaagtggcagtcccctgcgcccaggcctagctactatgggcacccagcctgctacacaccaccccatccccacctacccctcctatgtgccggcggctgcccacgactacagcagcggactcttccaccccggaggcttcctggggggaccggcctccagcttcacccctaagcagcgcagcaaggctcgttcctgttcagaaggccgggagtgtgtcaactgtggggccacagccacccctctctggcggcgggacggcaccggccactacctgtgcaatgcctgtggcctctaccacaagatgaatgggcagaaccgaccactcatcaagcccaagcgaagactgtcggccgccagaagagccggcacctgttgtgcaaattgtcagacgacaaccaccaccttatggcgccgaaacgccaacggggaccctgtctgcaacgcctgtggcctctactacaagctgcacaatgttaacaggccactgaccatgaagaaggaagggatccagactcggaaccggaagatgtccaacaagtccaagaagagcaagaaaggggcggagtgcttcgaggagctgtcaaagtgcatgcaggagaagtcatcccccttcagtgcagctgccctggctggacacatggcacctgtgggccacctcccgcccttcagccactccggacacatcctgcccactccgacgcccatccacccctcctccagcctctccttcggccacccccacccgtccagcatggtgaccgccatgggctagggaacagatggacgtcgaggaccgggcactcccgggatgggtggaccaaacccttagcagcccagcatttcccgaaggccgacaccactcctgccagcccggctcggcccagcaccccctctcctggagggcgcccagcagcctgccagcagttactgtgaatgttccccaccgctgagaggctgcctccgcacctgaccgctgcccaggtggggtttcctgcatggacagttgtttggagaacaacaaggacaactttatgtagagaaaaggaggggacgggacagacgaaggcaaccatttttagaaggaaaaaggattaggcaaaaataatttattttgctcttgtttctaacaaggacttggagacttggtggtctgagctgtcccaagtcctccggttcttcctcgggattggcgggtccacttgccagggctctgggggcagatttgtggggacctcagcctgcaccctcttctcctctggcttccctctctgaaatagccgaactccaggctgggctgagccaaagccagagtggccacggcccagggagggtgagctggtgcctgctttgacgggccaggccctggagggcagagacaatcacgggcggtcctgcacagattcccaggccagggctgggtcacaggaaggaaacaacattttcttgaaaggggaaacgtctcccagatcgctcccttggctttgaggccgaagctgctgtgactgtgtccccttactgagcgcaagccacagcctgtcttgtcaggtggaccctgtaaatacatcctttttctgctaacccttcaaccccctcgcctcctactctgagacaaaagaaaaaatattaaaaaaatgcataggcttaactcgctgatgagttaattgttttatttttaaactctttttgggtccagttgattgtacgtagccacaggagccctgctatgaaaggaataaaacctacacacaaggttggagctttgcaattctttttggaaaagagctgggatcccacagccctagtatgaaagctgggggtggggaggggcctttgctgcccttggtttctgggggctggttggcatttgctggcctggcagggggtgaaggcaggagttgggggcaggtcaggaccaggacccagggagaggctgtgtccctgctggggtctcaggtccagctttactgtggctgtctggatccttcccaaggtacagctgtatataaacgtgtcccgagcttagattctgtatgcggtgacggcggggtgtggtggcctgtgaggggcccctggcccaggaggaggattgtgctgatgtagtgaccaagtgcaatatgggcgggcagtcgctgcagggagcaccacggccagaagtaacttattttgtactagtgtccgcataagaaaaagaatcggcagtattttctgtttttatgttttatttggcttgttttattttggattagtgaactaagttattgttaattatgtacaacatttatatattgtctgtaaaaaatgtatgctatcctcttattcctttaaagtgagtactgttaagaataataaaatactttttgtgaatgcccgccaaaaaaaaaaaaaaaagcggcgcccaatttcgacgcggcgcgaatcctgcagccggggtcactagtctaancggcgcaccgcgtggagcccagctttgttccctagtgaggttcgctngcg

SEQ ID NO: 63188 - DNA, 3133 bp, Homo sapiens
  misc_feature (1)..(1): n is a, c, g, or t
  misc_feature (3)..(4): n is a, c, g, or t
  misc_feature (7)..(7): n is a, c, g, or t
  misc_feature (9)..(10): n is a, c, g, or t
  misc_feature (3083)..(3083): n is a, c, g, or t
  misc_feature (3130)..(3130): n is a, c, g, or t
ncnngcntnntgctgtgcaggagtcggcagctggcgccagggcggccggaggatgccgaggggccggagccgggcgggcccgaggccgaggcgcactctacccccagctcctaccctgtaagccccgccagcctccggacgtgctgtccctgggcccgtcgccctctgggctcccgccggaactccttcactctcagaggccgagtccctcccctccccacggctgcgtgtggccgttgccgtctgcacccagaccctgagccgccgccgccggccatggaggtggcgccggagcagccgcgctggatggcgcacccggccgtgctgaatgcgcagcaccccgactcacaccacccgggcctggcgcacaactacatggaacccgcgcagctgctgcctccagacgaggtggacgtcttcttcaatcacctcgactcgcagggcaacccctactatgccaaccccgctcacgcgcgggcgcgcgtctcctacagccccgcgcacgcccgcctgaccggaggccagatgtgccgcccacacttgttgcacagcccgggtttgccctggctggacgggggcaaagcagccctctctgccgctgcggcccaccaccacaacccctggaccgtgagccccttctccaagacgccactgcacccctcagctgctggaggccctggaggcccactctctgtgtacccaggggctgggggtgggagcgggggaggcagcgggagctcagtggcctccctcacccctacagcagcccactctggctcccaccttttcggcttcccacccacgccacccaaagaagtgtctcctgaccctagcaccacgggggctgcgtctccagcctcatcttccgcggggggtagtgcagcccgaggagaggacaaggacggcgtcaagtaccaggtgtcactgacggagagcatgaagatggaaagtggcagtcccctgcgcccaggcctagctactatgggcacccagcctgctacacaccaccccatccccacctacccctcctatgtgccggcggctgcccacgactacagcagcggactcttccaccccggaggcttcctggggggaccggcctccagcttcacccctaagcagcgcagcaaggctcgttcctgttcagaaggccgggagtgtgtcaactgtggggccacagccacccctctctggcggcgggacggcaccggccactacctgtgcaatgcctgtggcctctaccacaagatgaatgggcagaaccgaccactcatcaagcccaagcgaagactgtcggccgccagaagagccggcacctgttgtgcaaattgtcagacgacaaccaccaccttatggcgccgaaacgccaacggggaccctgtctgcaacgcctgtggcctctactacaagctgcacaatgttaacaggccactgaccatgaagaaggaagggatccagactcggaaccggaagatgtccaacaagtccaagaagagcaagaaaggggcggagtgcttcgaggagctgtcaaagtgcatgcaggagaagtcatcccccttcagtgcagctgccctggctggacacatggcacctgtgggccacctcccgcccttcagccactccggacacatcctgcccactccgacgcccatccacccctcctccagcctctccttcggccacccccacccgtccagcatggtgaccgccatgggctagggaacagatggacgtcgaggaccgggcactcccgggatgggtggaccaaacccttagcagcccagcatttcccgaaggccgacaccactcctgccagcccggctcggcccagcaccccctctcctggagggcgcccagcagcctgccagcagttactgtgaatgttccccaccgctgagaggctgcctccgcacctgaccgctgcccaggtggggtttcctgcatggacagttgtttggagaacaacaaggacaactttatgtagagaaaaggaggggacgggacagacgaaggcaaccatttttagaaggaaaaaggattaggcaaaaataatttattttgctcttgtttctaacaaggacttggagacttggtggtctgagctgtcccaagtcctccggttcttcctcgggattggcgggtccacttgccagggctctgggggcagatttgtggggacctcagcctgcaccctcttctcctctggcttccctctctgaaatagccgaactccaggctgggctgagccaaagccagagtggccacggcccagggagggtgagctggtgcctgctttgacgggccaggccctggagggcagagacaatcacgggcggtcctgcaggaattcgagctcggtaccctgcaacagattcccaggccagggctgggtcacaggaaggaaacaacattttcttgaaaggggaaacgtctcccagatcgctcccttggctttgaggccgaagctgctgtgactgtgtccccttactgagcgcaagccacagcctgtcttgtcaggtggaccctgtaaatacatcctttttctgctaacccttcaaccccgggagaggctgtgtccctgctggggtctcaggtccagctttactgtggctgtctggatccttcccaaggtacagctgtatataaacgtgtcccgagcttagattctgtatgcggtgacggcggggtgtggtggcctgtgaggggcccctggcccaggaggaggattgtgctgatgtagtgaccaagtgcaatatgggcgggcagtcgctgcagggagcaccacggccagaagtaacttattttgtactagtgtccgcataagaaaaagaatcggcagtattttctgtttttatgttttatttggcttgttttattttggattagtgaactaagttattgttaattatgtacaacatttatatattgtctgtaaaaaatgtatgctatcctcttattcctttaaagtgagtactgttaagaataataaaatactttttgtgaatgcccgccaaaaaaaaaaaaaaaagcggcgcccaatttcgacgcggcgcgaatcctgcagccggggtcactagtctaancggcgcaccgcgtggagcccagctttgttccctagtgaggttcgctngcg

SEQ ID NO: 63189 - DNA, 4052 bp, Homo sapiens
  misc_feature (4002)..(4002): n is a, c, g, or t
  misc_feature (4049)..(4049): n is a, c, g, or t
gcgtgtgctcacagctcctgagggtccccggggagagtctcagtaaagacgtgtcccaagctttctgagcaagcatccctgaggtcaggggcgcgcgtgtgcgctccggagagggtgggagcggcctggagtgtggatgcacagggtgtgcgcgccctgagtgcctagcggcccttggccggccaggcggctggacctggtaggccgggtgcagagccccgggtaccctcctgccccctgcggcgctcccgcccccgtcgccaccccctgcccccccgcaaagtgatgtcgaaataaaaagccgcgttgcggccggtgggggagagagaggcagcgtgagcgccaggaaggtagcgaggccagcgtcgccccgggactcgctgctcaagtctgtctattgcctgccgccacatccatcctagcagggccccgtcgcccaccaggcggacaaaagcggtccgctgaacaccatgcggccgctcggcgtgccgcccaggctctgctggtgagcgccgccaccccgcgcccaggtcccgcgagcccgcctgccgcgcacctcgccctgctcccagctctactccaggccccgtccgcccgggggcgccgcccaccgcgcctcgctcggcttgaactccgcgttgctccaaccacgaggggaaaggccccgcgttcagggaccccgtgtgtggcgaacgctcctttaccggaaaacaaggaaggaaattcgttgttttggaaaaagcctcctctcccgaggtcgggaacatctggtggtgagctccaggtctacgcaggcaccccgtgctaggattcgtttatgagcaggcaggattcgagaaccagggccgttgccgtctgcacccagaccctgagccgccgccgccggccatggaggtggcgccggagcagccgcgctggatggcgcacccggccgtgctgaatgcgcagcaccccgactcacaccacccgggcctggcgcacaactacatggaacccgcgcagctgctgcctccagacgaggtggacgtcttcttcaatcacctcgactcgcagggcaacccctactatgccaaccccgctcacgcgcgggcgcgcgtctcctacagccccgcgcacgcccgcctgaccggaggccagatgtgccgcccacacttgttgcacagcccgggtttgccctggctggacgggggcaaagcagccctctctgccgctgcggcccaccaccacaacccctggaccgtgagccccttctccaagacgccactgcacccctcagctgctggaggccctggaggcccactctctgtgtacccaggggctgggggtgggagcgggggaggcagcgggagctcagtggcctccctcacccctacagcagcccactctggctcccaccttttcggcttcccacccacgccacccaaagaagtgtctcctgaccctagcaccacgggggctgcgtctccagcctcatcttccgcggggggtagtgcagcccgaggagaggacaaggacggcgtcaagtaccaggtgtcactgacggagagcatgaagatggaaagtggcagtcccctgcgcccaggcctagctactatgggcacccagcctgctacacaccaccccatccccacctacccctcctatgtgccggcggctgcccacgactacagcagcggactcttccaccccggaggcttcctggggggaccggcctccagcttcacccctaagcagcgcagcaaggctcgttcctgttcagaaggccgggagtgtgtcaactgtggggccacagccacccctctctggcggcgggacggcaccggccactacctgtgcaatgcctgtggcctctaccacaagatgaatgggcagaaccgaccactcatcaagcccaagcgaagactgtcggccgccagaagagccggcacctgttgtgcaaattgtcagacgacaaccaccaccttatggcgccgaaacgccaacggggaccctgtctgcaacgcctgtggcctctactacaagctgcacaatgttaacaggccactgaccatgaagaaggaagggatccagactcggaaccggaagatgtccaacaagtccaagaagagcaagaaaggggcggagtgcttcgaggagctgtcaaagtgcatgcaggagaagtcatcccccttcagtgcagctgccctggctggacacatggcacctgtgggccacctcccgcccttcagccactccggacacatcctgcccactccgacgcccatccacccctcctccagcctctccttcggccacccccacccgtccagcatggtgaccgccatgggctagggaacagatggacgtcgaggaccgggcactcccgggatgggtggaccaaacccttagcagcccagcatttcccgaaggccgacaccactcctgccagcccggctcggcccagcaccccctctcctggagggcgcccagcagcctgccagcagttactgtgaatgttccccaccgctgagaggctgcctccgcacctgaccgctgcccaggtggggtttcctgcatggacagttgtttggagaacaacaaggacaactttatgtagagaaaaggaggggacgggacagacgaaggcaaccatttttagaaggaaaaaggattaggcaaaaataatttattttgctcttgtttctaacaaggacttggagacttggtggtctgagctgtcccaagtcctccggttcttcctcgggattggcgggtccacttgccagggctctgggggcagatttgtggggacctcagcctgcaccctcttctcctctggcttccctctctgaaatagccgaactccaggctgggctgagccaaagccagagtggccacggcccagggagggtgagctggtgcctgctttgacgggccaggccctggagggcagagacaatcacgggcggtcctgcacagattcccaggccagggctgggtcacaggaaggaaacaacattttcttgaaaggggaaacgtctcccagatcgctcccttggctttgaggccgaagctgctgtgactgtgtccccttactgagcgcaagccacagcctgtcttgtcaggtggaccctgtaaatacatcctttttctgctaacccttcaaccccctcgcctcctactctgagacaaaagaaaaaatattaaaaaaatgcataggcttaactcgctgatgagttaattgttttatttttaaactctttttgggtccagttgattgtacgtagccacaggagccctgctatgaaaggaataaaacctacacacaaggttggagctttgcaattctttttggaaaagagctgggatcccacagccctagtatgaaagctgggggtggggaggggcctttgctgcccttggtttctgggggctggttggcatttgctggcctggcagggggtgaaggcaggagttgggggcaggtcaggaccaggacccagggagaggctgtgtccctgctggggtctcaggtccagctttactgtggctgtctggatccttcccaaggtacagctgtatataaacgtgtcccgagcttagattctgtatgcggtgacggcggggtgtggtggcctgtgaggggcccctggcccaggaggaggattgtgctgatgtagtgaccaagtgcaatatgggcgggcagtcgctgcagggagcaccacggccagaagtaacttattttgtactagtgtccgcataagaaaaagaatcggcagtattttctgtttttatgttttatttggcttgttttattttggattagtgaactaagttattgttaattatgtacaacatttatatattgtctgtaaaaaatgtatgctatcctcttattcctttaaagtgagtactgttaagaataataaaatactttttgtgaatgcccgccaaaaaaaaaaaaaaaagcggcgcccaatttcgacgcggcgcgaatcctgcagccggggtcactagtctaancggcgcaccgcgtggagcccagctttgttccctagtgaggttcgctngcg

SEQ ID NO: 63190 - DNA, 3266 bp, Homo sapiens
  misc_feature (1)..(1): n is a, c, g, or t
  misc_feature (3)..(4): n is a, c, g, or t
  misc_feature (7)..(7): n is a, c, g, or t
  misc_feature (9)..(10): n is a, c, g, or t
  misc_feature (3216)..(3216): n is a, c, g, or t
  misc_feature (3263)..(3263): n is a, c, g, or t
ncnngcntnntgctgtgcaggagtcggcagctggcgccagggcggccggaggatgccgaggggccggagccgggcgggcccgaggccgaggcgcactctacccccagctcctaccctgtaagccccgccagcctccggacgtgctgtccctgggcccgtcgccctctgggctcccgccggaactccttcactctcagaggccgagtccctcccctccccacggctgcgtgtggccgttgccgtctgcacccagaccctgagccgccgccgccggccatggaggtggcgccggagcagccgcgctggatggcgcacccggccgtgctgaatgcgcagcaccccgactcacaccacccgggcctggcgcacaactacatggaacccgcgcagctgctgcctccagacgaggtggacgtcttcttcaatcacctcgactcgcagggcaacccctactatgccaaccccgctcacgcgcgggcgcgcgtctcctacagccccgcgcacgcccgcctgaccggaggccagatgtgccgcccacacttgttgcacagcccgggtttgccctggctggacgggggcaaagcagccctctctgccgctgcggcccaccaccacaacccctggaccgtgagccccttctccaagacgccactgcacccctcagctgctggaggccctggaggcccactctctgtgtacccaggggctgggggtgggagcgggggaggcagcgggagctcagtggcctccctcacccctacagcagcccactctggctcccaccttttcggcttcccacccacgccacccaaagaagtgtctcctgaccctagcaccacgggggctgcgtctccagcctcatcttccgcggggggtagtgcagcccgaggagaggacaaggacggcgtcaagtaccaggtgtcactgacggagagcatgaagatggaaagtggcagtcccctgcgcccaggcctagctactatgggcacccagcctgctacacaccaccccatccccacctacccctcctatgtgccggcggctgcccacgactacagcagcggactcttccaccccggaggcttcctggggggaccggcctccagcttcacccctaagcagcgcagcaaggctcgttcctgttcagaaggccgggagtgtgtcaactgtggggccacagccacccctctctggcggcgggacggcaccggccactacctgtgcaatgcctgtggcctctaccacaagatgaatgggcagaaccgaccactcatcaagcccaagcgaagactgtcggccgccagaagagccggcacctgttgtgcaaattgtcagacgacaaccaccaccttatggcgccgaaacgccaacggggaccctgtctgcaacgcctgtggcctctactacaagctgcacaatgttaacaggccactgaccatgaagaaggaagggatccagactcggaaccggaagatgtccaacaagtccaagaagagcaagaaaggggcggagtgcttcgaggagctgtcaaagtgcatgcaggagaagtcatcccccttcagtgcagctgccctggctggacacatggcacctgtgggccacctcccgcccttcagccactccggacacatcctgcccactccgacgcccatccaagcaccccctctcctggagggcgcccagcagcctgccagcagttactgtgaatgttccccaccgctgagaggctgcctccgcacctgaccgctgcccaggtggggtttcctgcatggacagttgtttggagaacaacaaggacaactttatgtagagaaaaggaggggacgggacagacgaaggcaaccatttttagaaggaaaaaggattaggcaaaaataatttattttgctcttgtttctaacaaggacttggagacttggtggtctgagctgtcccaagtcctccggttcttcctcgggattggcgggtccacttgccagggctctgggggcagatttgtggggacctcagcctgcaccctcttctcctctggcttccctctctgaaatagccgaactccaggctgggctgagccaaagccagagtggccacggcccagggagggtgagctggtgcctgctttgacgggccaggccctggagggcagagacaatcacgggcggtcctgcacagattcccaggccagggctgggtcacaggaaggaaacaacattttcttgaaaggggaaacgtctcccagatcgctcccttggctttgaggccgaagctgctgtgactgtgtccccttactgagcgcaagccacagcctgtcttgtcaggtggaccctgtaaatacatcctttttctgctaacccttcaaccccctcgcctcctactctgagacaaaagaaaaaatattaaaaaaatgcataggcttaactcgctgatgagttaattgttttatttttaaactctttttgggtccagttgattgtacgtagccacaggagccctgctatgaaaggaataaaacctacacacaaggttggagctttgcaattctttttggaaaagagctgggatcccacagccctagtatgaaagctgggggtggggaggggcctttgctgcccttggtttctgggggctggttggcatttgctggcctggcagggggtgaaggcaggagttgggggcaggtcaggaccaggacccagggagaggctgtgtccctgctggggtctcaggtccagctttactgtggctgtctggatccttcccaaggtacagctgtatataaacgtgtcccgagcttagattctgtatgcggtgacggcggggtgtggtggcctgtgaggggcccctggcccaggaggaggattgtgctgatgtagtgaccaagtgcaatatgggcgggcagtcgctgcagggagcaccacggccagaagtaacttattttgtactagtgtccgcataagaaaaagaatcggcagtattttctgtttttatgttttatttggcttgttttattttggattagtgaactaagttattgttaattatgtacaacatttatatattgtctgtaaaaaatgtatgctatcctcttattcctttaaagtgagtactgttaagaataataaaatactttttgtgaatgcccgccaaaaaaaaaaaaaaaagcggcgcccaatttcgacgcggcgcgaatcctgcagccggggtcactagtctaancggcgcaccgcgtggagcccagctttgttccctagtgaggttcgctngcg

SEQ ID NO: 63191 - DNA, 2366 bp, Homo sapiens
  misc_feature (2316)..(2316): n is a, c, g, or t
  misc_feature (2363)..(2363): n is a, c, g, or t
ctctagaggatcggctgctgctccctcttcaccctaagcagcttcagcaaggctcgttcctgttcctgttcagaaggccgggagtgtgtcaactgtggggccacagccacccctctctggcggcgggacggcaccggccactacctgtgcaatgcctgtggcctctaccacaagatgaatgggcagaaccgaccactcatcaagcccaagcgaagactgtcggccgccagaagagccggcacctgttgtgcaaattgtcagacgacaaccaccaccttatggcgccgaaacgccaacggggaccctgtctgcaacgcctgtggcctctactacaagctgcacaatgttaacaggccactgaccatgaagaaggaagggatccagactcggaaccggaagatgtccaacaagtccaagaagagcaagaaaggggcggagtgcttcgaggagctgtcaaagtgcatgcaggagaagtcatcccccttcagtgcagctgccctggctggacacatggcacctgtgggccacctcccgcccttcagccactccggacacatcctgcccactccgacgcccatccacccctcctccagcctctccttcggccacccccacccgtccagcatggtgaccgccatgggctagggaacagatggacgtcgaggaccgggcactcccgggatgggtggaccaaacccttagcagcccagcatttcccgaaggccgacaccactcctgccagcccggctcggcccagcaccccctctcctggagggcgcccagcagcctgccagcagttactgtgaatgttccccaccgctgagaggctgcctccgcacctgaccgctgcccaggtggggtttcctgcatggacagttgtttggagaacaacaaggacaactttatgtagagaaaaggaggggacgggacagacgaaggcaaccatttttagaaggaaaaaggattaggcaaaaataatttattttgctcttgtttctaacaaggacttggagacttggtggtctgagctgtcccaagtcctccggttcttcctcgggattggcgggtccacttgccagggctctgggggcagatttgtggggacctcagcctgcaccctcttctcctctggcttccctctctgaaatagccgaactccaggctgggctgagccaaagccagagtggccacggcccagggagggtgagctggtgcctgctttgacgggccaggccctggagggcagagacaatcacgggcggtcctgcacagattcccaggccagggctgggtcacaggaaggaaacaacattttcttgaaaggggaaacgtctcccagatcgctcccttggctttgaggccgaagctgctgtgactgtgtccccttactgagcgcaagccacagcctgtcttgtcaggtggaccctgtaaatacatcctttttctgctaacccttcaaccccctcgcctcctactctgagacaaaagaaaaaatattaaaaaaatgcataggcttaactcgctgatgagttaattgttttatttttaaactctttttgggtccagttgattgtacgtagccacaggagccctgctatgaaaggaataaaacctacacacaaggttggagctttgcaattctttttggaaaagagctgggatcccacagccctagtatgaaagctgggggtggggaggggcctttgctgcccttggtttctgggggctggttggcatttgctggcctggcagggggtgaaggcaggagttgggggcaggtcaggaccaggacccagggagaggctgtgtccctgctggggtctcaggtccagctttactgtggctgtctggatccttcccaaggtacagctgtatataaacgtgtcccgagcttagattctgtatgcggtgacggcggggtgtggtggcctgtgaggggcccctggcccaggaggaggattgtgctgatgtagtgaccaagtgcaatatgggcgggcagtcgctgcagggagcaccacggccagaagtaacttattttgtactagtgtccgcataagaaaaagaatcggcagtattttctgtttttatgttttatttggcttgttttattttggattagtgaactaagttattgttaattatgtacaacatttatatattgtctgtaaaaaatgtatgctatcctcttattcctttaaagtgagtactgttaagaataataaaatactttttgtgaatgcccgccaaaaaaaaaaaaaaaagcggcgcccaatttcgacgcggcgcgaatcctgcagccggggtcactagtctaancggcgcaccgcgtggagcccagctttgttccctagtgaggttcgctngcg

SEQ ID NO: 63192 - DNA, 818 bp, Homo sapiens
  misc_feature (768)..(768): n is a, c, g, or t
  misc_feature (815)..(815): n is a, c, g, or t
cccacgcgtccgcggacgcgtggggtacgtagccacaggagccctgctatgaaaggaataaaacctacacacaaggttggagctttgcaattctttttggaaaagagctgggatcccacagccctagtatgaaagctgggggtggggaggggcctttgctgcccttggtttctgggggctggttggcatttgctggcctggcagggggtgaaggcaggagttgggggcaggtcaggaccaggacccagggagaggctgtgtccctgctggggtctcaggtccagctttactgtggctgtctggatccttcccaaggtacagctgtatataaacgtgtcccgagcttagattctgtatgcggtgacggcggggtgtggtggcctgtgaggggcccctggcccaggaggaggattgtgctgatgtagtgaccaagtgcaatatgggcgggcagtcgctgcagggagcaccacggccagaagtaacttattttgtactagtgtccgcataagaaaaagaatcggcagtattttctgtttttatgttttatttggcttgttttattttggattagtgaactaagttattgttaattatgtacaacatttatatattgtctgtaaaaaatgtatgctatcctcttattcctttaaagtgagtactgttaagaataataaaatactttttgtgaatgcccgccaaaaaaaaaaaaaaaagcggcgcccaatttcgacgcggcgcgaatcctgcagccggggtcactagtctaancggcgcaccgcgtggagcccagctttgttccctagtgaggttcgctngcg

SEQ ID NO: 63193 - DNA, 722 bp, Homo sapiens
  misc_feature (672)..(672): n is a, c, g, or t
  misc_feature (719)..(719): n is a, c, g, or t
atcaggcgaatgatgtggcatggagtgatgcctagcagatctgtgagcagcttcacggggtggctttccccgcgtacctccctctcatgggagctctggttaccccactccactatcaggcgaagactgtggatcaggcgaagactgtggggggagaggctgtgtccctgctggggtctcaggtccagctttactgtggctgtctggatccttcccaaggtacagctgtatataaacgtgtcccgagcttagattctgtatgcggtgacggcggggtgtggtggcctgtgaggggcccctggcccaggaggaggattgtgctgatgtagtgaccaagtgcaatatgggcgggcagtcgctgcagggagcaccacggccagaagtaacttattttgtactagtgtccgcataagaaaaagaatcggcagtattttctgtttttatgttttatttggcttgttttattttggattagtgaactaagttattgttaattatgtacaacatttatatattgtctgtaaaaaatgtatgctatcctcttattcctttaaagtgagtactgttaagaataataaaatactttttgtgaatgcccgccaaaaaaaaaaaaaaaagcggcgcccaatttcgacgcggcgcgaatcctgcagccggggtcactagtctaancggcgcaccgcgtggagcccagctttgttccctagtgaggttcgctngcg

SEQ ID NO: 63194 - DNA, 881 bp, Homo sapiens
tgtcgagcgcgggtccctctttattggccagctgggcgccctgctacttggcgtcgcatttctctctcccaggcgggttcgtttccgccagagaatgcagcagtcccgcatcctacgcaggacctgcaaccgaggtggaggcttcggtcaagccggctcctgcctgcgttgtcgaggaaggcaaccccaaggcctgaaaggacctggcagaactcctgtttcctttttttcctctacaccggattgcgggcaaggaggctggttcgggtctcccgaggcccctgctcaagcactccttaaccgtcctgctaagcccctctgtgcggcgattttctgagctgccgagcgggggccgttgccgtctgcacccagaccctgagccgccgccgccggccatggaggtggcgccggagcagccgcgctggatggcgcacccggccgtgctgaatgcgcagcaccccgactcacaccacccgggcctggcgcacaactacatggaacccgcgcagctgctgcctccagacgaggtggacgtcttcttcaatcacctcgactcgcagggcaacccctactatgccaaccccgctcacgcgcgggcgcgcgtctcctacagccccgcgcacgcccgcctgaccggaggccagatgtgccgcccacacttgttgcacagcccgggtttgccctggctggacgggggcaaagcagccctctgcgtggggccacacaaaacctggacggagccttttcagaagcatggaccctaggtgtgaggctggagccctcttgtgtccggtggggggcgcgggggcgcgggaccaggccacaaaaggattgggcacaggggcccaaccacaaggtgggcaacagggggccgcacgggg

SEQ ID NO: 63195 - DNA, 3833 bp, Homo sapiens
  misc_feature (3783)..(3783): n is a, c, g, or t
  misc_feature (3830)..(3830): n is a, c, g, or t
gcgtgtgctcacagctcctgagggtccccggggagagtctcagtaaagacgtgtcccaagctttctgagcaagcatccctgaggtcaggggcgcgcgtgtgcgctccggagagggtgggagcggcctggagtgtggatgcacagggtgtgcgcgccctgagtgcctagcggcccttggccggccaggcggctggacctggtaggccgggtgcagagccccgggtaccctcctgccccctgcggcgctcccgcccccgtcgccaccccctgcccccccgcaaagtgatgtcgaaataaaaagccgcgttgcggccggtgggggagagagaggcagcgtgagcgccaggaaggtagcgaggccagcgtcgccccgggactcgctgctcaagtctgtctattgcctgccgccacatccatcctagcagggccccgtcgcccaccaggcggacaaaagcggtccgctgaacaccatgcggccgctcggcgtgccgcccaggctctgctggtgagcgccgccaccccgcgcccaggtcccgcgagcccgcctgccgcgcacctcgccctgctcccagctctactccaggccccgtccgcccgggggcgccgcccaccgcgcctcgctcgggccgttgccgtctgcacccagaccctgagccgccgccgccggccatggaggtggcgccggagcagccgcgctggatggcgcacccggccgtgctgaatgcgcagcaccccgactcacaccacccgggcctggcgcacaactacatggaacccgcgcagctgctgcctccagacgaggtggacgtcttcttcaatcacctcgactcgcagggcaacccctactatgccaaccccgctcacgcgcgggcgcgcgtctcctacagccccgcgcacgcccgcctgaccggaggccagatgtgccgcccacacttgttgcacagcccgggtttgccctggctggacgggggcaaagcagccctctctgccgctgcggcccaccaccacaacccctggaccgtgagccccttctccaagacgccactgcacccctcagctgctggaggccctggaggcccactctctgtgtacccaggggctgggggtgggagcgggggaggcagcgggagctcagtggcctccctcacccctacagcagcccactctggctcccaccttttcggcttcccacccacgccacccaaagaagtgtctcctgaccctagcaccacgggggctgcgtctccagcctcatcttccgcggggggtagtgcagcccgaggagaggacaaggacggcgtcaagtaccaggtgtcactgacggagagcatgaagatggaaagtggcagtcccctgcgcccaggcctagctactatgggcacccagcctgctacacaccaccccatccccacctacccctcctatgtgccggcggctgcccacgactacagcagcggactcttccaccccggaggcttcctggggggaccggcctccagcttcacccctaagcagcgcagcaaggctcgttcctgttcagaaggccgggagtgtgtcaactgtggggccacagccacccctctctggcggcgggacggcaccggccactacctgtgcaatgcctgtggcctctaccacaagatgaatgggcagaaccgaccactcatcaagcccaagcgaagactgtcggccgccagaagagccggcacctgttgtgcaaattgtcagacgacaaccaccaccttatggcgccgaaacgccaacggggaccctgtctgcaacgcctgtggcctctactacaagctgcacaatgttaacaggccactgaccatgaagaaggaagggatccagactcggaaccggaagatgtccaacaagtccaagaagagcaagaaaggggcggagtgcttcgaggagctgtcaaagtgcatgcaggagaagtcatcccccttcagtgcagctgccctggctggacacatggcacctgtgggccacctcccgcccttcagccactccggacacatcctgcccactccgacgcccatccacccctcctccagcctctccttcggccacccccacccgtccagcatggtgaccgccatgggctagggaacagatggacgtcgaggaccgggcactcccgggatgggtggaccaaacccttagcagcccagcatttcccgaaggccgacaccactcctgccagcccggctcggcccagcaccccctctcctggagggcgcccagcagcctgccagcagttactgtgaatgttccccaccgctgagaggctgcctccgcacctgaccgctgcccaggtggggtttcctgcatggacagttgtttggagaacaacaaggacaactttatgtagagaaaaggaggggacgggacagacgaaggcaaccatttttagaaggaaaaaggattaggcaaaaataatttattttgctcttgtttctaacaaggacttggagacttggtggtctgagctgtcccaagtcctccggttcttcctcgggattggcgggtccacttgccagggctctgggggcagatttgtggggacctcagcctgcaccctcttctcctctggcttccctctctgaaatagccgaactccaggctgggctgagccaaagccagagtggccacggcccagggagggtgagctggtgcctgctttgacgggccaggccctggagggcagagacaatcacgggcggtcctgcacagattcccaggccagggctgggtcacaggaaggaaacaacattttcttgaaaggggaaacgtctcccagatcgctcccttggctttgaggccgaagctgctgtgactgtgtccccttactgagcgcaagccacagcctgtcttgtcaggtggaccctgtaaatacatcctttttctgctaacccttcaaccccctcgcctcctactctgagacaaaagaaaaaatattaaaaaaatgcataggcttaactcgctgatgagttaattgttttatttttaaactctttttgggtccagttgattgtacgtagccacaggagccctgctatgaaaggaataaaacctacacacaaggttggagctttgcaattctttttggaaaagagctgggatcccacagccctagtatgaaagctgggggtggggaggggcctttgctgcccttggtttctgggggctggttggcatttgctggcctggcagggggtgaaggcaggagttgggggcaggtcaggaccaggacccagggagaggctgtgtccctgctggggtctcaggtccagctttactgtggctgtctggatccttcccaaggtacagctgtatataaacgtgtcccgagcttagattctgtatgcggtgacggcggggtgtggtggcctgtgaggggcccctggcccaggaggaggattgtgctgatgtagtgaccaagtgcaatatgggcgggcagtcgctgcagggagcaccacggccagaagtaacttattttgtactagtgtccgcataagaaaaagaatcggcagtattttctgtttttatgttttatttggcttgttttattttggattagtgaactaagttattgttaattatgtacaacatttatatattgtctgtaaaaaatgtatgctatcctcttattcctttaaagtgagtactgttaagaataataaaatactttttgtgaatgcccgccaaaaaaaaaaaaaaaagcggcgcccaatttcgacgcggcgcgaatcctgcagccggggtcactagtctaancggcgcaccgcgtggagcccagctttgttccctagtgaggttcgctngcg

SEQ ID NO: 63196 - DNA, 2983 bp, Homo sapiens
gcgtgtgctcacagctcctgagggtccccggggagagtctcagtaaagacgtgtcccaagctttctgagcaagcatccctgaggtcaggggcgcgcgtgtgcgctccggagagggtgggagcggcctggagtgtggatgcacagggtgtgcgcgccctgagtgcctagcggcccttggccggccaggcggctggacctggtaggccgggtgcagagccccgggtaccctcctgccccctgcggcgctcccgcccccgtcgccaccccctgcccccccgcaaagtgatgtcgaaataaaaagccgcgttgcggccggtgggggagagagaggcagcgtgagcgccaggaaggtagcgaggccagcgtcgccccgggactcgctgctcaagtctgtctattgcctgccgccacatccatcctagcagggccccgtcgcccaccaggcggacaaaagcggtccgctgaacaccatgcggccgctcggcgtgccgcccaggctctgctggtgagcgccgccaccccgcgcccaggtcccgcgagcccgcctgccgcgcacctcgccctgctcccagctctactccaggccccgtccgcccgggggcgccgcccaccgcgcctcgctcgggccgttgccgtctgcacccagaccctgagccgccgccgccggccatggaggtggcgccggagcagccgcgctggatggcgcacccggccgtgctgaatgcgcagcaccccgactcacaccacccgggcctggcgcacaactacatggaacccgcgcagctgctgcctccagacgaggtggacgtcttcttcaatcacctcgactcgcagggcaacccctactatgccaaccccgctcacgcgcgggcgcgcgtctcctacagccccgcgcacgcccgcctgaccggaggccagatgtgccgcccacacttgttgcacagcccgggtttgccctggctggacgggggcaaagcagccctctctgccgctgcggcccaccaccacaacccctggaccgtgagccccttctccaagacgccactgcacccctcagctgctggaggccctggaggcccactctctgtgtacccaggggctgggggtgggagcgggggaggcagcgggagctcagtggcctccctcacccctacagcagcccactctggctcccaccttttcggcttcccacccacgccacccaaagaagtgtctcctgaccctagcaccacgggggctgcgtctccagcctcatcttccgcggggggtagtgcagcccgaggagaggacaaggacggcgtcaagtaccaggtgtcactgacggagagcatgaagatggaaagtggcagtcccctgcgcccaggcctagctactatgggcacccagcctgctacacaccaccccatccccacctacccctcctatgtgccggcggctgcccacgactacagcagcggactcttccaccccggaggcttcctggggggaccggcctccagcttcacccctaagcagcgcagcaaggctcgttcctgttcagaaggccgggagtgtgtcaactgtggggccacagccacccctctctggcggcgggacggcaccggccactacctgtgcaatgcctgtggcctctaccacaagatgaatgggcagaaccgaccactcatcaagcccaagcgaagactgtcggccgccagaagagccggcacctgttgtgcaaattgtcagacgacaaccaccaccttatggcgccgaaacgccaacggggaccctgtctgcaacgcctgtggcctctactacaagctgcacaatgttaacaggccactgaccatgaagaaggaagggatccagactcggaaccggaagatgtccaacaagtccaagaagagcaagaaaggggcggagtgcttcgaggagctgtcaaagtgcatgcaggagaagtcatcccccttcagtgcagctgccctggctggacacatggcacctgtgggccacctcccgcccttcagccactccggacacatcctgcccactccgacgcccatccacccctcctccagcctctccttcggccacccccacccgtccagcatggtgaccgccatgggctagggaacagatggacgtcgaggaccgggcactcccgggatgggtggaccaaacccttagcagcccagcatttcccgaaggccgacaccactcctgccagcccggctcggcccagcaccccctctcctggagggcgcccagcagcctgccagcagttactgtgaatgttccccaccgctgagaggctgcctccgcacctgaccgctgcccaggtggggtttcctgcatggacagttgtttggagaacaacaaggacaactttatgtagagaaaaggaggggacgggacagacgaaggcaaccatttttagaaggaaaaaggattaggcaaaaataatttattttgctcttgtttctaacaaggacttggagacttggtggtctgagctgtcccaagtcctccggttcttcctcgggattggcgggtccacttgccagggctctgggggcagatttgtggggacctcagcctgcaccctcttctcctctggcttccctctctgaaatagccgaactccaggctgggctgagccaaagccagagtggccacggcccagggagggtgagctggtgcctgctttgacgggccaggccctggagggcagagacaatcacgggcggtcctgcacagattcccaggccagggctgggtcacaggaaggaaacaacattttcttgaaaggggaaacgtctcccagatcgctcccttggctttgaggccgaagctgctgtgactgtgtccccttactgagcgcaagccacagcctgtcttgtcaggtggaccctgtaaatacatcctttttctgctaacccttcaaccccctcgcctcctactctgagacaaaagaaaaaatattaaaaaaatgcataggctt

SEQ ID NO: 63197 - DNA, 2743 bp, Homo sapiens
  misc_feature (2693)..(2693): n is a, c, g, or t
  misc_feature (2740)..(2740): n is a, c, g, or t
ttaggctaggtacgaggcctggttgaaattcggccgagggctcagtggcctccctcacccctacagcagcccactctggctcccaccttttcggcttcccacccacgccacccaaagaagtgtctcctgaccctagcaccacgggggctgcgtctccagcctcatcttccgcggggggtagtgcagcccgaggagaggacaaggacggcgtcaagtaccaggtgtcactgacggagagcatgaagatggaaagtggcagtcccctgcgcccaggcctagctactatgggcacccagcctgctacacaccaccccatccccacctacccctcctatgtgccggcggctgcccacgactacagcagcggactcttccaccccggaggcttcctggggggaccggcctccagcttcacccctaagcagcgcagcaaggctcgttcctgttcagaaggccgggagtgtgtcaactgtggggccacagccacccctctctggcggcgggacggcaccggccactacctgtgcaatgcctgtggcctctaccacaagatgaatgggcagaaccgaccactcatcaagcccaagcgaagactgtcggccgccagaagagccggcacctgttgtgcaaattgtcagacgacaaccaccaccttatggcgccgaaacgccaacggggaccctgtctgcaacgcctgtggcctctactacaagctgcacaatgttaacaggccactgaccatgaagaaggaagggatccagactcggaaccggaagatgtccaacaagtccaagaagagcaagaaaggggcggagtgcttcgaggagctgtcaaagtgcatgcaggagaagtcatcccccttcagtgcagctgccctggctggacacatggcacctgtgggccacctcccgcccttcagccactccggacacatcctgcccactccgacgcccatccacccctcctccagcctctccttcggccacccccacccgtccagcatggtgaccgccatgggctagggaacagatggacgtcgaggaccgggcactcccgggatgggtggaccaaacccttagcagcccagcatttcccgaaggccgacaccactcctgccagcccggctcggcccagcaccccctctcctggagggcgcccagcagcctgccagcagttactgtgaatgttccccaccgctgagaggctgcctccgcacctgaccgctgcccaggtggggtttcctgcatggacagttgtttggagaacaacaaggacaactttatgtagagaaaaggaggggacgggacagacgaaggcaaccatttttagaaggaaaaaggattaggcaaaaataatttattttgctcttgtttctaacaaggacttggagacttggtggtctgagctgtcccaagtcctccggttcttcctcgggattggcgggtccacttgccagggctctgggggcagatttgtggggacctcagcctgcaccctcttctcctctggcttccctctctgaaatagccgaactccaggctgggctgagccaaagccagagtggccacggcccagggagggtgagctggtgcctgctttgacgggccaggccctggagggcagagacaatcacgggcggtcctgcacagattcccaggccagggctgggtcacaggaaggaaacaacattttcttgaaaggggaaacgtctcccagatcgctcccttggctttgaggccgaagctgctgtgactgtgtccccttactgagcgcaagccacagcctgtcttgtcaggtggaccctgtaaatacatcctttttctgctaacccttcaaccccctcgcctcctactctgagacaaaagaaaaaatattaaaaaaatgcataggcttaactcgctgatgagttaattgttttatttttaaactctttttgggtccagttgattgtacgtagccacaggagccctgctatgaaaggaataaaacctacacacaaggttggagctttgcaattctttttggaaaagagctgggatcccacagccctagtatgaaagctgggggtggggaggggcctttgctgcccttggtttctgggggctggttggcatttgctggcctggcagggggtgaaggcaggagttgggggcaggtcaggaccaggacccagggagaggctgtgtccctgctggggtctcaggtccagctttactgtggctgtctggatccttcccaaggtacagctgtatataaacgtgtcccgagcttagattctgtatgcggtgacggcggggtgtggtggcctgtgaggggcccctggcccaggaggaggattgtgctgatgtagtgaccaagtgcaatatgggcgggcagtcgctgcagggagcaccacggccagaagtaacttattttgtactagtgtccgcataagaaaaagaatcggcagtattttctgtttttatgttttatttggcttgttttattttggattagtgaactaagttattgttaattatgtacaacatttatatattgtctgtaaaaaatgtatgctatcctcttattcctttaaagtgagtactgttaagaataataaaatactttttgtgaatgcccgccaaaaaaaaaaaaaaaagcggcgcccaatttcgacgcggcgcgaatcctgcagccggggtcactagtctaancggcgcaccgcgtggagcccagctttgttccctagtgaggttcgctngcg

SEQ ID NO: 63198 - DNA, 2400 bp, Homo sapiens
  misc_feature (1)..(1): n is a, c, g, or t
  misc_feature (3)..(4): n is a, c, g, or t
  misc_feature (7)..(7): n is a, c, g, or t
  misc_feature (9)..(10): n is a, c, g, or t
  misc_feature (2350)..(2350): n is a, c, g, or t
  misc_feature (2397)..(2397): n is a, c, g, or t
ncnngcntnntgctgtgcaggagtcggcagctggcgccagggcggccggaggatgccgaggggccggagccgggcgggcccgaggccgaggcgcactctacccccagctcctaccctgtaagccccgccagcctccggacgtgctgtccctgggcccgtcgccctctgggctcccgccggaactccttcactctcagaggccgagtccctcccctccccacggctgcgtgtggccgttgccgtctgcacccagaccctgagccgccgccgccggccatggaggtggcgccggagcagccgcgctggatggcgcacccggccgtgctgaatgcgcagcaccccgactcacaccacccgggcctggcgcacaactacatggaacccgcgcagctgctgcctccagacgaggtggacgtcttcttcaatcacctcgactcgcagggcaacccctactatgccaaccccgctcacgcgcgggcgcgcgtctcctacagccccgcgcacgcccgcctgaccggaggccagatgtgccgcccacacttgttgcacagcccgggtttgccctggctggacgggggcaaagcagccctctctgccgctgcggcccaccaccacaacccctggaccgtgagccccttctccaagacgccactgcacccctcagctgctggaggccctggaggcccactctctgtgtacccaggggctgggggtgggagcgggggaggcagcgggagctcagtggcctccctcacccctacagcagcccactctggctcccaccttttcggcttcccacccacgccacccaaagaagtgtctcctgaccctagcaccacgggggctgcgtctccagcctcatcttccgcggggggtagtgcagcccgaggagaggacaaggacggcgtcaagtaccaggtgtcactgacggagagcatgaagatggaaagtggcagtcccctgcgcccaggcctagctactatgggcacccagcctgctacacaccaccccatccccacctacccctcctatgtgccggcggctgcccacgactacagcagcggactcttccaccccggaggcttcctggggggaccggcctccagcttcacccctaagcagcgcagcaaggctcgttcctgttcagaaggccgggagtgtgtcaactgtggggccacagccacccctctctggcggcgggacggcaccggccactacctgtgcaatgcctgtggcctctaccacaagatgaatgggcagaaccgaccactcatcaagcccaagcgaagactgtcggccgccagaagagccggcacctgttgtgcaaattgtcagacgacaaccaccaccttatggcgccgaaacgccaacggggaccctgtctgcaacgcctgtggcctctactacaagctgcacaatgttaacaggccactgaccatgaagaaggaagggatccagactcggaaccggaagatgtccaacaagtccaagaagagcaagaaaggggcggagtgcttcgaggagctgtcaaagtgcatgcaggagaagtcatcccccttcagtgcagctgccctggctggacacatggcacctgtgggccacctcccgcccttcagccactccggacacatcctgcccactccgacgcccatccacccctcctccagcctctccttcggccacccccacccgtccagcatggtgaccgccatgggctagggaacagatggacgtcgaggaccgggcactcccgggatgggtggaccaaacccttagcagcccagcatttcccgaaggccgacaccactcctgccagcccggctcggcccgggagaggctgtgtccctgctggggtctcaggtccagctttactgtggctgtctggatccttcccaaggtacagctgtatataaacgtgtcccgagcttagattctgtatgcggtgacggcggggtgtggtggcctgtgaggggcccctggcccaggaggaggattgtgctgatgtagtgaccaagtgcaatatgggcgggcagtcgctgcagggagcaccacggccagaagtaacttattttgtactagtgtccgcataagaaaaagaatcggcagtattttctgtttttatgttttatttggcttgttttattttggattagtgaactaagttattgttaattatgtacaacatttatatattgtctgtaaaaaatgtatgctatcctcttattcctttaaagtgagtactgttaagaataataaaatactttttgtgaatgcccgccaaaaaaaaaaaaaaaagcggcgcccaatttcgacgcggcgcgaatcctgcagccggggtcactagtctaancggcgcaccgcgtggagcccagctttgttccctagtgaggttcgctngcg

SEQ ID NO: 63199 - DNA, 259 bp, Homo sapiens
cctcgcccggccttggagaggcccggtgaggggctgatggctagtgagggcttgatggctagtgaggactttgtctcagggcgcacatatttcccccactatgctgttggcctggtttctccttacaggagaagtttcagagtaatttaatatttggtggttttactaccaacttatgtttctatagtttacaaatagtgtcttttgaccctaataagctattttactttaataaaaatatattctgttctgtttgcat

SEQ ID NO: 63200 - DNA, 481 bp, Homo sapiens
  misc_feature (77)..(77): n is a, c, g, or t
acaccttgggatataggtcagaaaactgggggtgtagccctggccttgccctcttaactgctgcatgacccttgggncaagtccactttcaaacttgcgatctcatctctaaacaggatataactcactgacttggagtgaagataaaatgaaagtaataggtgtgaatataccagggaaaactataaagtattaaatgaaatcagtaaaaagtatttttcacaaccccaggtttgtctctagacccaggggttggcaaactttttctgtaaagcactagctagtaaatatttttggcttgttagatgatactatccctttagtacctattcaactctgcaagagcagccatagacaatatgtaaatggatgagcatggctgtgttccaataaaactttatttatggacactgagatttgaattttgtataattttcacatgtcatggaatattctttttattttttttccaaccatttaa

SEQ ID NO: 63201 - DNA, 483 bp, Homo sapiens
ctgcctcctcaggatccagaaggcattgagaaaccatctcatagcagcctcctaggggacatagccaggggagggggcaagggtcttatagcaactccttacaagcttccaacccaggagtatccaggtgttctaccaagacgtagattcagtagtggttccagttttgctttgtggcctatgtggatatgtgcagggtcaccaaggtgccatggcagagccatcccccttcatctctattctgtttcattgctctatttgcctgttttaacaccaataccatactgtcttgaatattgtaactttataataaattttgaagtcaggtagtataagttttcaagcatagttcttccttcttgaagttgttttggctattctagctcctttgcatttccagatgaattttagattcagttcatccatttctacaacatagcttcctgggttatgttgtccaaatctataaatcaatttggagaa

SEQ ID NO: 63202 - DNA, 111 bp, Homo sapiens
gtacgttcgttaatttagtattctggttagctaaaattgtgtgagaaggctgataaacgtctgtggtttctccctgtgctattaaaaaaaaaaataaaagaatgttaaagt

SEQ ID NO: 63203 - DNA, 1783 bp, Homo sapiens
cacatataataatagcaactcctggtcgactgattgaccacttgaaacctttcgtattttccggggctggcaagcgcttcctgcgcagcgcctaggcgacctggagtttgtgacgctgtgatggtctagaggctggagattcaagatctgggtgccatcattttctggttctgttgatgaccctcttccaggttacatacagcttacatcttgcatcctcaagcgtttttcttataaggctaaaaattcacaaagcatatatcaatgaatcaggaggatctagatccggatagtactacagatgtgggagatgttacaaatactgaagaagaacttattagagaatgtgaagaaatgtggaaagatatggaagaatgtcagaataaattatcacttattggaactgaaacactcaccgattcaaatgctcagctatcattgttaattatgcaagtaaaatgtttaaccgctgaactcagtcaatggcagaaaaaaacacctgaaacaattcccttgactgaagacgttctcataacattaggaaaagaagagttccaaaagctgagacaagatcttgaaatggtactgtccactaaggagtcaaagaatgaaaagttaaaggaagacttagaaagggaacaacggtggttggatgaacagcaacagataatggaatctcttaatgtactacacagtgaattgaaaaataaggttgaaacattttctgaatcaagaatctttaatgaactgaaaactaaaatgcttaatataaaagaatataaggagaaactcttgagtaccttgggcgagtttctagaagaccattttcctctgcctgatagaagtgttaaaaagaaaaagaaaaacattcaagaatcatctgtaaacctgataacactgcatgaaatgttagagattcttataaatagattatttgatgttccacatgatccatatgtcaaaattagtgattccttttggccaccttatgttgagctgctgctgcgtaatggaattgccttgagacatccagaagatccaacccgaataagattagaagctttccatcagtaaaaggatgttttcttttttcacacagtaaaaattcttatcattcaaggatattggaaccacaggactatttggataaaaaacattatttgcaaattaatgcgcataggccatcttacttttattgcaaaatggcatgtgctgccatctattattcatttttaaatggtcatttcttattcagtgagtgctttagtgttttaaactatatggataagaatgcaggtagataatattctaggcataaaacatttaatgtaccttacctcatgcaatattctttggattctttgttgatttatgatattgctaatataatattttcttaaaatatataacaatatcttttatgcattttgagttccagctggtgcttctttatatttagaaattataatgggaaggtcatttaatttacagatggttttaaaattgaggtaatatctgaggtggcataatttaaaaatatttagcaaatttgtttcatatatactgtcttatttctagatttgtttaaaattggaatatgaaaaactaatggataaagctagcataaaattgatattttagtttgtattattaatatatcatgttaccttatatattaatctactcttgattctgctaattattaccaacaaaattgtattcatgacattttattaatcctctgtgaattttctgtaaataaaattatttctgaaaatctcta

SEQ ID NO: 63204 - DNA, 745 bp, Homo sapiens
ttcatgtcttcttactcagttgtcaatttctcagtaaccttatatgaccaccttatttaaaattatattgtccttgccctagcatttcctatgtttcttccttgtcttttctccatggcacttataaatcatttgatatactaagtatatatatgttttattttttattttattgtctgttttccttacttagaataaggttcacggtaggagggatttttgtctattttgttcattgctatattcttaccccctagatgagtatctggcaggtaataagtgttcaaccaatactgctgaatgaataaatattttttgctttagtttttcttataaggctaaaaattcacaaagcatatatcaatgaatcaggaggatctagatccggatagtactacagatgtgggagatgttacaaatactgaagaagaacttattagagaatgtgaagaaatgtggaaagatatggaagaatgtcagaataaattatcacttattggaactgaaacactcaccgattcaaatgctcagctatcattgttaattatgcaagtaaaatgtttaaccgctgaactcagtcaatggcagaaaaaaacacctgaaaggcctaatcgtgttggcccagtctggaagtccaatggcacaaacatgggttaatagggggcccccaatctcccggggtcaaggaatccctcctaactctaaccctcctgtagatgcttgggacctccaagggtgtgccacc

SEQ ID NO: 63205 - DNA, 1997 bp, Homo sapiens
aggatcccccatctggaggtcgctccggggctggcaagcgcttcctgcgcagcgcctaggcgacctggagtttgtgacgctgtgatggtctagaggctggagattcaagatctgggtgccatcattttctggttctgttgatgaccctcttccaggttacatacagcttacatcttgcatcctcaagcgtttttcttataaggctaaaaattcacaaagcatatatcaatgaatcaggaggatctagatccggatagtactacagatgtgggagatgttacaaatactgaagaagaacttattagagaatgtgaagaaatgtggaaagatatggaagaatgtcagaataaattatcacttattggaactgaaacactcaccgattcaaatgctcagctatcattgttaattatgcaagtaaaatgtttaaccgctgaactcagtcaatggcagaaaaaaacacctgaaacaattcccttgactgaagacgttctcataacattaggaaaagaagagttccaaaagctgagacaagatcttgaaatggtactgtccactaaggagtcaaagaatgaaaagttaaaggaagacttagaaagggaacaacggtggttggatgaacagcaacagataatggaatctcttaatgtactacacagtgaattgaaaaataaggttgaaacattttctgaatcaagaatctttaatgaactgaaaactaaaatgcttaatataaaagaatataaggagaaactcttgagtaccttgggcgagtttctagaagaccattttcctctgcctgatagaagtgttaaaaagaaaaagaaaaacattcaagaatcatctgtaaacctgataacactgcatgaaatgttagagattcttataaatagattatttgatgttccacatgatccatatgtcaaaattagtgattccttttggccaccttatgttgagctgctgctgcgtaatggaattgccttgagacatccagaagatccaacccgaataagattagaagctttccatcagtaaaaggatgttttcttttttcacacagtaaaaattcttatcattcaaggatattggaaccacaggactatttggataaaaaacattatttgcaaattaatgcgcataggccatcttacttttattgcaaaatggcatgtgctgccatctattattcatttttaaatggtcatttcttattcagtgagtgctttagtgttttaaactatatggataagaatgcaggtagataatattctaggcataaaacatttaatgtaccttacctcatgcaatattctttggattctttgttgatttatgatattgctaatataatattttcttaaaatatataacaatatcttttatgcattttgagttccagctggtgcttctttatatttagaaattataatgggaaggtcatttaatttacagatggttttaaaattgaggtaatatctgaggtggcataatttaaaaatatttagcaaatttgtttcatatatactgtcttatttctagatttgtttaaaattggaatatgaaaaactaatggataaagctagcataaaattgatattttagtttgtattattaatatatcatgttaccttatatattaatctactcttgattctgctaattattaccaacaaaattgtattcatgacattttattaatcctctgtgaattttctgtaaataaaattatttctgaaaatctctaaaagaacaccccgggcgcacacccgcacacacactgtttggcgcgcgctcacgacccctggaaagacgtttcgaggacccactgtttgggacgccccgcggccccacaggaaatgatgaacacagggtccacaggagtgttcccaagagaaaatccgggtgcaagaaaaacggagcgtgtacgtcttctccacccagtaaagaaatgccgtcgcgggtcaaccacaccagcggtgtggacatcaaaccgg

SEQ ID NO: 63206 - DNA, 1749 bp, Homo sapiens
cacatataataatagcaactcctggtcgactgattgaccacttgaaacctttcgtattttccggggctggcaagcgcttcctgcgcagcgcctaggcgacctggagtttgtgacgctgtgatggtctagaggctggagattcaagatctgggtgccatcattttctggttctgttgatgaccctcttccagtttttcttataaggctaaaaattcacaaagcatatatcaatgaatcaggaggatctagatccggatagtactacagatgtgggagatgttacaaatactgaagaagaacttattagagaatgtgaagaaatgtggaaagatatggaagaatgtcagaataaattatcacttattggaactgaaacactcaccgattcaaatgctcagctatcattgttaattatgcaagtaaaatgtttaaccgctgaactcagtcaatggcagaaaaaaacacctgaaacaattcccttgactgaagacgttctcataacattaggaaaagaagagttccaaaagctgagacaagatcttgaaatggtactgtccactaaggagtcaaagaatgaaaagttaaaggaagacttagaaagggaacaacggtggttggatgaacagcaacagataatggaatctcttaatgtactacacagtgaattgaaaaataaggttgaaacattttctgaatcaagaatctttaatgaactgaaaactaaaatgcttaatataaaagaatataaggagaaactcttgagtaccttgggcgagtttctagaagaccattttcctctgcctgatagaagtgttaaaaagaaaaagaaaaacattcaagaatcatctgtaaacctgataacactgcatgaaatgttagagattcttataaatagattatttgatgttccacatgatccatatgtcaaaattagtgattccttttggccaccttatgttgagctgctgctgcgtaatggaattgccttgagacatccagaagatccaacccgaataagattagaagctttccatcagtaaaaggatgttttcttttttcacacagtaaaaattcttatcattcaaggatattggaaccacaggactatttggataaaaaacattatttgcaaattaatgcgcataggccatcttacttttattgcaaaatggcatgtgctgccatctattattcatttttaaatggtcatttcttattcagtgagtgctttagtgttttaaactatatggataagaatgcaggtagataatattctaggcataaaacatttaatgtaccttacctcatgcaatattctttggattctttgttgatttatgatattgctaatataatattttcttaaaatatataacaatatcttttatgcattttgagttccagctggtgcttctttatatttagaaattataatgggaaggtcatttaatttacagatggttttaaaattgaggtaatatctgaggtggcataatttaaaaatatttagcaaatttgtttcatatatactgtcttatttctagatttgtttaaaattggaatatgaaaaactaatggataaagctagcataaaattgatattttagtttgtattattaatatatcatgttaccttatatattaatctactcttgattctgctaattattaccaacaaaattgtattcatgacattttattaatcctctgtgaattttctgtaaataaaattatttctgaaaatctcta

SEQ ID NO: 63207 - DNA, 1397 bp, Homo sapiens
  misc_feature (1218)..(1218): n is a, c, g, or t
  misc_feature (1221)..(1221): n is a, c, g, or t
  misc_feature (1225)..(1225): n is a, c, g, or t
  misc_feature (1229)..(1229): n is a, c, g, or t
  misc_feature (1233)..(1233): n is a, c, g, or t
  misc_feature (1242)..(1242): n is a, c, g, or t
  misc_feature (1244)..(1245): n is a, c, g, or t
  misc_feature (1249)..(1249): n is a, c, g, or t
  misc_feature (1252)..(1252): n is a, c, g, or t
  misc_feature (1258)..(1258): n is a, c, g, or t
  misc_feature (1380)..(1380): n is a, c, g, or t
aggatcccccatctggaggtcgctccggggctggcaagcgcttcctgcgcagcgcctaggcgacctggagtttgtgacgctgtgatggtctagaggctggagattcaagatctgggtgccatcattttctggttctgttgatgaccctcttccaggttacatacagcttacatcttgcatcctcaagcgtttttcttataaggctaaaaattcacaaagcatatatcaatgaatcaggaggatctagatccggatagtactacagatgtgggagatgttacaaatactgaagaagaacttattagagaatgtgaagaaatgtggaaagatatggaagaatgtcagaataaattatcacttattggaactgaaacactcaccgattcaaatgctcagctatcattgttaattatgcaagtaaaatgtttaaccgctgaactcagtcaatggcagaaaaaaacacctgaaacaattcccttgactgaagacgttctcataacattaggaaaagaagagttccaaaagctgagacaagatcttgaaatggtactgtccactaaggagtcaaagaatgaaaagttaaaggaagacttagaaagggaacaacggtggttggatgaacagcaacagataatggaatctcttaatgtactacacagtgaattgaaaaataaggttgaaacattttctgaatcaagaatctttaatgaactgaaaactaaaatgcttaatataaaagaatataaggagaaactcttgagtaccttgggcgagtttctagaagaccattttcctctgcctgatagaagtgttaaaaagaaaaagaaaaacattcaagaatcatctgtaaacctgataacactgcatgaaatgttagagattcttataaatagattatttgatgttccacatgatccatatgtcaaaattagtgattccttttggccaccttatgttgagctgctgctgcgtaatggaattgccttgagacatccagaagatccaacccgaataagattagaagctttccatcagtaaaaggatgttttcttttttcacacagtaaaaattcttatcattcaaggatattggaaccacaggactatttggataaaaaacattatttgcaaattaatgcgcataggccatcttacttttattgcaaaatggcatgtgctgccatctattattcatttttaaatggtcatttctctatanggngggntagngttnactattggnannatgnggngaaaanttcgggtaatatggtctacatgaaatctgcgctcgggatagatgggaaatttaaataaaaattagtagggcagggggggataaaaagagggaacaaaagagaggcggaaaatttttagtagngcaatatatagcattta

SEQ ID NO: 63208 - DNA, 1633 bp, Homo sapiens
cacatataataatagcaactcctggtcgactgattgaccacttgaaacctttcgtattttccggggctggcaagcgcttcctgcgcagcgcctaggcgacctggagtttgtgacgctgtgatggtctagaggctggagattcaagatctgggtgccatcattttctggttctgttgatgaccctcttccaggttacatacagcttacatcttgcatcctcaagcgtgtcagaataaattatcacttattggaactgaaacactcaccgattcaaatgctcagctatcattgttaattatgcaagtaaaatgtttaaccgctgaactcagtcaatggcagaaaaaaacacctgaaacaattcccttgactgaagacgttctcataacattaggaaaagaagagttccaaaagctgagacaagatcttgaaatggtactgtccactaaggagtcaaagaatgaaaagttaaaggaagacttagaaagggaacaacggtggttggatgaacagcaacagataatggaatctcttaatgtactacacagtgaattgaaaaataaggttgaaacattttctgaatcaagaatctttaatgaactgaaaactaaaatgcttaatataaaagaatataaggagaaactcttgagtaccttgggcgagtttctagaagaccattttcctctgcctgatagaagtgttaaaaagaaaaagaaaaacattcaagaatcatctgtaaacctgataacactgcatgaaatgttagagattcttataaatagattatttgatgttccacatgatccatatgtcaaaattagtgattccttttggccaccttatgttgagctgctgctgcgtaatggaattgccttgagacatccagaagatccaacccgaataagattagaagctttccatcagtaaaaggatgttttcttttttcacacagtaaaaattcttatcattcaaggatattggaaccacaggactatttggataaaaaacattatttgcaaattaatgcgcataggccatcttacttttattgcaaaatggcatgtgctgccatctattattcatttttaaatggtcatttcttattcagtgagtgctttagtgttttaaactatatggataagaatgcaggtagataatattctaggcataaaacatttaatgtaccttacctcatgcaatattctttggattctttgttgatttatgatattgctaatataatattttcttaaaatatataacaatatcttttatgcattttgagttccagctggtgcttctttatatttagaaattataatgggaaggtcatttaatttacagatggttttaaaattgaggtaatatctgaggtggcataatttaaaaatatttagcaaatttgtttcatatatactgtcttatttctagatttgtttaaaattggaatatgaaaaactaatggataaagctagcataaaattgatattttagtttgtattattaatatatcatgttaccttatatattaatctactcttgattctgctaattattaccaacaaaattgtattcatgacattttattaatcctctgtgaattttctgtaaataaaattatttctgaaaatctcta

SEQ ID NO: 63209 - DNA, 1826 bp, Homo sapiens
  misc_feature (136)..(136): n is a, c, g, or t
agcgcttcctgcgcagcgcctaggacagaaaccctgggacgcttttgtgacgctgggtttgacaatcatggactctctaagacagagccctctggccacgcactttcaacaagaaactctctgagcagattgcccnattccaatttttccctggtattctggtttgtggaagttggaaacgcccgtttctttttcccagagattataaacaagttaaccaaggggaccttttaaccaatacttttgcccaattccttcaaaggcggattttttcttataaggctaaaaattcacaaagcatatatcaatgaatcaggaggatctagatccggatagtactacagatgtgggagatgttacaaatactgaagaagaacttattagagaatgtgaagaaatgtggaaagatatggaagaatgtcagaataaattatcacttattggaactgaaacactcaccgattcaaatgctcagctatcattgttaattatgcaagtaaaatgtttaaccgctgaactcagtcaatggcagaaaaaaacacctgaaacaattcccttgactgaagacgttctcataacattaggaaaagaagagttccaaaagctgagacaagatcttgaaatggtactgtccactaaggagtcaaagaatgaaaagttaaaggaagacttagaaagggaacaacggtggttggatgaacagcaacagataatggaatctcttaatgtactacacagtgaattgaaaaataaggttgaaacattttctgaatcaagaatctttaatgaactgaaaactaaaatgcttaatataaaagaatataaggagaaactcttgagtaccttgggcgagtttctagaagaccattttcctctgcctgatagaagtgttaaaaagaaaaagaaaaacattcaagaatcatctgtaaacctgataacactgcatgaaatgttagagattcttataaatagattatttgatgttccacatgatccatatgtcaaaattagtgattccttttggccaccttatgttgagctgctgctgcgtaatggaattgccttgagacatccagaagatccaacccgaataagattagaagctttccatcagtaaaaggatgttttcttttttcacacagtaaaaattcttatcattcaaggatattggaaccacaggactatttggataaaaaacattatttgcaaattaatgcgcataggccatcttacttttattgcaaaatggcatgtgctgccatctattattcatttttaaatggtcatttcttattcagtgagtgctttagtgttttaaactatatggataagaatgcaggtagataatattctaggcataaaacatttaatgtaccttacctcatgcaatattctttggattctttgttgatttatgatattgctaatataatattttcttaaaatatataacaatatcttttatgcattttgagttccagctggtgcttctttatatttagaaattataatgggaaggtcatttaatttacagatggttttaaaattgaggtaatatctgaggtggcataatttaaaaatatttagcaaatttgtttcatatatactgtcttatttctagatttgtttaaaattggaatatgaaaaactaatggataaagctagcataaaattgatattttagtttgtattattaatatatcatgttaccttatatattaatctactcttgattctgctaattattaccaacaaaattgtattcatgacattttattaatcctctgtgaattttctgtaaataaaattatttctgaaaatctcta

SEQ ID NO: 63210 - DNA, 2019 bp, Homo sapiens
ttcatgtcttcttactcagttgtcaatttctcagtaaccttatatgaccaccttatttaaaattatattgtccttgccctagcatttcctatgtttcttccttgtcttttctccatggcacttataaatcatttgatatactaagtatatatatgttttattttttattttattgtctgttttccttacttagaataaggttcacggtaggagggatttttgtctattttgttcattgctatattcttaccccctagatgagtatctggcaggtaataagtgttcaaccaatactgctgaatgaataaatattttttgctttagtttttcttataaggctaaaaattcacaaagcatatatcaatgaatcaggaggatctagatccggatagtactacagatgtgggagatgttacaaatactgaagaagaacttattagagaatgtgaagaaatgtggaaagatatggaagaatgtcagaataaattatcacttattggaactgaaacactcaccgattcaaatgctcagctatcattgttaattatgcaagtaaaatgtttaaccgctgaactcagtcaatggcagaaaaaaacacctgaaaggtctcatcgtgttgtccaggctggagtacagtggcacaatcatggctcattgcagccccgatctcccgggttcaagtgatcctcctacctcagcctcctgagtagctaggactacaagtgtgtgccaccatgcttgcaattcccttgactgaagacgttctcataacattaggaaaagaagagttccaaaagctgagacaagatcttgaaatggtactgtccactaaggagtcaaagaatgaaaagttaaaggaagacttagaaagggaacaacggtggttggatgaacagcaacagataatggaatctcttaatgtactacacagtgaattgaaaaataaggttgaaacattttctgaatcaagaatctttaatgaactgaaaactaaaatgcttaatataaaagaatataaggagaaactcttgagtaccttgggcgagtttctagaagaccattttcctctgcctgatagaagtgttaaaaagaaaaagaaaaacattcaagaatcatctgtaaacctgataacactgcatgaaatgttagagattcttataaatagattatttgatgttccacatgatccatatgtcaaaattagtgattccttttggccaccttatgttgagctgctgctgcgtaatggaattgccttgagacatccagaagatccaacccgaataagattagaagctttccatcagtaaaaggatgttttcttttttcacacagtaaaaattcttatcattcaaggatattggaaccacaggactatttggataaaaaacattatttgcaaattaatgcgcataggccatcttacttttattgcaaaatggcatgtgctgccatctattattcatttttaaatggtcatttcttattcagtgagtgctttagtgttttaaactatatggataagaatgcaggtagataatattctaggcataaaacatttaatgtaccttacctcatgcaatattctttggattctttgttgatttatgatattgctaatataatattttcttaaaatatataacaatatcttttatgcattttgagttccagctggtgcttctttatatttagaaattataatgggaaggtcatttaatttacagatggttttaaaattgaggtaatatctgaggtggcataatttaaaaatatttagcaaatttgtttcatatatactgtcttatttctagatttgtttaaaattggaatatgaaaaactaatggataaagctagcataaaattgatattttagtttgtattattaatatatcatgttaccttatatattaatctactcttgattctgctaattattaccaacaaaattgtattcatgacattttattaatcctctgtgaattttctgtaaataaaattatttctgaaaatctcta

SEQ ID NO: 63211 - DNA, 1599 bp, Homo sapiens
cacatataataatagcaactcctggtcgactgattgaccacttgaaacctttcgtattttccggggctggcaagcgcttcctgcgcagcgcctaggcgacctggagtttgtgacgctgtgatggtctagaggctggagattcaagatctgggtgccatcattttctggttctgttgatgaccctcttccagtgtcagaataaattatcacttattggaactgaaacactcaccgattcaaatgctcagctatcattgttaattatgcaagtaaaatgtttaaccgctgaactcagtcaatggcagaaaaaaacacctgaaacaattcccttgactgaagacgttctcataacattaggaaaagaagagttccaaaagctgagacaagatcttgaaatggtactgtccactaaggagtcaaagaatgaaaagttaaaggaagacttagaaagggaacaacggtggttggatgaacagcaacagataatggaatctcttaatgtactacacagtgaattgaaaaataaggttgaaacattttctgaatcaagaatctttaatgaactgaaaactaaaatgcttaatataaaagaatataaggagaaactcttgagtaccttgggcgagtttctagaagaccattttcctctgcctgatagaagtgttaaaaagaaaaagaaaaacattcaagaatcatctgtaaacctgataacactgcatgaaatgttagagattcttataaatagattatttgatgttccacatgatccatatgtcaaaattagtgattccttttggccaccttatgttgagctgctgctgcgtaatggaattgccttgagacatccagaagatccaacccgaataagattagaagctttccatcagtaaaaggatgttttcttttttcacacagtaaaaattcttatcattcaaggatattggaaccacaggactatttggataaaaaacattatttgcaaattaatgcgcataggccatcttacttttattgcaaaatggcatgtgctgccatctattattcatttttaaatggtcatttcttattcagtgagtgctttagtgttttaaactatatggataagaatgcaggtagataatattctaggcataaaacatttaatgtaccttacctcatgcaatattctttggattctttgttgatttatgatattgctaatataatattttcttaaaatatataacaatatcttttatgcattttgagttccagctggtgcttctttatatttagaaattataatgggaaggtcatttaatttacagatggttttaaaattgaggtaatatctgaggtggcataatttaaaaatatttagcaaatttgtttcatatatactgtcttatttctagatttgtttaaaattggaatatgaaaaactaatggataaagctagcataaaattgatattttagtttgtattattaatatatcatgttaccttatatattaatctactcttgattctgctaattattaccaacaaaattgtattcatgacattttattaatcctctgtgaattttctgtaaataaaattatttctgaaaatctcta

SEQ ID NO: 63212 - DNA, 1542 bp, Homo sapiens
cacatataataatagcaactcctggtcgactgattgaccacttgaaacctttcgtattttccggggctggcaagcgcttcctgcgcagcgcctaggcgacctggagtttgtgacgctgtgatggtctagaggctggagattcaagatctgggtgccatcattttctggttctgttgatgaccctcttccagctatcattgttaattatgcaagtaaaatgtttaaccgctgaactcagtcaatggcagaaaaaaacacctgaaacaattcccttgactgaagacgttctcataacattaggaaaagaagagttccaaaagctgagacaagatcttgaaatggtactgtccactaaggagtcaaagaatgaaaagttaaaggaagacttagaaagggaacaacggtggttggatgaacagcaacagataatggaatctcttaatgtactacacagtgaattgaaaaataaggttgaaacattttctgaatcaagaatctttaatgaactgaaaactaaaatgcttaatataaaagaatataaggagaaactcttgagtaccttgggcgagtttctagaagaccattttcctctgcctgatagaagtgttaaaaagaaaaagaaaaacattcaagaatcatctgtaaacctgataacactgcatgaaatgttagagattcttataaatagattatttgatgttccacatgatccatatgtcaaaattagtgattccttttggccaccttatgttgagctgctgctgcgtaatggaattgccttgagacatccagaagatccaacccgaataagattagaagctttccatcagtaaaaggatgttttcttttttcacacagtaaaaattcttatcattcaaggatattggaaccacaggactatttggataaaaaacattatttgcaaattaatgcgcataggccatcttacttttattgcaaaatggcatgtgctgccatctattattcatttttaaatggtcatttcttattcagtgagtgctttagtgttttaaactatatggataagaatgcaggtagataatattctaggcataaaacatttaatgtaccttacctcatgcaatattctttggattctttgttgatttatgatattgctaatataatattttcttaaaatatataacaatatcttttatgcattttgagttccagctggtgcttctttatatttagaaattataatgggaaggtcatttaatttacagatggttttaaaattgaggtaatatctgaggtggcataatttaaaaatatttagcaaatttgtttcatatatactgtcttatttctagatttgtttaaaattggaatatgaaaaactaatggataaagctagcataaaattgatattttagtttgtattattaatatatcatgttaccttatatattaatctactcttgattctgctaattattaccaacaaaattgtattcatgacattttattaatcctctgtgaattttctgtaaataaaattatttctgaaaatctcta

SEQ ID NO: 63213 - DNA, 1831 bp, Homo sapiens
cacatataataatagcaactcctggtcgactgattgaccacttgaaacctttcgtattttccggggctggcaagcgcttcctgcgcagcgcctaggcgacctggagtttgtgacgctgtgatggtctagaggctggagattcaagatctgggtgccatcattttctggttctgttgatgaccctcttccagtttttcttataaggctaaaaattcacaaagcatatatcaatgaatcaggaggatctagatccggatagtactacagatgtgggagatgttacaaatactgaagaagaacttattagagaatgtgaagaaatgtggaaagatatggaagaatgtcagaataaattatcacttattggaactgaaacactcaccgattcaaatgctcagctatcattgttaattatgcaagtaaaatgtttaaccgctgaactcagtcaatggcagaaaaaaacacctgaaacaattcccttgactgaagacgttctcataacattaggaaaagaagagattctgcagatgatgattctctcctacaaaccagttgggtgtcctcttaattcacttcagttctgacataatctacttggagttccaaaagctgagacaagatcttgaaatggtactgtccactaaggagtcaaagaatgaaaagttaaaggaagacttagaaagggaacaacggtggttggatgaacagcaacagataatggaatctcttaatgtactacacagtgaattgaaaaataaggttgaaacattttctgaatcaagaatctttaatgaactgaaaactaaaatgcttaatataaaagaatataaggagaaactcttgagtaccttgggcgagtttctagaagaccattttcctctgcctgatagaagtgttaaaaagaaaaagaaaaacattcaagaatcatctgtaaacctgataacactgcatgaaatgttagagattcttataaatagattatttgatgttccacatgatccatatgtcaaaattagtgattccttttggccaccttatgttgagctgctgctgcgtaatggaattgccttgagacatccagaagatccaacccgaataagattagaagctttccatcagtaaaaggatgttttcttttttcacacagtaaaaattcttatcattcaaggatattggaaccacaggactatttggataaaaaacattatttgcaaattaatgcgcataggccatcttacttttattgcaaaatggcatgtgctgccatctattattcatttttaaatggtcatttcttattcagtgagtgctttagtgttttaaactatatggataagaatgcaggtagataatattctaggcataaaacatttaatgtaccttacctcatgcaatattctttggattctttgttgatttatgatattgctaatataatattttcttaaaatatataacaatatcttttatgcattttgagttccagctggtgcttctttatatttagaaattataatgggaaggtcatttaatttacagatggttttaaaattgaggtaatatctgaggtggcataatttaaaaatatttagcaaatttgtttcatatatactgtcttatttctagatttgtttaaaattggaatatgaaaaactaatggataaagctagcataaaattgatattttagtttgtattattaatatatcatgttaccttatatattaatctactcttgattctgctaattattaccaacaaaattgtattcatgacattttattaatcctctgtgaattttctgtaaataaaattatttctgaaaatctcta

SEQ ID NO: 63214 - DNA, 1818 bp, Homo sapiens
gggccgggcacggtggctcacgcctgtaatcccagcactttgggaggccgaggcgggtggatcacaaggtcaggacatcgagaccatcctggctaacatggtgaaaccctatctctactaaaaacacaaaaaattagcctggcatggtggcgggcacctgtagtcccagctactcaggggctggggcaggagaatggcgtgaacccgggaggcggagcttgcagtgagctgagatggcaccactgccctccagcctgggtgacagagtgagactgtctcaaaaaaaaaaaagaaagaaagaaaaggtacctactctcttattactgaaaacacaccattattttgcctttcaatatgatattaaaatttactgctcaaaacctcttgtattttttaatttaaccatagaatattaccacaaatttagcgcctactgtatatttaccttttcaaatgctttctgctaggctttttcactactgatgtctgaatggaagtatcctggaccactgtgtaaatttgactatcgttcagaaataaaactgggattaaagaccaagcaattaatttgaattattttattctagttccaaaagctgagacaagatcttgaaatggtactgtccactaaggagtcaaagaatgaaaagttaaaggaagacttagaaagggaacaacggtggttggatgaacagcaacagataatggaatctcttaatgtactacacagtgaattgaaaaataaggttgaaacattttctgaatcaagaatctttaatgaactgaaaactaaaatgcttaatataaaagaatataaggagaaactcttgagtaccttgggcgagtttctagaagaccattttcctctgcctgatagaagtgttaaaaagaaaaagaaaaacattcaagaatcatctgtaaacctgataacactgcatgaaatgttagagattcttataaatagattatttgatgttccacatgatccatatgtcaaaattagtgattccttttggccaccttatgttgagctgctgctgcgtaatggaattgccttgagacatccagaagatccaacccgaataagattagaagctttccatcagtaaaaggatgttttcttttttcacacagtaaaaattcttatcattcaaggatattggaaccacaggactatttggataaaaaacattatttgcaaattaatgcgcataggccatcttacttttattgcaaaatggcatgtgctgccatctattattcatttttaaatggtcatttcttattcagtgagtgctttagtgttttaaactatatggataagaatgcaggtagataatattctaggcataaaacatttaatgtaccttacctcatgcaatattctttggattctttgttgatttatgatattgctaatataatattttcttaaaatatataacaatatcttttatgcattttgagttccagctggtgcttctttatatttagaaattataatgggaaggtcatttaatttacagatggttttaaaattgaggtaatatctgaggtggcataatttaaaaatatttagcaaatttgtttcatatatactgtcttatttctagatttgtttaaaattggaatatgaaaaactaatggataaagctagcataaaattgatattttagtttgtattattaatatatcatgttaccttatatattaatctactcttgattctgctaattattaccaacaaaattgtattcatgacattttattaatcctctgtgaattttctgtaaataaaattatttctgaaaatctcta

SEQ ID NO: 63215 - DNA, 1648 bp, Homo sapiens
aggatcccccatctggaggtcgctccggggctggcaagcgcttcctgcgcagcgcctaggcgacctggagtttgtgacgctgtgatggtctagaggctggagattcaagatctgggtgccatcattttctggttctgttgatgaccctcttccaggttacatacagcttacatcttgcatcctcaagcgtttttcttataaggctaaaaattcacaaagcatatatcaatgaatcaggaggatctagatccggatagtactacagatgtgggagatgttacaaatactgaagaagaacttattagagaatgtgaagaaatgtggaaagatatggaagaatgtcagaataaattatcacttattggaactgaaacactcaccgattcaaatgctcagctatcattgttaattatgcaagtaaaatgtttaaccgctgaactcagtcaatggcagaaaaaaacacctgaaacaattcccttgactgaagacgttctcataacattaggaaaagaagagttccaaaagctgagacaagatcttgaaatggtactgtccactaaggagtcaaagaatgaaaagttaaaggaagacttagaaagaatctttaatgaactgaaaactaaaatgcttaatataaaagaatataaggagaaactcttgagtaccttgggcgagtttctagaagaccattttcctctgcctgatagaagtgttaaaaagaaaaagaaaaacattcaagaatcatctgtaaacctgataacactgcatgaaatgttagagattcttataaatagattatttgatgttccacatgatccatatgtcaaaattagtgattccttttggccaccttatgttgagctgctgctgcgtaatggaattgccttgagacatccagaagatccaacccgaataagattagaagctttccatcagtaaaaggatgttttcttttttcacacagtaaaaattcttatcattcaaggatattggaaccacaggactatttggataaaaaacattatttgcaaattaatgcgcataggccatcttacttttattgcaaaatggcatgtgctgccatctattattcatttttaaatggtcatttcttattcagtgagtgctttagtgttttaaactatatggataagaatgcaggtagataatattctaggcataaaacatttaatgtaccttacctcatgcaatattctttggattctttgttgatttatgatattgctaatataatattttcttaaaatatataacaatatcttttatgcattttgagttccagctggtgcttctttatatttagaaattataatgggaaggtcatttaatttacagatggttttaaaattgaggtaatatctgaggtggcataatttaaaaatatttagcaaatttgtttcatatatactgtcttatttctagatttgtttaaaattggaatatgaaaaactaatggataaagctagcataaaattgatattttagtttgtattattaatatatcatgttaccttatatattaatctactcttgattctgctaattattaccaacaaaattgtattcatgacattttattaatcctctgtgaattttctgtaaataaaattatttctgaaaatctcta

SEQ ID NO: 63216 - DNA, 1370 bp, Homo sapiens
cacatataataatagcaactcctggtcgactgattgaccacttgaaacctttcgtattttccggggctggcaagcgcttcctgcgcagcgcctaggcgacctggagtttgtgacgctgtgatggtctagaggctggagattcaagatctgggtgccatcattttctggttctgttgatgaccctcttccagcaattcccttgactgaagacgttctcataacattaggaaaagaagagttccaaaagctgagacaagatcttgaaatggtactgtccactaaggagtcaaagaatgaaaagttaaaggaagacttagaaagaatctttaatgaactgaaaactaaaatgcttaatataaaagaatataaggagaaactcttgagtaccttgggcgagtttctagaagaccattttcctctgcctgatagaagtgttaaaaagaaaaagaaaaacattcaagaatcatctgtaaacctgataacactgcatgaaatgttagagattcttataaatagattatttgatgttccacatgatccatatgtcaaaattagtgattccttttggccaccttatgttgagctgctgctgcgtaatggaattgccttgagacatccagaagatccaacccgaataagattagaagctttccatcagtaaaaggatgttttcttttttcacacagtaaaaattcttatcattcaaggatattggaaccacaggactatttggataaaaaacattatttgcaaattaatgcgcataggccatcttacttttattgcaaaatggcatgtgctgccatctattattcatttttaaatggtcatttcttattcagtgagtgctttagtgttttaaactatatggataagaatgcaggtagataatattctaggcataaaacatttaatgtaccttacctcatgcaatattctttggattctttgttgatttatgatattgctaatataatattttcttaaaatatataacaatatcttttatgcattttgagttccagctggtgcttctttatatttagaaattataatgggaaggtcatttaatttacagatggttttaaaattgaggtaatatctgaggtggcataatttaaaaatatttagcaaatttgtttcatatatactgtcttatttctagatttgtttaaaattggaatatgaaaaactaatggataaagctagcataaaattgatattttagtttgtattattaatatatcatgttaccttatatattaatctactcttgattctgctaattattaccaacaaaattgtattcatgacattttattaatcctctgtgaattttctgtaaataaaattatttctgaaaatctcta

SEQ ID NO: 63217 - DNA, 879 bp, Homo sapiens
cacatataataatagcaactcctggtcgactgattgaccacttgaaacctttcgtattttccggggctggcaagcgcttcctgcgcagcgcctaggcgacctggagtttgtgacgctgtgatggtctagaggctggagattcaagatctgggtgccatcattttctggttctgttgatgaccctcttccagtgtcagaataaattatcacttattggaactgaaacactcaccgattcaaatgctcagctatcattgttaattatgcaagtaaaatgtttaaccgctgaactcagtcaatggcagaaaaaaacacctgaaacaattcccttgactgaagacgttctcataacattaggaaaagaagagttccaaaagctgagacaagatcttgaaatggtactgtccactaaggagtcaaagaatgaaaagttaaaggaagacttagaaagggaacaacggtggttggatgaacagcaacagataatggaatctcttaatgtactacacagtgaattgaaaaataaggttgaaacattttctgaatcaagaatctttaatgaactgaaaactaaaatgcttaatataaaagaatataaggagaaactcttgagtaccttgggcgagtttctagaagaccattttcctctgcctgatagaagtgttaaaaagaaaaagaaaaacattcaagaatcatctgtaaacctgataacactgcatgaaatgttagagattcttataaatagattatttgatgttccacatgatccatatgtcaaaattagtgattccttttggccaccttatgtaactgtgggcgtaaggatggctgaactcagaagacaacgctagatgaattccccaacgcggtttttcacca

SEQ ID NO: 63218 - DNA, 1541 bp, Homo sapiens
cacatataataatagcaactcctggtcgactgattgaccacttgaaacctttcgtattttccggggctggcaagcgcttcctgcgcagcgcctaggcgacctggagtttgtgacgctgtgatggtctagaggctggagattcaagatctgggtgccatcattttctggttctgttgatgaccctcttccaggttacatacagcttacatcttgcatcctcaagcggtagagagcaaactcttaaatgtttctatatgtttttattctactgccacattaaatcgccaagccagataatttgttgaatatttatccctcaccctccgcccccaccacatgtgcagagttttgcattacttttgcatattgataatgtattttggtggtcagtaaagaaatatttatgtttgactttttcgcttaaaaatattctaaaattcatgatgactgactttggctttgtgaacttaaactgtatcttatgggtatagcaggtgagattttcagccttctactagttgacattcaaattgttaatagctaacactgataaagctctttatatgctagctacagtacttatatatatatatttatatactcatttaattgtcataaccctagggagtatttaatattatcttcattttataggaaaggaaactgaggcatagaaagtttaagtgacttgcccaagtctcatagcttttaaatatcaaaacagatttaaacctgtatagtctggttgcagagttcatacctttaaagtttttttttctctaagtaatgtgccagtaaacataattgtatagacttatgcagacatatctatctttaggattattcctaagaatagaacttctggatcacaagaaatgcatgtaaaattttgatggatattatcatacaaagtgattgttccaccaacagtgcaagcctcttatttcacatgcttgccagtattatctcttaccaattttacattattgccattctgaatgaaaattaatgcttgtttaatttggattttcataaattatatatgagcttatgaatgtactttttctgtatttaaaaggtatttgttttttctttgaattcctcatttgtgttctttgccagtttctattgaattgtttttgttgtttacctttttattgtaaaaatgcagacacaaaataaacgtaaagtttactaattattatgaggtgaacacccttaccatcatgctagtcaaaaaataaaactttgataattacctcagaaatctctccatttggcccatcccagccacaacccttttcccccttccactcttcctccaaagtaattggtaacctgacttttttggtaatcttttttaaattttttttaatggtgagttgtttggtttcttcttatgaatttgtaggcacttgttatatattaaggaaattaggtcttgggttgccatatatattacaagtatttctcctaggtttgggggttttaaattttaactttgttgatgagatgtttgtccatgcagaattaaaaaaaaa

SEQ ID NO: 63219 - DNA, 1747 bp, Homo sapiens
cacatataataatagcaactcctggtcgactgattgaccacttgaaacctttcgtattttccggggctggcaagcgcttcctgcgcagcgcctaggcgacctggagtttgtgacgctgtgatgatacctgacttcccagccgggctttgagtcccgttcttctcggcttcccgcgcgccaacgcaagctccataacctcaccaatatttagagaaagatggaagggtggggacagaaggaagtggttaactcgcgggtttcctttcagatggactaaacatgttttctctcctgacctttattctctcacacactctctgaagaaggtggtctagaggctggagattcaagatctgggtgccatcattttctggttctgttgatgaccctcttccaggttacatacagcttacatcttgcatcctcaagcggtagagagcaaactcttaaatgtttctatatgtttttattctactgccacattaaatcgccaagccagataatttgttgaatatttatccctcaccctccgcccccaccacatgtgcagagttttgcattacttttgcatattgataatgtattttggtggtcagtaaagaaatatttatgtttgactttttcgcttaaaaatattctaaaattcatgatgactgactttggctttgtgaacttaaactgtatcttatgggtatagcaggtgagattttcagccttctactagttgacattcaaattgttaatagctaacactgataaagctctttatatgctagctacagtacttatatatatatatttatatactcatttaattgtcataaccctagggagtatttaatattatcttcattttataggaaaggaaactgaggcatagaaagtttaagtgacttgcccaagtctcatagcttttaaatatcaaaacagatttaaacctgtatagtctggttgcagagttcatacctttaaagtttttttttctctaagtaatgtgccagtaaacataattgtatagacttatgcagacatatctatctttaggattattcctaagaatagaacttctggatcacaagaaatgcatgtaaaattttgatggatattatcatacaaagtgattgttccaccaacagtgcaagcctcttatttcacatgcttgccagtattatctcttaccaattttacattattgccattctgaatgaaaattaatgcttgtttaatttggattttcataaattatatatgagcttatgaatgtactttttctgtatttaaaaggtatttgttttttctttgaattcctcatttgtgttctttgccagtttctattgaattgtttttgttgtttacctttttattgtaaaaatgcagacacaaaataaacgtaaagtttactaattattatgaggtgaacacccttaccatcatgctagtcaaaaaataaaactttgataattacctcagaaatctctccatttggcccatcccagccacaacccttttcccccttccactcttcctccaaagtaattggtaacctgacttttttggtaatcttttttaaattttttttaatggtgagttgtttggtttcttcttatgaatttgtaggcacttgttatatattaaggaaattaggtcttgggttgccatatatattacaagtatttctcctaggtttgggggttttaaattttaactttgttgatgagatgtttgtccatgcagaattaaaaaaaaa

SEQ ID NO: 63220 - DNA, 1248 bp, Homo sapiens
cacatataataatagcaactcctggtcgactgattgaccacttgaaacctttcgtattttccggggctggcaagcgcttcctgcgcagcgcctaggcgacctggagtttgtgacgctgtgatggtctagaggctggagattcaagatctgggtgccatcattttctggttctgttgatgaccctcttccagtttttcttataaggctaaaaattcacaaagcatatatcaatgaatcaggaggatctagatccggatagtactacagatgtgggagatgttacaaatactgaagaagaacttattagagaatgtgaagaaatgtggaaagatatggaagaatgtcagaataaattatcacttattggaactgaaacactcaccgattcaaatgctcagctatcattgttaattatgcaagtaaaatgtttaaccgctgaactcagtcaatggcagaaaaaaacacctgaaaggtctcatcgtgttgtccaggctggagtacagtggcacaatcatggctcattgcagccccgatctcccgggttcaagtgatcctcctacctcagcctcctgagtagctaggactacaagtgtgtgccaccatgcttggttagtggttggtttttgtatttttttgtagagacggggtttcaccatgttacccaggctggtcttgaactcctgggctcaagggatcctcctgccttggcctctcaaagtgcctggattactggcgtgccagtgatttgtttcttaatgaatgcaatttacctagtggaagagaaaagttataatttattttagatacttacacaaaagggacacatagttggatatgtcttctgtcttgtccagctggtgccaactatgtttttgtcttcagttaggaagtagaagacagcataaaaatttataattgtgatactccactagtacatcttttttttttaaatgtgagagcttaagtttctctatgcaatatacatctatacaggcacatctcattttattgtgcttcactttattgcactttgcagacactctatgtttaacaaattcagtttgtggcgagcctgtgtcacattttggtaatctcacagtattttagacttttaagtcattattacatctggttgggggatctgtgatcagtggtctttgatcttactattttaattgttttgaggaaccacaagctgcacctgtgtaagacagtaaatttaaccaataaatgttgtgtgtattctga

SEQ ID NO: 63221 - DNA, 330 bp, Homo sapiens
tttcctttcagatggactaaacatgttttctctcctgacctttattctctcacacactctctgaagaaggtggtgagtgcttgttactgtttctgggggtggggtggagaagcagctacttcaaataaccaaaagacctagggcagaacgggtcactcttctttcttctctctggtataggatttcatctcctagcagtcatctgaactctttctcctcctcctcatctgtcttcttcatttttaaaaaattaggtaaaaagcacataacataaaatgtattatcttaatctcttttttaaaaaatcaaatacagcttgtcaaaatgacc

SEQ ID NO: 63222 - DNA, 439 bp, Homo sapiens
ctttatcctaaagaagatattaatctcaaaagaagtgggaggattgtaaattctttctaaccaatttttaggaaatgtttttctaaattaaagatgcaaaaattcactttaaagcttttttcattagctaatacccatagtcctttcaaaaaggaaattcaaatttgtagattaaaagtattaaacagttgttgaaaaagaaaagaggtcaatattctttgacaaaaaactttcttatagctatattgactttttcccaagtaaagtatattttgaatgatattttctcctagattcttataaatagattatttgatgttccacatgatccatatgtcaaaattagtgattccttttggccaccttatgttgagctgctgctgcgtaatggaattgccttgagacatccagaagatccaacccgaataagattagaagc

SEQ ID NO: 63223 - DNA, 409 bp, Homo sapiens
gatattgctaatataatattttcttaaaatatataacaatatcttttatgcattttgagttccagctggtgcttctttatatttagaaattataatgggaaggtcatttaatttacagatggttttaaaattgaggtaatatctgaggtggcataatttaaaaatatttagcaaatttgtttcatatatactgtcttatttctagatttgtttaaaattggaatatgaaaaactaatggataaagctagcataaaattgatattttagtttgtattattaatatatcatgttaccttatatattaatctactcttgattctgctaattattaccaacaaaattgtattcatgacattttattaatcctctgtgaattttctgtaaataaaattatttctgaaaatctct

SEQ ID NO: 63224 - DNA, 1747 bp, Homo sapiens
aggatcccccatctggaggtcgctccggggctggcaagcgcttcctgcgcagcgcctaggcgacctggagtttgtgacgctgtgatggtctagaggctggagattcaagatctgggtgccatcattttctggttctgttgatgaccctcttccaggttacatacagcttacatcttgcatcctcaagcgtttttcttataaggctaaaaattcacaaagcatatatcaatgaatcaggaggatctagatccggatagtactacagatgtgggagatgttacaaatactgaagaagaacttattagagaatgtgaagaaatgtggaaagatatggaagaatgtcagaataaattatcacttattggaactgaaacactcaccgattcaaatgctcagctatcattgttaattatgcaagtaaaatgtttaaccgctgaactcagtcaatggcagaaaaaaacacctgaaacaattcccttgactgaagacgttctcataacattaggaaaagaagagttccaaaagctgagacaagatcttgaaatggtactgtccactaaggagtcaaagaatgaaaagttaaaggaagacttagaaagggaacaacggtggttggatgaacagcaacagataatggaatctcttaatgtactacacagtgaattgaaaaataaggttgaaacattttctgaatcaagaatctttaatgaactgaaaactaaaatgcttaatataaaagaatataaggagaaactcttgagtaccttgggcgagtttctagaagaccattttcctctgcctgatagaagtgttaaaaagaaaaagaaaaacattcaagaatcatctgtaaacctgataacactgcatgaaatgttagagattcttataaatagattatttgatgttccacatgatccatatgtcaaaattagtgattccttttggccaccttatgttgagctgctgctgcgtaatggaattgccttgagacatccagaagatccaacccgaataagattagaagctttccatcagtaaaaggatgttttcttttttcacacagtaaaaattcttatcattcaaggatattggaaccacaggactatttggataaaaaacattatttgcaaattaatgcgcataggccatcttacttttattgcaaaatggcatgtgctgccatctattattcatttttaaatggtcatttcttattcagtgagtgctttagtgttttaaactatatggataagaatgcaggtagataatattctaggcataaaacatttaatgtaccttacctcatgcaatattctttggattctttgttgatttatgatattgctaatataatattttcttaaaatatataacaatatcttttatgcattttgagttccagctggtgcttctttatatttagaaattataatgggaaggtcatttaatttacagatggttttaaaattgaggtaatatctgaggtggcataatttaaaaatatttagcaaatttgtttcatatatactgtcttatttctagatttgtttaaaattggaatatgaaaaactaatggataaagctagcataaaattgatattttagtttgtattattaatatatcatgttaccttatatattaatctactcttgattctgctaattattaccaacaaaattgtattcatgacattttattaatcctctgtgaattttctgtaaataaaattatttctgaaaatctcta

SEQ ID NO: 63225 - DNA, 1693 bp, Homo sapiens
aggatcccccatctggaggtcgctccggggctggcaagcgcttcctgcgcagcgcctaggcgacctggagtttgtgacgctgtgatggtctagaggctggagattcaagatctgggtgccatcattttctggttctgttgatgaccctcttccaggttacatacagcttacatcttgcatcctcaagcgtttttcttataaggctaaaaattcacaaagcatatatcaatgaatcaggaggatctagatccggatagtactacagatgtgggagatgttacaaatactgaagaagaacttattagagaatgtgaagaaatgtggaaagatatggaagaatgtcagaataaattatcacttattggaactgaaacactcaccgattcaaatgctcagctatcattgttaattatgcaagtaaaatgtttaaccgctgaactcagtcaatggcagaaaaaaacacctgaaacaattcccttgactgaagacgttctcataacattaggaaaagaagagttccaaaagctgagacaagatcttgaaatggtactgtccactaaggagtcaaagaatgaaaagttaaaggaagacttagaaagggaacaacggtggttggatgaacagcaacagataatggaatctcttaatgtactacacagtgaattgaaaaataaggttgaaacattttctgaatcaagaatctttaatgaactgaaaactaaaatgcttaatataaaagaatataaggagaaactcttgagtaccttgggcgagtttctagaagaccattttcctctgcctgatagaagtgttaaaaagaaaaagaaaaacattcaagaatcatctgtaaacctgataacactgcatgaaatgttagagattcttataaatagattatttgatgttccacatgatccatatgtcaaaattagtgattccttttggccaccttatgttgagctgctgctgcgtaatggaattgccttgagacatccagaagatccaacccgaataagattagaagctttccatcagtaaaaggatgttttcttttttcacacagtaaaaattcttatcattcaaggatattggaaccacaggactatttggataaaaaacattatttgcaaattaatgcgcataggccatcttacttttattgcaaaatggcatgtgctgccatctattattcatttttaaatggtcatttcttattcagtgagtgctttagtgttttaaactatatggataagaatgcaggtagataatattctaggcattatgatattgctaatataatattttcttaaaatatataacaatatcttttatgcattttgagttccagctggtgcttctttatatttagaaattataatgggaaggtcatttaatttacagatggttttaaaattgaggtaatatctgaggtggcataatttaaaaatatttagcaaatttgtttcatatatactgtcttatttctagatttgtttaaaattggaatatgaaaaactaatggataaagctagcataaaattgatattttagtttgtattattaatatatcatgttaccttatatattaatctactcttgattctgctaattattaccaacaaaattgtattcatgacattttattaatcctctgtgaattttctgtaaataaaattatttctgaaaatctcta

SEQ ID NO: 63226 - DNA, 1862 bp, Homo sapiens
cacatataataatagcaactcctggtcgactgattgaccacttgaaacctttcgtattttccggggctggcaagcgcttcctgcgcagcgcctaggcgacctggagtttgtgacgctgtgatggtctagaggctggagattcaagatctgggtgccatcattttctggttctgttgatgaccctcttccaggttacatacagcttacatcttgcatcctcaagcgacagccacaaagtcacactcagtttcagggggagaggaaaaagactctgtctcttgatggggaatgatgaaatattgcttttttcttataaggctaaaaattcacaaagcatatatcaatgaatcaggaggatctagatccggatagtactacagatgtgggagatgttacaaatactgaagaagaacttattagagaatgtgaagaaatgtggaaagatatggaagaatgtcagaataaattatcacttattggaactgaaacactcaccgattcaaatgctcagctatcattgttaattatgcaagtaaaatgtttaaccgctgaactcagtcaatggcagaaaaaaacacctgaaacaattcccttgactgaagacgttctcataacattaggaaaagaagagttccaaaagctgagacaagatcttgaaatggtactgtccactaaggagtcaaagaatgaaaagttaaaggaagacttagaaagggaacaacggtggttggatgaacagcaacagataatggaatctcttaatgtactacacagtgaattgaaaaataaggttgaaacattttctgaatcaagaatctttaatgaactgaaaactaaaatgcttaatataaaagaatataaggagaaactcttgagtaccttgggcgagtttctagaagaccattttcctctgcctgatagaagtgttaaaaagaaaaagaaaaacattcaagaatcatctgtaaacctgataacactgcatgaaatgttagagattcttataaatagattatttgatgttccacatgatccatatgtcaaaattagtgattccttttggccaccttatgttgagctgctgctgcgtaatggaattgccttgagacatccagaagatccaacccgaataagattagaagctttccatcagtaaaaggatgttttcttttttcacacagtaaaaattcttatcattcaaggatattggaaccacaggactatttggataaaaaacattatttgcaaattaatgcgcataggccatcttacttttattgcaaaatggcatgtgctgccatctattattcatttttaaatggtcatttcttattcagtgagtgctttagtgttttaaactatatggataagaatgcaggtagataatattctaggcataaaacatttaatgtaccttacctcatgcaatattctttggattctttgttgatttatgatattgctaatataatattttcttaaaatatataacaatatcttttatgcattttgagttccagctggtgcttctttatatttagaaattataatgggaaggtcatttaatttacagatggttttaaaattgaggtaatatctgaggtggcataatttaaaaatatttagcaaatttgtttcatatatactgtcttatttctagatttgtttaaaattggaatatgaaaaactaatggataaagctagcataaaattgatattttagtttgtattattaatatatcatgttaccttatatattaatctactcttgattctgctaattattaccaacaaaattgtattcatgacattttattaatcctctgtgaattttctgtaaataaaattatttctgaaaatctcta

SEQ ID NO: 63227 - DNA, 1882 bp, Homo sapiens
ttcatgtcttcttactcagttgtcaatttctcagtaaccttatatgaccaccttatttaaaattatattgtccttgccctagcatttcctatgtttcttccttgtcttttctccatggcacttataaatcatttgatatactaagtatatatatgttttattttttattttattgtctgttttccttacttagaataaggttcacggtaggagggatttttgtctattttgttcattgctatattcttaccccctagatgagtatctggcaggtaataagtgttcaaccaatactgctgaatgaataaatattttttgctttagtttttcttataaggctaaaaattcacaaagcatatatcaatgaatcaggaggatctagatccggatagtactacagatgtgggagatgttacaaatactgaagaagaacttattagagaatgtgaagaaatgtggaaagatatggaagaatgtcagaataaattatcacttattggaactgaaacactcaccgattcaaatgctcagctatcattgttaattatgcaagtaaaatgtttaaccgctgaactcagtcaatggcagaaaaaaacacctgaaacaattcccttgactgaagacgttctcataacattaggaaaagaagagttccaaaagctgagacaagatcttgaaatggtactgtccactaaggagtcaaagaatgaaaagttaaaggaagacttagaaagggaacaacggtggttggatgaacagcaacagataatggaatctcttaatgtactacacagtgaattgaaaaataaggttgaaacattttctgaatcaagaatctttaatgaactgaaaactaaaatgcttaatataaaagaatataaggagaaactcttgagtaccttgggcgagtttctagaagaccattttcctctgcctgatagaagtgttaaaaagaaaaagaaaaacattcaagaatcatctgtaaacctgataacactgcatgaaatgttagagattcttataaatagattatttgatgttccacatgatccatatgtcaaaattagtgattccttttggccaccttatgttgagctgctgctgcgtaatggaattgccttgagacatccagaagatccaacccgaataagattagaagctttccatcagtaaaaggatgttttcttttttcacacagtaaaaattcttatcattcaaggatattggaaccacaggactatttggataaaaaacattatttgcaaattaatgcgcataggccatcttacttttattgcaaaatggcatgtgctgccatctattattcatttttaaatggtcatttcttattcagtgagtgctttagtgttttaaactatatggataagaatgcaggtagataatattctaggcataaaacatttaatgtaccttacctcatgcaatattctttggattctttgttgatttatgatattgctaatataatattttcttaaaatatataacaatatcttttatgcattttgagttccagctggtgcttctttatatttagaaattataatgggaaggtcatttaatttacagatggttttaaaattgaggtaatatctgaggtggcataatttaaaaatatttagcaaatttgtttcatatatactgtcttatttctagatttgtttaaaattggaatatgaaaaactaatggataaagctagcataaaattgatattttagtttgtattattaatatatcatgttaccttatatattaatctactcttgattctgctaattattaccaacaaaattgtattcatgacattttattaatcctctgtgaattttctgtaaataaaattatttctgaaaatctcta

SEQ ID NO: 63228 - DNA, 1701 bp, Homo sapiens
cacatataataatagcaactcctggtcgactgattgaccacttgaaacctttcgtattttccggggctggcaagcgcttcctgcgcagcgcctaggcgacctggagtttgtgacgctgtgatggtctagaggctggagattcaagatctgggtgccatcattttctggttctgttgatgaccctcttccaggaggatctagatccggatagtactacagatgtgggagatgttacaaatactgaagaagaacttattagagaatgtgaagaaatgtggaaagatatggaagaatgtcagaataaattatcacttattggaactgaaacactcaccgattcaaatgctcagctatcattgttaattatgcaagtaaaatgtttaaccgctgaactcagtcaatggcagaaaaaaacacctgaaacaattcccttgactgaagacgttctcataacattaggaaaagaagagttccaaaagctgagacaagatcttgaaatggtactgtccactaaggagtcaaagaatgaaaagttaaaggaagacttagaaagggaacaacggtggttggatgaacagcaacagataatggaatctcttaatgtactacacagtgaattgaaaaataaggttgaaacattttctgaatcaagaatctttaatgaactgaaaactaaaatgcttaatataaaagaatataaggagaaactcttgagtaccttgggcgagtttctagaagaccattttcctctgcctgatagaagtgttaaaaagaaaaagaaaaacattcaagaatcatctgtaaacctgataacactgcatgaaatgttagagattcttataaatagattatttgatgttccacatgatccatatgtcaaaattagtgattccttttggccaccttatgttgagctgctgctgcgtaatggaattgccttgagacatccagaagatccaacccgaataagattagaagctttccatcagtaaaaggatgttttcttttttcacacagtaaaaattcttatcattcaaggatattggaaccacaggactatttggataaaaaacattatttgcaaattaatgcgcataggccatcttacttttattgcaaaatggcatgtgctgccatctattattcatttttaaatggtcatttcttattcagtgagtgctttagtgttttaaactatatggataagaatgcaggtagataatattctaggcataaaacatttaatgtaccttacctcatgcaatattctttggattctttgttgatttatgatattgctaatataatattttcttaaaatatataacaatatcttttatgcattttgagttccagctggtgcttctttatatttagaaattataatgggaaggtcatttaatttacagatggttttaaaattgaggtaatatctgaggtggcataatttaaaaatatttagcaaatttgtttcatatatactgtcttatttctagatttgtttaaaattggaatatgaaaaactaatggataaagctagcataaaattgatattttagtttgtattattaatatatcatgttaccttatatattaatctactcttgattctgctaattattaccaacaaaattgtattcatgacattttattaatcctctgtgaattttctgtaaataaaattatttctgaaaatctcta

SEQ ID NO: 63229 - DNA, 1503 bp, Homo sapiens
cacatataataatagcaactcctggtcgactgattgaccacttgaaacctttcgtattttccggggctggcaagcgcttcctgcgcagcgcctaggcgacctggagtttgtgacgctgtgatggtctagaggctggagattcaagatctgggtgccatcattttctggttctgttgatgaccctcttccaggttacatacagcttacatcttgcatcctcaagcgcaattcccttgactgaagacgttctcataacattaggaaaagaagagttccaaaagctgagacaagatcttgaaatggtactgtccactaaggagtcaaagaatgaaaagttaaaggaagacttagaaagggaacaacggtggttggatgaacagcaacagataatggaatctcttaatgtactacacagtgaattgaaaaataaggttgaaacattttctgaatcaagaatctttaatgaactgaaaactaaaatgcttaatataaaagaatataaggagaaactcttgagtaccttgggcgagtttctagaagaccattttcctctgcctgatagaagtgttaaaaagaaaaagaaaaacattcaagaatcatctgtaaacctgataacactgcatgaaatgttagagattcttataaatagattatttgatgttccacatgatccatatgtcaaaattagtgattccttttggccaccttatgttgagctgctgctgcgtaatggaattgccttgagacatccagaagatccaacccgaataagattagaagctttccatcagtaaaaggatgttttcttttttcacacagtaaaaattcttatcattcaaggatattggaaccacaggactatttggataaaaaacattatttgcaaattaatgcgcataggccatcttacttttattgcaaaatggcatgtgctgccatctattattcatttttaaatggtcatttcttattcagtgagtgctttagtgttttaaactatatggataagaatgcaggtagataatattctaggcataaaacatttaatgtaccttacctcatgcaatattctttggattctttgttgatttatgatattgctaatataatattttcttaaaatatataacaatatcttttatgcattttgagttccagctggtgcttctttatatttagaaattataatgggaaggtcatttaatttacagatggttttaaaattgaggtaatatctgaggtggcataatttaaaaatatttagcaaatttgtttcatatatactgtcttatttctagatttgtttaaaattggaatatgaaaaactaatggataaagctagcataaaattgatattttagtttgtattattaatatatcatgttaccttatatattaatctactcttgattctgctaattattaccaacaaaattgtattcatgacattttattaatcctctgtgaattttctgtaaataaaattatttctgaaaatctcta

SEQ ID NO: 63230 - DNA, 1865 bp, Homo sapiens
cacatataataatagcaactcctggtcgactgattgaccacttgaaacctttcgtattttccggggctggcaagcgcttcctgcgcagcgcctaggcgacctggagtttgtgacgctgtgatggtctagaggctggagattcaagatctgggtgccatcattttctggttctgttgatgaccctcttccaggttacatacagcttacatcttgcatcctcaagcgtttttcttataaggctaaaaattcacaaagcatatatcaatgaatcaggaggatctagatccggatagtactacagatgtgggagatgttacaaatactgaagaagaacttattagagaatgtgaagaaatgtggaaagatatggaagaatgtcagaataaattatcacttattggaactgaaacactcaccgattcaaatgctcagctatcattgttaattatgcaagtaaaatgtttaaccgctgaactcagtcaatggcagaaaaaaacacctgaaacaattcccttgactgaagacgttctcataacattaggaaaagaagagattctgcagatgatgattctctcctacaaaccagttgggtgtcctcttaattcacttcagttctgacataatctacttggagttccaaaagctgagacaagatcttgaaatggtactgtccactaaggagtcaaagaatgaaaagttaaaggaagacttagaaagggaacaacggtggttggatgaacagcaacagataatggaatctcttaatgtactacacagtgaattgaaaaataaggttgaaacattttctgaatcaagaatctttaatgaactgaaaactaaaatgcttaatataaaagaatataaggagaaactcttgagtaccttgggcgagtttctagaagaccattttcctctgcctgatagaagtgttaaaaagaaaaagaaaaacattcaagaatcatctgtaaacctgataacactgcatgaaatgttagagattcttataaatagattatttgatgttccacatgatccatatgtcaaaattagtgattccttttggccaccttatgttgagctgctgctgcgtaatggaattgccttgagacatccagaagatccaacccgaataagattagaagctttccatcagtaaaaggatgttttcttttttcacacagtaaaaattcttatcattcaaggatattggaaccacaggactatttggataaaaaacattatttgcaaattaatgcgcataggccatcttacttttattgcaaaatggcatgtgctgccatctattattcatttttaaatggtcatttcttattcagtgagtgctttagtgttttaaactatatggataagaatgcaggtagataatattctaggcataaaacatttaatgtaccttacctcatgcaatattctttggattctttgttgatttatgatattgctaatataatattttcttaaaatatataacaatatcttttatgcattttgagttccagctggtgcttctttatatttagaaattataatgggaaggtcatttaatttacagatggttttaaaattgaggtaatatctgaggtggcataatttaaaaatatttagcaaatttgtttcatatatactgtcttatttctagatttgtttaaaattggaatatgaaaaactaatggataaagctagcataaaattgatattttagtttgtattattaatatatcatgttaccttatatattaatctactcttgattctgctaattattaccaacaaaattgtattcatgacattttattaatcctctgtgaattttctgtaaataaaattatttctgaaaatctcta

SEQ ID NO: 63231 - DNA, 2088 bp, Homo sapiens
aggatcccccatctggaggtcgctccggggctggcaagcgcttcctgcgcagcgcctaggcgacctggagtttgtgacgctgtgatggtctagaggctggagattcaagatctgggtgccatcattttctggttctgttgatgaccctcttccaggttacatacagcttacatcttgcatcctcaagcgtttttcttataaggctaaaaattcacaaagcatatatcaatgaatcaggaggatctagatccggatagtactacagatgtgggagatgttacaaatactgaagaagaacttattagagaatgtgaagaaatgtggaaagatatggaagaatgtcagaataaattatcacttattggaactgaaacactcaccgattcaaatgctcagctatcattgttaattatgcaagtaaaatgtttaaccgctgaactcagtcaatggcagaaaaaaacacctgaaacaattcccttgactgaagacgttctcataacattaggaaaagaagagttccaaaagctgagacaagatcttgaaatggtactgtccactaaggagtcaaagaatgaaaagttaaaggaagacttagaaagggaacaacggtggttggatgaacagcaacagataatggaatctcttaatgtactacacagtgaattgaaaaataaggttgaaacattttctgaatcaagggtattaattttatgttctaggtttttaaaataggaaaagtattttattttttgtgttacatgaaacatagatgaagttaaatgttaccaggaatcaggagtcttgccctaacttttgttaactattagctattatatgatcttttatgggtgacttgacttgactgtacctttggtttctctacttgttatatagacaatatgattttcaaaaaggtagttatttggtttgagcaaatgaagttttaacaaagtttttgatcaacttcatgaataactagttacatgtgtgtatgtgttttatcagttaaatgtttctcttaatttttttaatctattagaatctttaatgaactgaaaactaaaatgcttaatataaaagaatataaggagaaactcttgagtaccttgggcgagtttctagaagaccattttcctctgcctgatagaagtgttaaaaagaaaaagaaaaacattcaagaatcatctgtaaacctgataacactgcatgaaatgttagagattcttataaatagattatttgatgttccacatgatccatatgtcaaaattagtgattccttttggccaccttatgttgagctgctgctgcgtaatggaattgccttgagacatccagaagatccaacccgaataagattagaagctttccatcagtaaaaggatgttttcttttttcacacagtaaaaattcttatcattcaaggatattggaaccacaggactatttggataaaaaacattatttgcaaattaatgcgcataggccatcttacttttattgcaaaatggcatgtgctgccatctattattcatttttaaatggtcatttcttattcagtgagtgctttagtgttttaaactatatggataagaatgcaggtagataatattctaggcataaaacatttaatgtaccttacctcatgcaatattctttggattctttgttgatttatgatattgctaatataatattttcttaaaatatataacaatatcttttatgcattttgagttccagctggtgcttctttatatttagaaattataatgggaaggtcatttaatttacagatggttttaaaattgaggtaatatctgaggtggcataatttaaaaatatttagcaaatttgtttcatatatactgtcttatttctagatttgtttaaaattggaatatgaaaaactaatggataaagctagcataaaattgatattttagtttgtattattaatatatcatgttaccttatatattaatctactcttgattctgctaattattaccaacaaaattgtattcatgacattttattaatcctctgtgaattttctgtaaataaaattatttctgaaaatctcta

SEQ ID NO: 63232 - DNA, 1501 bp, Homo sapiens
cacatataataatagcaactcctggtcgactgattgaccacttgaaacctttcgtattttccggggctggcaagcgcttcctgcgcagcgcctaggcgacctggagtttgtgacgctgtgatggtctagaggctggagattcaagatctgggtgccatcattttctggttctgttgatgaccctcttccagcaattcccttgactgaagacgttctcataacattaggaaaagaagagttccaaaagctgagacaagatcttgaaatggtactgtccactaaggagtcaaagaatgaaaagttaaaggaagacttagaaagatattgcttgtattgtttttccatgtcgaaagggaacaacggtggttggatgaacagcaacagataatggaatctcttaatgtactacacagtgaattgaaaaataaggttgaaacattttctgaatcaagaatctttaatgaactgaaaactaaaatgcttaatataaaagaatataaggagaaactcttgagtaccttgggcgagtttctagaagaccattttcctctgcctgatagaagtgttaaaaagaaaaagaaaaacattcaagaatcatctgtaaacctgataacactgcatgaaatgttagagattcttataaatagattatttgatgttccacatgatccatatgtcaaaattagtgattccttttggccaccttatgttgagctgctgctgcgtaatggaattgccttgagacatccagaagatccaacccgaataagattagaagctttccatcagtaaaaggatgttttcttttttcacacagtaaaaattcttatcattcaaggatattggaaccacaggactatttggataaaaaacattatttgcaaattaatgcgcataggccatcttacttttattgcaaaatggcatgtgctgccatctattattcatttttaaatggtcatttcttattcagtgagtgctttagtgttttaaactatatggataagaatgcaggtagataatattctaggcataaaacatttaatgtaccttacctcatgcaatattctttggattctttgttgatttatgatattgctaatataatattttcttaaaatatataacaatatcttttatgcattttgagttccagctggtgcttctttatatttagaaattataatgggaaggtcatttaatttacagatggttttaaaattgaggtaatatctgaggtggcataatttaaaaatatttagcaaatttgtttcatatatactgtcttatttctagatttgtttaaaattggaatatgaaaaactaatggataaagctagcataaaattgatattttagtttgtattattaatatatcatgttaccttatatattaatctactcttgattctgctaattattaccaacaaaattgtattcatgacattttattaatcctctgtgaattttctgtaaataaaattatttctgaaaatctcta

SEQ ID NO: 63233 - DNA, 1020 bp, Homo sapiens
cacatataataatagcaactcctggtcgactgattgaccacttgaaacctttcgtattttccggggctggcaagcgcttcctgcgcagcgcctaggcgacctggagtttgtgacgctgtgatggtctagaggctggagattcaagatctgggtgccatcattttctggttctgttgatgaccctcttccaggttacatacagcttacatcttgcatcctcaagcgtttttcttataaggctaaaaattcacaaagcatatatcaatgaatcaggaggatctagatccggatagtactacagatgtgggagatgttacaaatactgaagaagaacttattagagaatgtgaagaaatgtggaaagatatggaagaatgtcagaataaattatcacttattggaactgaaacactcaccgattcaaatgctcagctatcattgttaattatgcaagtaaaatgtttaaccgctgaactcagtcaatggcagaaaaaaacacctgaaacaattcccttgactgaagacgttctcataacattaggaaaagaagagattctgcagatgatgattctctcctacaaaccagttgggtgtcctcttaattcacttcagttctgacataatctacttggagttccaaaagctgagacaagatcttgaaatggtactgtccactaaggagtcaaagaatgaaaagttaaaggaagacttagaaagggaacaacggtggttggatgaacagcaacagataatggaatctcttaatgtactacacagtgaattgaaaaataaggttgaaacattttctgaatcaagaatctttaatgaactgaaaactaaaatgcttaatataaaagaatataaggagaaactcttgagtaccttgggcgagtttctagaagaccattttcctctgcctgatagaagtgttaaaaagaaaaagatggagtctccctgtgtcacccaggctggaatgcagtggcatgatctcgtctcactgcaacctctgcctcctgggtt

SEQ ID NO: 63234 - DNA, 376 bp, Homo sapiens
tatctttgaagaccaaatacccaaaagatctgcttcaaccttccccagttaatcttttgccagaagattcacaatctgaatgtggctgcctgtccatcattggaagtaattggaaagaaaactttgcctgaagctacatgagaactggaacccttaaatcatgaatggtggcaagattccaaaattaattatgaagactattggaatgatgtagcatcctttaactcttattgtgatcgacagaaagtatcatagatggacaactcactttccctttgctctgtgcttcctggtgattttaggtcacgtccactctgaaatctgagctgtcattaaagccatgtcttcgtgtctgtctgtctgaagcagcaaagat

SEQ ID NO: 63235 - DNA, 272 bp, Homo sapiens
tatctttgaagaccaaatacccaaaagatctgcttcaaccttccccagttaatcttttgccagaagattcacaatctgaatgtggctcaatataaagaaatccttcagtcaagtttccataaagaccctctttcctgcttctggctgagctcctactaaaaagaagattaatgtggaaattaatctaatccaggattaagagtagaagacttacttaaactgggcaattttctgtcaatttgattgtaataaatattttgcatttaagagtt

SEQ ID NO: 63236 - DNA, 529 bp, Homo sapiens
ctaactgtgcatcaaaatctgcaaaatgcaaatatatcaccattctgttttcacagacatattctcgttggcaacagcagatgtggttaagctaattacaagaaagctcagaaaaaggagagcagacactgcaaatgcgcaataggcttaaggtaatgaagctgcaggatacaccagcccagatcaagaagctggtaaataatgaggatggcaatgcccaatactgcctggcagtgatgaggtgagcaatttagcctgcgagcatcacctcactgggaaagttaatagccccccaggctttaaagggaaagccacgaaacagctgtgatggtggcataggaggggctgcctctagatgtgctttttaaaaagcatcatatgttttatcctggggctcctgaagtgtcttgggaaatggccaaagaagttttgctttgtaagtgcctgaaaaatgctgttaagagctcaacacagcccttaaagaatcctataacattgtggcaattaaatgactttgctaccagcaaca

SEQ ID NO: 63237 - DNA, 598 bp, Homo sapiens
cctcggcctcccaaagtgctgggattacaggtgtgagccactgtgcccggccaaaattagccaaattcttgaaagaatgaatgaggaatgggagctattgcatccacaacctcagggtttcaagaaacatcctaattatgttctttaaatcaaatcaacttaaatcctacttcaagcctttatttcaccagaccaataggaaatccagtctcagtcatatttgggtttccctcgttgatatggttccgatgtcctgcccaaatctcatgttgaaatgtaatccccagtgtcagaggtggggcctggtgggaggtgattggatcatgggggtggatttctcatgaatggtttagcagcagcatcttagtactattctcgcaatagtgagtgagttctcatgggatctggtcatttaaaagtgtgtagcccctctgcccctgcctactgctcctgctctggccatgtgacctgtctgctccccccacttctgcttctgccatcattggaagtttcctgaggcctccccagaagcagatgccgttatgcttcctgtacagcctgacgaagtgtgagccaatgaaacctctttttataaatg

SEQ ID NO: 63238 - DNA, 659 bp, Homo sapiens
gcgcccagccatcagttatattttagagtcaattttatattcttgaattttcattttgtatgaatttattttttatgaaattcataaaattgggtgaagaaataaagctgaaacttgcctttcatgtcagaagaccctatgagtttctgtgctggctcctactgggaaacactgtttttcacccaaagcagactaacttaaattcttcagttccagaataaggctttcaagatgtatttttaccatgccaaagtctgcaaaagttttggaaaaccaaaatcataatgtggaaatctgacagtcttgcactgtgatctgcttctttggagataacacgttcattgttcacttgagaaaggggataaatgtgctaattaggtagtaaacatctactctcaaattcttcccatcctttattacctttttgtctatatcctaggagacattcttttctattttttcagacctactgttaataatggggtaatagaggctgtagattaatagcagttcacattcatgtggtactatcgaggtgccaggtactggactaaatgttttcattacctcatttaaagcctggagagttaagtattttctctgaagtcacataacttgtaaagaaagaagctgagattagttttacagccctcacttaa

SEQ ID NO: 63239 - DNA, 159 bp, Homo sapiens
gaaggaaaaggaaaatctattcaaaataaagtattccagatatctgacattgctgcattgctgtatcattcattaacattcacaaaaaataaaatgagtgccttccgtgtgtgtgcaggcattgttctaggcaaagaagatttagcattcaaccaaaac

SEQ ID NO: 63240 - DNA, 393 bp, Homo sapiens
ttgtgctttcctgtgcatgtatgtttagtttttatttttctaatcaatgtaaggtacttttttataatcagaaaaaaaaaaaagaattccgtagctattagtggatattttgatgtcagtggcctcagaattcagggaatcccaaagccacacaattgccaaaaatatttatgaagtagggaacatttgaataatatgccatagatgatgggattctaaaattatgcttcatattatttttgttcaaattgcgttttggccagattttacttattgtacacttttctttttttgccaatggggtgtgtgttcaattatgttacaaataatattaaaaggaatatactgaaggaaagtgaaagttcccttatacttaaggcaagcatttaaaaa

SEQ ID NO: 63241 - DNA, 139 bp, Homo sapiens
gtgagtgaacatggatggaaacaaattattaggttgttcaaagtgaaaaacaccaaaaataagatttaaaaagaatgtcaggtatccatagaaaaatattaataggtctaatacatatgtaaaaattggagtcccaggg

SEQ ID NO: 63242 - DNA, 336 bp, Homo sapiens
aaagtctctgtgcattcaccccaccacggcatggaaaaaaacataacattgtcctgaggaacttgaccactaacatatctaagtggaaaaatacccattcatccctgaccgttatttacattctctaagttaagcttaacatcctctctagttccaccagtaattatgtttttaaaatgctgtcagttgttttccagtgatgcatattgatatctgtagtgactgggcatttgcttttaaatctactgcagcaaagaaaaacagttcgttccaccattctgtctacttttgtgtgtgtgtgaaaacttttatagtaaacattttaagaaataagtc

SEQ ID NO: 63243 - DNA, 330 bp, Homo sapiens
aacaaaatcatttccttcgcagcaacatggatacaactggaatccactatcctaagcaaactaacgcagaaagagaaaccaagtgtctcgttttcactcatatgtgggagctacacattaggtgcacattggcataaacataggaacaatagacactgggaaataagaacggggagggacagagtgggccagggttgaaaaactacttcttgggtcctatgctcactacctgtgtgatgggttcaattgtactccaaacctcagcatccctcgatatacctttggaagaaacttacacaggtaccactttaatttagaatacaaactaga

SEQ ID NO: 63244 - DNA, 210 bp, Homo sapiens
tttgtattctaaattaaagtggtacctgtttaagtttctcccaaaggtatatcgagggacagagtgggccagggttgaaaaactacttcttgggtcctatgctcactacctgtgtgatgggttcaattgtactccaaacctcagcatccctcgatatacctttggaagaaacttacacaggtaccactttaatttagaatacaaactaga

SEQ ID NO: 63245 - DNA, 1680 bp, Homo sapiens
gcaaggtatgttcatagctattgcacacacaaaacttacatacgtcctgcttacacaattttaagttggaaaagactgcatctttatgtttttgatttctctaaaaggttatttatgcttccttctgtttgggaaagataaattaagtcttgtgcgctatagaggattttttttctttaagaaaaacgaatgttgatgcattttatagcccgagtgaggaacagagatagaggtactttgtgccattgctattaaagaaaaagaaaatgtctctttttttttctggaagaataagattttaattaaagcacttgcacccttttgtatgtgagctggtctcaaacaaagtcctcacccacagcagtttcagcagctgaacagtcccatggaagttctgactggcaggcatcaacagggctattagcacccagcatagtttgccctgagtacggaggatggatgctttggctctaactactcaccaataattgctccttccttaccttctttgttaatggtaaactgctggaaatggagtagtacaggtaacaattatttttaattgtctttccagaccagtttttggttgtgtgttcagtaaatgatagtctgtatcacagccttcaagtctggattatttttctaaatgcatactctacctgttcagttacactcgttgtggaacaacattagcttatataccagtaagttgtcgagaatggataaccatctgtcattatcactgaccttcaaagactcatcaagcagtccctgcataaggattggagtggtttgaagtttctcttccaagcactaacatgtccctatcccacagtcattttaatttggtatgtgactgtttctttcatttctttcacagataatattatatatacagttatataaatatatttcatattaaatgttatataacacaagagagagaaagtataagtagaaagagtgcctagcaccctaagaaatttaaattaaaatgctaattatccattggtgagtgcagtctcgaggataggtgagtaaactgctctgtgttgaagtcacactgctgacctggttattgtaataaatcacctctttggttaatttaaaaaaaaaaaaaaaaaaaaaaaaaaaaaaaaaaaaaaaaaaaaaaaaaaaaaaaaaaaaaaaaaaaaaaaaataaaaaaaaaaaaaaaaaaaaaaaaataaaaaaaaaaaatataattaattaaaaataaaatttaaatttaatagacatattattacaattttatatttaataaaaataatatttaacccaaattaaaattatttaaaaacaaaaccctttccccatctcaattaattccttttaaaccccctcccttttctcctttttaacacatttacatacctatacctcaatctcaaaatctttaacatctcaattttgctttaaatttccaaatatttttgttaaattaaatctttatttaaactataagtctaatttctaaaaaatcacttcaaatctaacaaatatcccagaacagtaaattctttttccaaatttggacaaactcaaatgtcccatttttgacacattaatctaattgactttctatgggcccagtgcccataacctcatttaagcgatcccttaaaggtgcccccttataataaatctatatcctaagccaa

SEQ ID NO: 63246 - DNA, 497 bp, Homo sapiens
aaataatagtctctgatgcttgaaaagccttaaagctacttattattatccccattttacagataagaaaacagaatgtgaagtggtagagcaattacctaactctaaacccaagtctctgagatttggaagctgtgcagcttgtgcattatgccatgactatgatatatctgctcactaagttgaatatcatgtagctatttaaaagcttattaaagaattatgtaggattatatgaaaatacttgggaggaataaatgacaattttggtctcaataaaatgcgtattttttaaaagactgggaaaaacacaagataaaaatggttttcttattatgcttttcacctttgctacaatttcttaactttctctaataccattataattatattgctcaaaaacatctatttttaaataataaatggatcaaatggtcaagtagtaaatgagtatgtggaaaatactattattttatctgtgtgcattttgtagtgta

SEQ ID NO: 63247 - DNA, 939 bp, Homo sapiens
gagaatttgggctggtgcattccgatgcaccttgaccgtcccataccagaattgtgccaggtgcacctggaattttccaagacagatgtgaatcttaaggggagtattttgtcctcttgtgaggaaaagtactttaaaatgtgcaaaactgaggaatcagagcttaaggaagactcagaccccattctggccaaacttgaaaggctgatcttgttgctaactttgattgccacttgctatcccacatgagcatcaacccagagttctcataggtgttggtgatcttgtttgggaacttggttttcacagcaggaactgattacttagcaagtgccctaattgaagaaaacacattgctcccaatctccattggcttttgtgaaaaatctggtcctgagcagttagacatcctcctttccaagctttttatagaacacagattaatctttaagctctgcttctgatgttgcccttctttactgaaaacaattctgaatcattagtgtaattaagaaaataccgtctgaggccatttttattttgtatttgcatatgacaccaaagctgcaaaacaggaactaagcatggtaataatgctggtccaaaggtggccaggtatgaacacttccttctaggcctgctgccaggaggagagctggcttattgatgggagcattgtatgctgctgaaacctccttacttgggggttctccccagagacagagaagaaaacctaaggcaggcattagtcttggaaaccagtaccagctagtatctcatgccaatgaaaagcatccaggacaagcatgtttgcaaaaaacaagcatgtcctgtctctttcacatctctggcacatccatgatcaccctgagtcagacccaaataaggggcagcagagacagccagatgaagcagcaatttgagggtagtaactggtga

SEQ ID NO: 63248 - DNA, 463 bp, Homo sapiens
acatagaacctgcattgctgtagagccgccgactccctttctttaaccctcgccttccctttaaaaaacctaatgaggatgtctcacagctaaaccttagaaaccatgaccttcactgaaactggctgagtttaaggagaggctcttagtcatggtcagtttcccctctcctctggctcccacctcccttggccatgctgtgtcccttgagggatgagcacacctggctgcttctccagacactagtcccctccgattaccagctctgggctgggctgaccaccttctcaaccatcctggtcagcatcctacgttctatctcttacagcaaacaaccagcctatttccttcaatgcctccttcactgtttctttgagactagagtaatataatgcttttaacagtggaaagactataaaaaatgaagttatcaatactcaataagtgagtacattctcccaaa

SEQ ID NO: 63249 - DNA, 350 bp, Homo sapiens
gggtggttccgagtctatttctaattgtgtggctttgggcaggccccatagcttctctgagcctctatttcctcgtctgtaaaatgggagcagcgacactaatctgacaaagctttgcagtgcttagcaacacagtacatgtgagcttcaccctgtgcttggcttattgaaagcatgtattacctgggagctctggtttccctccaaggctccaatcccacgtttccagcagctggtgcctcaaattaaaaaggaaaaggcatactcagttgagtctgtgcttcccatgattgaggctgctatcctccccagctcctggggaggcgatcccagagtcctctttgttccat

SEQ ID NO: 63250 - DNA, 226 bp, Homo sapiens
gttcctgcccctggagggttccggggcctcctacggcttgtgccgtccgtgtcgccgtccctgtctctgtcgtccttagctgctgggcctctcctagcttggagtgaggggcggtgggtttgctccctccacctgggtggtctttgtgctctttggggagggggtaggttggatgcagctggaactcacccagcagcaggtgcagctggagaatcccaggctttct

SEQ ID NO: 63251 - DNA, 698 bp, Homo sapiens
agggtaagagggatctgtggtgatttgggagccaaaggaaggagctcttcacccagtgtagggtatggtttgtgaaggtatccctagagaaggtgactctgcggctgagcttgaaggaagagaattggtaggtgacaaagaagaggaatataacacattcctgtcattaagagaagctgctgacttgaaatgggagttcagtaatggcagtgagaggagatgaagtaacaccgttggaggaggtcagagcacagggtgccttaaaaacaagccacagcatttggactttattctccttatttatgccatcctgtttatcagtattgatctgcagcactccaaggtccaagggacaaaggcaaggaaatctccaacctctcagaatatgagaagatactatagtaaatatgtcaataaattttattctacaacagctctatgtggcaggttctcatctccattgtacagaacaagaaattaagactcagaaatcttaaaggatttgctgaaggttgcatggcccttataaaatgttaccagctcatttaacttcaagacctcttcctgctatgctcacactgtttggaaagtcacattctaatcagacttgatggctaaatcagtcagaatcaaatatgcccacctatgttgacatgctgtgtaaagattttctgttcaacgtgaacacatggttgcaa

SEQ ID NO: 63252 - DNA, 654 bp, Homo sapiens
agggtaagagggatctgtggtgatttgggagccaaaggaaggagctcttcacccagtgtagggtatggtttgtgaaggtatccctagagaaggtgactctgcggctgagcttgaaggaagagaattggtaggtgacaaagaagaggtccactcatatgatcgaatttgaatcaaggtctcaagctaatctaaggaaaaaaaaaaagcagagaagctatatggcagaaagcagagaattggaagggaagtcacaaaagaagagaacatacttgcaggcattgtttcaggtagtgagtgaaatctgcaaacaaacagaaattctttctctcgtggaatgtatgtactaactggagaaagcattgtttaaaaaataagcaaataggatgtcaggctgtgttcaagagagtgtatttagttcttcacacaatagtgatgctgatggataaagatttccagtttggtctcaatccaataaaacacccccattcaaagtgtcattgtcccactctttccaactgatgccctaaagctcacagaagagacttgttgggtgtgcaaatttggctttcctcataattctgcaacctgcataagaaagttttagttctgattttcagccttatcttccctgtgactacatgaaataagagatta

SEQ ID NO: 63253 - DNA, 786 bp, Homo sapiens
agggtaagagggatctgtggtgatttgggagccaaaggaaggagctcttcacccagtgtagggtatggtttgtgaaggtatccctagagaaggtgactctgcggctgagcttgaaggaagagaattggtaggtgacaaagaagaggtaatgagccaaaaagatcatgtctgaaatacaaggaacggttgagttttcggtagagctacataaattttataatgtggatctctttcagagagggatgcagtctgaatttggcatttcacgtgcaggtgatatcagtaaatcctcatgatagacttacctccaaggctcattgtattaccagatccgagtgaccttgaaggtgtcttcaaggatcccccacagactgagtgcctccatcgctgggcagacagagagcagcagcctgcattcagcctgtgtccatgacagcaccgtgcacagccgggtctttcagatcttataccggaatgaagaggtacccataaatgatgctgtggtcttccgagttcatttactcttgggtggtgaaaggatggaagacgcactgagtgaagtagattttcaactcaaggtggatctgcactttacggacagtgaacagcagttgagggatgtggctggggcaccgatggtcagcagccgaacgcttggcctgcacttccacccccggaatggtctgcaccaccaggtcccggtcatgttcgactatttccacctgtctgtgatctcggtgaccgtccatgctgccctggtggctctgcagcagccattgatcaggt

SEQ ID NO: 63254 - DNA, 422 bp, Homo sapiens
ttattttcttgtttaaggtgagagggtcctattgtccgaacgtttgtgtctcccaaaatttatacgttgaaacataattaacatatgaatgtgatggcattgggaggtggggcctttgagaggtgattaggttatgagaaaagagccctcaggactaatgctttttaaaaagaggccccagagagctgccttgccccttccaccatgtgtggacacagctagatggcacctgtggaccagaaagctggccctcatcactcacccagattaaactggtaagaaacatgatggtatcaataagagtttatcagaaaataatatgtcattctagaggaatataccaacattttagacttaaagttattaataaaaataatttgccagttacaattaatagcacataatgatagctagtcagaaaa

SEQ ID NO: 63255 - DNA, 336 bp, Homo sapiens
tgtgtttgtaaataaagttttattggaacacagccaagcccattcctaaggaagggtctccggctctggaagaacaacaggagaaaccaagcaaccaaaccagaggccacgtgggccacagagcccagcaaaactactgtctagcccttcccagaaaacacttgccaagctctgttctatgggatcagggactctggtgaaaagtgtcttttgtgtaaaatgggaactgatagaactgcttctctgcttctctctaaaagggtcatttaaaagcacaaaagcacattcatgcattttcctctccacaattcgcaaaactggttttccattaaaaaa

SEQ ID NO: 63256 - DNA, 3115 bp, Homo sapiens
catctttgagcaagatgggtctctaccgcatccgcgtgtccactggggcctcgctctatgccggttccaacaaccaggtgcagctgtggctggtcggccagcacggggaggcggcgctcgggaagcgactgtggcccgcacggggcaaggagacagaactcaaggtggaagtaccggagtatctggggccgctgctgtttgtgaaactgcgcaaacggcacctccttaaggacgacgcctggttctgcaactggatctctgtgcagggccccggagccggggacgaggtcaggttcccttgttaccgctgggtggagggcaacggcgtcctgagcctgcctgaaggcaccggccgcactgtgggcgaggaccctcagggcctgttccagaaacaccgggaagaagagctggaagagagaaggaagttgtaccggtggggaaactggaaggacgggttaattctgaatatggctggggccaaactatatgacctccctgtggatgagcgatttctggaagacaagagagttgactttgaggtttcgctggccaaggggctggccgacctcgctatcaaagactctctaaatgttctgacttgctggaaggatctagatgacttcaaccggattttctggtgtggtcagagcaagctggctgagcgcgtgcgggactcctggaaggaagatgccttatttgggtaccagtttcttaatggcgccaaccccgtggtgctgaggcgctctgctcaccttcctgctcgcctagtgttccctccaggcatggaggaactgcaggcccagctggagaaggagctggagggaggcacactgttcgaagctgacttctccctgctggatgggatcaaggccaacgtcattctctgtagccagcagcacctggctgcccctctagtcatgctgaaattgcagcctgatgggaaactcttgcccatggtcatccagctccagctgccccgcacaggatccccaccacctccccttttcttgcctacggatcccccaatggcctggcttctggccaaatgctgggtgcgcagctctgacttccagctccatgagctgcagtctcatcttctgaggggacacttgatggctgaggtcattgttgtggccaccatgaggtgcctgccgtcgatacatcctatcttcaagcttataattccccacctgcgatacaccctggaaattaacgtccgggccaggactgggctggtctctgacatgggaattttcgaccagataatgagcactggtgggggaggccacgtgcagctgctcaagcaagctggagccttcctaacctacagctccttctgtccccctgatgacttggccgaccgggggctcctgggagtgaagtcttccttctatgcccaagatgcgctgcggctctgggaaatcatctatcggtatgtggaaggaatcgtgagtctccactataagacagacgtggctgtgaaagacgacccagagctgcagacctggtgtcgagagatcactgaaatcgggctgcaaggggcccaggaccgagggtttcctgtctctttacaggctcgggaccaggtttgccactttgtcaccatgtgtatcttcacctgcaccggccaacacgcctctgtgcacctgggccagctggactggtactcttgggtgcctaatgcaccctgcacgatgcggctgcccccgccaaccaccaaggatgcaacgctggagacagtgatggcgacactgcccaacttccaccaggcttctctccagatgtccatcacttggcagctgggcagacgccagcccgttatggtggctgtgggccagcatgaggaggagtatttttcgggccctgagcctaaggctgtgctgaagaagttcagggaggagctggctgccctggataaggaaattgagatccggaatgcaaagctggacatgccctacgagtacctgcggcccagcgtggtggaaaacagtgtggccatctaagcgtcgccaccctttggttatttcagcccccatcacccaagccacaagctgaccccttcgtggttatagccctgccctcccaagtcccaccctcttcccatgtcccaccctccctagaggggcaccttttcatggtctctgcacccagtgaacacattttactctagaggcatcacctgggaccttactcctctttccttccttcctcctttcctatcttccttcctctctctcttcctctttcttcattcagatctatatggcaaatagccacaattatataaatcatttcaagactagaatagggggatataatacatattactccacaccttttatgaatcaaatatgatttttttgttgttgttaagacagagtctcactttgacacccaggctggagtgcagtggtgccatcaccacggctcactgcagcctcagcgtcctgggctcaaatgatcctcccacctcagcctcctgagtagctgggactacaggctcatgccatcatgcccagctaatatttttttattttcgtggagacggggcctcactatgttgcctaggctggaaataggattttgaacccaaattgagtttaacaataataaaaagttgttttacgctaaagatggaaaagaactaggactgaactattttaaataaaatattggcaaaagaatatagagcatcaaaaaatttttctgggttcatatgcttgatgtggtaaagaattaaaaattttttatttttattgagacagaatcttgctcttgctgcccaggctggagtgcaatggcgcgatcttggctcgctgcaaccttcgcctcccaggttcaaacaattctcctgcctcagccgcccaagtagctgggattacaggcgcctgccaccacgcccaactaatattttgtatttttagtagagatggggtttcgccatgttggccaggctggtttcgaactcctgacctcaggtgatccacccgcctcggcctcccaaagtgctgggattacaggtgtgagccgccctgcccggcctaaaaattttttaaaattaaaaaaaaattgtcttctaactggataggatttaatttgtgtcctgaaaccagac

SEQ ID NO: 63257 - DNA, 203 bp, Homo sapiens
tgaggcatccctgaggagaacagctggaggtggggcgctcaaagttcaaggatcacgctagcatttgccatgtcaccattgctggagtttgtaagaccaatcaaggaatctgtcggcacccatgcacggggtcttggggtgattcactgtcagcatcgcaggcagaggggccaggtgagacctgaccagcaaccagagcagca

SEQ ID NO: 63258 - DNA, 370 bp, Homo sapiens
ctttatttattttcagcctggctcaaaaagcgtttgaggtagctgcttacaggaatgcatgcaataagattttttaagataataagttttcgaagtcagcataaggggaaattgttataaaatagaataagaaaatgagtacatgtgtgtgaaagaaagagagagagaaataactgtaagaatacaggagggctagcttaaaattagctggagtagcatcctactgcaacctttaaattttaagagttttggagaatatcttcctttttggcctattcatttccccaaaatccactgttatagatgaattcacacataactgtcatatcacaactgctcattgatacagaatgaaccaaaaaatgtaaaa

SEQ ID NO: 63259 - DNA, 131 bp, Homo sapiens
ctctcagcagctagccaggctggcctggccctgacggcccgggaatagcagctgtcttgtgacttcccacagcaggcacattgcgtcgtctctcaaagtccctcctctggagcgcctcctctgcccgtggg

SEQ ID NO: 63260 - DNA, 438 bp, Homo sapiens
gaattcagctgagatgatatttaaggcatagctagggactgtgatcttgccgacaaaaatattacttatttcctttttatgaaaagaatattaccatcagaatccaagacctccgaacttccctgctgaaggcacgtttacgtctttggactctggtgtaccagggcctgaacaagctataacaccatggtattaccaaatacatcctaagtcatcaaaacagctttttaggctaattctgtaagtacagcaaaacacacagcaaacttaaggttttcttagtagtaaaaaacatgtatctctcatactgtaaaaaataaaggtgttccatgggagggaaggagtagggggagaacaggttggggctcaaaataagcaagtagggttattgtaatctattttaaagaaaattcataattttaaatctctctttagttc

SEQ ID NO: 63261 - DNA, 328 bp, Homo sapiens
aaatctgtcttccactcctggcttctaaatctttttggtaggtacccacaaatgaaactgcgggaacatctgatcattctgtttctaatttttccagtacacgccatactattttccccgttccttcacggttttacattccctgcgatcagattcgagcattcctacttccctttagtctcaccaatgcctgtttgtttatcatatccatcctaatgtgtggtatcacgttcttggtttgatttgcgcttccctatgatgagtgattttgaacatcattttagatgcttattggccattgctatatcttctttagacacacgtctac

SEQ ID NO: 63262 - DNA, 812 bp, Homo sapiens
cccgggctgcaggaattcggcacgagagtgagccgagtttgcaccactgcactccagcgttggtaacagagtgagactccgtcttaaaaaacaaacaaacaaacaaaaagaatggctacatgaattattttataatactgcaacaaaatactgtactgtgttgaaaatcaatgaaactactcctgcacttaagaatatggttaaaatcttacaaaagtagtgttgccagacacaaaggagtacataccgtataattccatttgcgtaagtttcaaaaataggcaaactaatctatgattatagaattcagcatgatcggtaatttgggaatagtagtgactaggagagggcatacagtgggctttgacttactgttaatgttctttcttctctcattacatgaattactgagaaaatagtagattctattaatatttaacagttaaaacacttccttttgtgttgtcgtgtttattgaatagacattgctttttaaactttgttctttaaaaaatacagtttaggccgggtgtggtggctcacacctgtaatcccagcactttgggaggccaaggtgggtggatcacctgaggtcagaagttcgagaccatcctggccaacatggtgaaaccccgtctgtatttaaaaaaatacaaaaaaaaattagatgggtgtagtggctcgcgcctgtaatcccagctacttgggaggctgaggcaggagaatcgcttgaacccaggaggtggaggttgcagtgagccgagatcgcgccactgcactccagcctagcaacagagtgagactctgtctca

SEQ ID NO: 63263 - DNA, 331 bp, Homo sapiens
tgctgatattacaggcgtgtgaaccaccgtgcctggccgttttcatttctttgtgatctgcttaggagtagaattgtaggtcatatggtaacttcagggttaacatttgtaagcattgccaaactcttccactgtggctgtgctgtttcacatcccaatcagcagtgttagagggttccaatttctccacctcctccacaacccttgtcattgtctttttaattctagccccaagtggcatctcattgtggttttcatttgtacttctctaatgacttaacgattgtgtcttttcatgtgcttattggccattggtatttaagaactattt

SEQ ID NO: 63264 - DNA, 347 bp, Homo sapiens
ttcctgttttctgccaccctaaactcaacatatacttgtgttaggccacattgtgcctggggagtcaaccatacagaacattcttataaaaacgtcttccctgcactgatgggtttaatctggaatatgttgcattcactgtcatggctggattctctgtttattattataagcataatgatagtatttgggtattgtatttattttggcttttgaccttttttctgcttgtttaagataatcatatttttttgtttgccttttaattttataatctttttgaatggccaatttgtaaatattttgtaactatgtttactgtgttatttcttccatagtttatattt

SEQ ID NO: 63265 - DNA, 109 bp, Homo sapiens
tttcactacagaaaggacattattgggataactagtaagtttgaatggagtgtgagtggtaccgctgtctatgctaatttcactattttgatacataggtagaatgcac

SEQ ID NO: 63266 - DNA, 473 bp, Homo sapiens
cttatacctagtttacatatgaaaaaattgagacttagatattaactttctcatggtacacagattaataagtaccaacacagaattaaaccaagggccatctgactctaaagcctaggtttgtgttcttagtcaacacaagtggctaaagtattgtataaccctccagaacctatcaatgtatagtgggaaaacaaaaacaacaacaaaaaaaaccttagagcaggagttggaggctctaggtttaagtcctgactttaccagatctagtcttgtaaacttggataaaatttttaatggttctaagcctcagctgccttatctgtcaaactgatataatatccaagagtaaagcaataattagtaagtttatgtacggggaaagtactttataaattctaaaatatacaatcaatcaggcacagtggctcatgctaatcccagcactttggaaggctaagacgggaggattg

SEQ ID NO: 63267 - DNA, 1148 bp, Homo sapiens
acctttatctttcagggaagaggttggttgcacgttgttaggccaagagactggccctccattatgccctatgctggacttgctttgtcggtccattcattgatgtcctgttgaatcaaaaggtattgttttagtagaagttacatgaagtatattcatttatcacttgctaaacataggccttgctctgtttaataaataatgggtgtctctttcaagattttaggataggcctttttaacagagcagaatcttctgttaaagttctcacaaacagaccaactcccaagagagatgggctggtgggtcactgacataaagcagtccacaagatctattttagaaaagtatcaatgacatttccttagttggtttgattctcttgagaatacatgagtttaaaagaactgaggtcaaattgctttatgtggaaagcaataaaaacaagtatttttgacttgcaaattagaggtaactgtaagcaatttttgctattgaagcctatggcccaaattattccacctgcaaaataactttcacccttgcaaggctgatagacggctcttcattggtctttttttatggttttgttttgtttttttaagtcattggtcttaaatctgtatggtgacaaatctatttgagtttgattgagactttcttggactcctttggacaagaggtcagagcacaaaggctagtcaccacttctttgacttcttgaggtatgagccaaaattttacttttccattgatttaaagcagaatttttggagatgctgtgttctagttcctgacggaatcggtggtggttgctgactttgacactttggagagtgatgtggggagttatatagaaggggaaacactagtttaggtgtgaggagttctagtatgccacaaattagctgagactttagacgaagcacaatatttgagcatcaatcttctcatctatgagatagacctgtcaggattattgtgaaaattagatgagataagttgaaagtacagtgcttggtaaacagttagcactcaaatattagttctttttcactttaattaagagcagactttgaatggtctgatgccaagtgtagatccttaagagacaaaacaaagaaactttcctggcttcaaagaaaaga

SEQ ID NO: 63268 - DNA, 644 bp, Homo sapiens
ccttcgttgcttggtgactttcacgactcttttgaagcccagttaagttcctcagtttcggtttgggtgatgtttcttcatggttatattcaggttaggcatggttggcagggatttcatgaaaggggtgctatgttcttttcatggtatcctatcaggtggcaccaaacctggtgatgttcactttcatcatttgatgaaggtaattgacatgatgtatcctggacctcatcaaacttttaatttgctcatgtatttttatttttattggtatagacttcaatttcatattttattcaatgggttataatccatcactatcatgatttatttctatccttaagttgttccacacctggcccatgggagcccttatgagcaagtttccaggtccttatgacacaattccatcattctttgggtacatccttactttctggcacagtagagatgttccagacttatcttatatttttcctcccccatccctggaatcaatcacttctccgaggatgcttgattccttttagtgaagaacagtctttggaaaccaaccgtctagggacattaagtatgcttgttgctattggagtgtcattgctcctggaccttctcagtggacacagctaggaaatgtatgtgtt

SEQ ID NO: 63269 - DNA, 336 bp, Homo sapiens
gtcttcctcactgcccctgtccaggaatatcgtaattactactgagaagcccccggtaactctgtatgtcatgggcacccaaattcattttctttttgatacaagggcagattactctgttcttactgcttatacaggaaaactttcttcccggtccatgagtgttatgggaatggaaagaaagccataaaaaagattgtttactcctcctttgatttgtcaatttgagaaacaaatcttccaacaggaatttctagtagtaccaagatgcccagtccccccgttgggaagagatactatggttaaaataggggcactactacaatttaagcatca

SEQ ID NO: 63270 - DNA, 783 bp, Homo sapiens
  misc_feature (12)..(12): n is a, c, g, or t
  misc_feature (18)..(18): n is a, c, g, or t
  misc_feature (47)..(47): n is a, c, g, or t
  misc_feature (59)..(59): n is a, c, g, or t
attcggcacganggactngaagggattaagaagaactcttaggagcnccttggcctaanggctgtgtgggacgtgcctgctttgccttcgccttccaccatgatcgtaagttttctgagaccccctcagccatgtttcctgtagagcctgtggagttgtgagataaggatattgtaattatacaagagatgtccttcatctaggagatggctgctgaagtattgaagggtaaagtgtcctgtgcttataactggctttcaaacagacaaacaaaaaaagctggtccaaaatggcagtggcaatggatgtggataccccaagaagtaccaacagcagtgctttgaagtaaaaaagtgaaatgcagtagctagccctctgggcttgggatgttgtggttaataactgtgccatctgcaggaatcacagcatggatctgcattgaatgtcaagctaaccaagagtctgccacttcagaagtgtgtaccgttgcacggggagcctgtaaccgtgcttttcacttcactgtctctctcactggctcaaaacacaacagctgtgcctgttggacaacagacaataggaattcccaaagtatggacaccagaaaaagaattcttccatcaagcttaactgttttgtgattcatttaatgacttgcccttctgtcacttaattataaattagatagaactgtgtcttttctgctttgtctttgccatttgctgttctcgcagccacattgtattctgtgtcaaataaagtccagttggattctagagcgaa

SEQ ID NO: 63271 - DNA, 492 bp, Homo sapiens
gataatatctctcctctatgtagctcttaactggtttataaaaccttctcatgtcattgtttcacctaattcttcaaacagtcgcatagggcaggcaggtggtatatttttatccaattttcagataaagaaagaatatgagacatcagaagggtcagtgatttgcccaaggtcacacagcaataagtgcaaaaactaaatttaaatatttggagggccctgttggttgtacatggcacactgtaaaatgaatataaagctcgtgtctcttctagttaattcatttcaaaagtctttgtttatcctattgtcaataataacaatcctcagaagaggcaaattctgaaatttaatttatggattaatctagggttccagggaatgtgtgaacagaacaggacaaggttcttcaattttcactttaatcacagccataataattgtagtaaaatatatttgcaaagaagtttataatttgcttctattacaaaa

SEQ ID NO: 63272 - DNA, 336 bp, Homo sapiens
gaactaactgtccctctcaggtactaagctgttcccagtgctcacctctatgcaaaatcacccagtttcatctccattttgtgacccagggattagttcatggtttctaatttgtcactgagacacaccattatccacccagcagatactttcttctgcaaagggagcaaggaattgctaaccactatcctgctcctgttcaagcatttggattgggggaaagacagtgtacctcatcagaggagtctgagctctcagccccagagaatgaattgatggaagccaaccatggaaagtacattcttcttaccgtgacaggtgtaggtaaaagtacgg

SEQ ID NO: 63273 - DNA, 170 bp, Homo sapiens
ttttaagacagaatcagccgggctgttaatcccacctcagcctcccagagtgctgagatttgagattacaggggtgagccgctgcacccagctcccttgactatctctgcaacttctctgtaaatctaaaatgattccaaataaaaagtttattaaacacagatattata

SEQ ID NO: 63274 - DNA, 781 bp, Homo sapiens
cctttttctgcagtaaagaaaatgaaatatcctttattttccaaatgtatgaagcacaaatgcaatatagttatttaaaatataaaatactttaaaatgaatgtgaagaatgggaaaatatatttttgcatgaaaacagactacttacaaatgtgcttaatatctcaggaaaaaaagaatgaataaccgtatataaaattggtaaactataaattggctgtatttccttgccggttttaattttaaggaagcatttacatgaaaagaaaaaaggatcctagtagtctgaatttcctctcaagtatgctagaaaatactttctatgaatttacaattaactgcaataagaagtgggttagcattcaagtaaggtcaataccccaaatgagaaactcttcagttagaacacattagtggttgtaacacagaggcagtagataaatatttgaaatgtgagcatttctaaacttggtaccaaatggaaagggtttcatgaggtgacagtggcttttaaacattcatttgaccgattattctaattttccttgttaaatcattgcaacagttgcatgggggagaatggatattttttgaagaattgcttattccactttcaatttttaaaaatcgaggggattaaaatattactttttaaatatgcataaaagtatcttaactgtaattacattttcagttgctttgttatagtagcatgcatattaaatataaaatgcatttatgaaaatttttgtaaaaaataaaagatttttcatttctcaaa

SEQ ID NO: 63275 - DNA, 1035 bp, Homo sapiens
  misc_feature (1022)..(1022): n is a, c, g, or t
cctttttctgcagtaaagaaaatgaaatatcctttattttccaaatgtatgaagcacaaatgcaatatagttatttaaaatataaaatactttaaaatgaatgtgaagaatgggaaaatatatttttgcatgaaaacagactacttacaaatgtgcttaatatctcaggaaaaaaagaatgaataaccgtatataaaattggtaaactataaattggctgtatttccttgccggttttaattttaaggaagcatttacatgaaaagaaaaaaggatcctagtagtctgaatttcctctcaagtatgctagaaaatactttctatgaatttacaattaactgcaataagaagtgggttagcattcaagtaaggtcaataccccaaatgagaaactcttcagttagaacacattagtggttgtaacacagaggcagtagataaatatttgaaatgtgagcatttctaaacttggtaccaaatggaaagggtttcatgaggtgacagtggcttttaaacattcatttgaccgattattctaattttccttgttaaatcattgcaacagttgcatgggggagaatggatattttttgaagaattgcttattccactttcaatttttaaaaatcgaggggattaaaatattactttttaaatatgcataaaagtatcttaactgtaattacattttcagttgctttgttatagtagcatgcatattaaatataaaatgcatttatgaaaatttttgtaaaaaataaaagatttttcatttctcaaaaaaaaaaaaaaaaaatcgagactagttctctcgtgccgaattcggcacgagggagttcaagcgagcctctcacctaaacctcatctccacttaaaatacaaaaattagccaggcatggtggtgcgcgcctgtaatcccagctattagggaggctgaagcgggagaatcacttgagcctgggaggcaaaggttgcagtgagccaagactgcaccactacattccacctgggcaacacaacanagactctgtcttt

SEQ ID NO: 63276 - DNA, 372 bp, Homo sapiens
cccttgaatgattgggaatttgggttctttctaagcacagccttcactccctgcctgaaccacagcaacctgtggctgtttctcctgctaccaaaattgcaggagccctgtgctcctgctggcttccctagcatggcctctaaacaaaacaaaaaaaaaaattggggctgccttttttccagtcaccttccagaggagtcagggagattgcctgatgccccatggggtttgagaggctaaaaacctaaataagaacaaaagaagacttgacatctataggccagtgtgtcctctcccagtcttgctggggactgtagcctttctcatatgagtgggatggtctagaaagaatatttgcatcagaagcccatt

SEQ ID NO: 63277 - DNA, 387 bp, Homo sapiens
gtaatccccagctacttgggaggctgaggcatgagaatttcttgaacccgggaggcggaggttgcagtgagcagagatcacgccactgcactccagcctgggcaacagagcgagaccctgtctcaaaaacaacaaaataaatttccttttaacatctgttccaaaaatgagataagcgttatcagggcaagtccatcctcatcactctttccctccccactgccctctccacgatgcccagctgatcaaaagtcatttttactcataagaccaaagtatcatgggatactgtgcagttggagagcaggttgaacatcagaaataattgctgacaataaagtaaaagatgggagaaaaagcaagaccaattgtatataatacagcttc

SEQ ID NO: 63278 - DNA, 425 bp, Homo sapiens
agaatatctcgtatgaaagtgtgagtgtaccagtcaataactgatgttttacattcttgttaaatatgtaaggggaaagaacagattgggtgaaaggcaacttattgaatctatttccagaagtataaataaatgcatactttaaagatgtacctgaagtaaattattgaaaatgagcacacttttttggtttttgttattttattttctttgaaagatgtagtaagtacagtgtagtgattgaaaactactggactctggagcctggatttcaaattctggttccaccacttactagtcaggtgaacttcagtaagttgctttaacttcttggtccctcagtttccttacccacggaagtaggaggtaataattatgtgtacctggctcatctagctgttatgatataactaaataagttagta

SEQ ID NO: 63279 - DNA, 503 bp, Homo sapiens
ctctcaaccaggggcagttgtcccctccggggaacacttgctaatgtctggacacagttttggttgtcacgactaggctggtgatgctggagccacaacaaccaccggaaaccccaaggcgaagaccagagaatcccagagatgcagacagagacttcctagagctacagagtaagccaaattggagttgccttttctggacgtcttgttaagtctgatggggttcatcacatctgagccaggactggcttttcttggctgcaagctgaaagttgggtccaggtctgctgtactgagggtctcctatcttccttggacagggacaaccagaggcctatttatctcatgatggaaggcaggagaacaagcaggcaagaccagctgtgctagcacatgccacctctttgcccacgtcacacctgctgacgtcccattggccaatgcaagtcacacaaccaaagccaacatcaacaggacaaggaaacagactctgcctctagatg

SEQ ID NO: 63280 - DNA, 441 bp, Homo sapiens
ttcaaaataatacttctgaagttaatctgttctggtcagtgattcaaaggcagttgattttaatggacagccatgtacaatttataattagtacactgtctataaaatatttgcttctatttgaaatagcattttatatttatatttactatattccatataatcttacagaatttgttcgtaaaattacatttcatcaataatacaaagcttttgcctatccttgctatcaggtgcctgaattagtacacatacacacacacacttgcctaaaaggtgaactttcttgtcaagtaaaataaactactgccttctctaagacattctttcacaaactccaaaattcaggtctcagcatagtggttctcaaaatgtggatcttcaccaacagcatcagcacgacctgagagcctattaaaaaatgttgacctactgaatgag

SEQ ID NO: 63281 - DNA, 363 bp, Homo sapiens
ttcaaaataatacttctgaagttaatctgttctggtcagtgattcaaaggcagttgattttaatggacagccatgtacaatttataattagtacactgtctataaaatatttgcttctatttgaaatagcattttatatttatatttactatattccatataatcttacagaatttgttcgtaaaattacatttcatcaataatacaaagcttttgcctatccttgctatcaggtgcctgaattagtcaagcctgccatttacgtgaggctgcccctaaactattccatagctacaaaaccaccacatttcgttgattctttctttctttcttttctttctttctttccttccttcctggtgt

SEQ ID NO: 63282 - DNA, 859 bp, Homo sapiens
ctgtgtagtcaagagtaaccaccagatgggaagagaatacagatcagcttgtgcaataaagaaaggaaaactccaaaggagattatttccatagactcatcaacttctaagcaaggaatctcaaaaagacaatctaccagagaagtgacttggaccaaagagtaaacgaacaaaattaatgatgtggacagccctaggaatcagcttagaggttcagcctggcccctggtcggcacattctacgagctcgtggaaaagggcaagcacagactatttacagccgcagagaaatggcctcataaaaatgcataaggaatgatggaggatatttgccatctcatttttgaagcctgattcaccgtggcccttggggcttggtccttcctaatgacatctggtctactgccctttgtgctgatgagaacacgaagccccagaggaggggagtcagttcataaagccctctcagctactgtggaaaatcgaagcccagctcactaatttcctacctagagaaagagtaaagacagctttggagaaagacagacctggattcaaatgcagatctcttccttactagatgggcatgcttgggtgaagtgaagtgggtgtgcctgggatcacacacagctgtgcaataccaagtgacatgggacttatacaaaggcagcgccactagtcatgctggaagtttccccaagaagcagggaaaattcatgacgtgatatataagaaaaagttgaattgcttgatatggaccattgattgaggtctgcagctgcagttgctgccatcttagaccgactgttcatcttgtaaacttacagaatcaataaatacggtacagtactcgaaaaaa

SEQ ID NO: 63283 - DNA, 516 bp, Homo sapiens
  misc_feature (15)..(16): n is a, c, g, or t
  misc_feature (18)..(19): n is a, c, g, or t
  misc_feature (26)..(26): n is a, c, g, or t
  misc_feature (51)..(51): n is a, c, g, or t
  misc_feature (53)..(53): n is a, c, g, or t
  misc_feature (67)..(67): n is a, c, g, or t
  misc_feature (82)..(82): n is a, c, g, or t
  misc_feature (92)..(92): n is a, c, g, or t
  misc_feature (121)..(121): n is a, c, g, or t
  misc_feature (150)..(150): n is a, c, g, or t
aggggttattccccnncnnaggcccnccaatagaccaaggcaagccctcangngtaccatgccaagnttaatttacagatgnaggagcaaancccctggcccatacatcagtctggaaggntagaaggttgaaaatcaaggtgttggcanaagccatgtttcctctgaaggctgtagtgtggtggaaaagaaagagagagctgaggcagccgatgtaagatctgctgttacttcttgctgtgtgaccttgggtgaagtgaagtgggtgtgcctgggatcacacacagctgtgcaataccaagtgacatgggacttatacaaaggcagcgccactagtcatgctggaagtttccccaagaagcagggaaaattcatgacgtgatatataagaaaaagttgaattgcttgatatggaccattgattgaggtctgcagctgcagttgctgccatcttagaccgactgttcatcttgtaaacttacagaatcaataaatacggtacagtactcgaaaaaa

SEQ ID NO: 63284 - DNA, 234 bp, Homo sapiens
ttggattccatgcttctcagaccgtgctatcttggaatcctcacagttctgaggggcccctataattagaggccaccatagtggaggagttgaaaccaagcagacaccctactaaaccagagttgttgtcttgttttgcacattaaaactgtgtacaagctttgttttgaaaaaaaaagttgttatgcctgaaaaagaattgaaaactaccaacttaagtaaattaatgtacag

SEQ ID NO: 63285 - DNA, 576 bp, Homo sapiens
agcatgagcccagccagatttatagtctttgtactaaaacttatatataaccagtgatgaggcagtagtaagagaagttccaactgctgttagtgcccataaagctttatgagaggatacttttcttctatttttatagattttttaaaacattctgatgagaacaaatcctaccaatttataaatcaaggtaatgagaagttttattaagaattattgaacagctacattgtagtgtacattttcttttcaaatcatataactatggtgcatttaaagattttcttcttcagaaaagagagaagaatcaaatagacgcaataaaaaatgataaaggggatatcaccaccaatcccacagaaatacaaactaccatcagagaatactacaaacgcctctacgcaaagaatgacattttgttcagaaaacacagatgacctactacttcgcccaacccaggaaaaaatcttcgtgaaatgtgaaataaagtctaaaacatcaaagcgaaagatcagatgagatttaatgaagacccagtgtaaagaataaatgaatcttactccttaaatggaatgg

SEQ ID NO: 63286 - DNA, 1012 bp, Homo sapiens
ggtctctttggcttcagaaattaccaagaaagcctggaccccgggtgaaacggagaaatggacacaagtcccctgtgtttctccattctgttggttttatgcatctttatccaatcaagtgcccttggacaaagcctgaaaccagagcgtgggcatcaaacagcccataggacactatgacttctatcccaacgggggctccttccagcctggctgccacttcctagagctctacagacatattgcccagcacggcttcaatgccatcacccagaccataaaatgctcccacgagcgatcggtgcaccttttcatcgactccttgctgcacgccggcacgcagagcatggcctacccgtgtggtgacatgaacagcttcagccagggcctgtgcctgagctgcaagaagggccgctgcaacacgctgggctaccacgtccgccaggagccgcggagcaagagcaagaggctcttcctcgtaacgcgagcccagtcccccttcaaagtttatcattaccagttaaagatccagttcatcaaccaaactgagacgccaatacaaacaacttttaccatgtcactactcggaacaaaagagaaaatgcagaaaattcccatcactctgggcaaaggaattgctagtaataaaacgtattcctttcttatcacgctggatgtggatatcggcgagctgatcatgatcaagttcaagtgggaaaacagtgcagtgtgggccaatgtctgggacacggtccagaccatcatcccatggagcacagggccgcgccactcaggcctcgttctgaagacgatcagagtcaaagcaggagaaacccagcaaagaatgacattttgttcagaaaacacagatgacctactacttcgcccaacccaggaaaaaatcttcgtgaaatgtgaaataaagtctaaaacatcaaagcgaaagatcagatgagatttaatgaagacccagtgtaaagaataaatgaatcttactccttaaatggaatgg

SEQ ID NO: 63287 - DNA, 1614 bp, Homo sapiens
ggtctctttggcttcagaaattaccaagaaagcctggaccccgggtgaaacggagaaatggacacaagtcccctgtgtttctccattctgttggttttatgcatctttatccaatcaagtgcccttggacaaagcctgaaaccagagccatttggaagaagagctcaagctgttgaaacaaacaaaacgctgcatgagatgaagaccagattcctgctctttggagaaaccaatcagggctgtcagattcgaatcaatcatccggacacgttacaggagtgcggcttcaactcctccctgcctctggtgatgataatccacgggtggtcggtggacggcgtgctagaaaactggatctggcagatggtggccgcgctgaagtctcagccggcccagccagtgaacgtggggctggtggactggatcaccctggcccacgaccactacaccatcgccgtccgcaacacccgccttgtgggcaaggaggtcgcggctcttctccggtggctggaggaatctgttcaactctctcgaagccatgttcacctaattgggtacagcctgggtgcacacgtgtcaggatttgccggcagttccatcggtggaacgcacaagattgggagaatcacagggctggatgccgcgggacctttgtttgagggaagtgcccccagcaatcgtctttctccagatgatgccagttttgtggatgccattcatacctttacccgggagcacatgggcctgagcgtgggcatcaaacagcccataggacactatgacttctatcccaacgggggctccttccagcctggctgccacttcctagagctctacagacatattgcccagcacggcttcaatgccatcacccagaccataaaatgctcccacgagcgatcggtgcaccttttcatcgactccttgctgcacgccggcacgcagagcatggcctacccgtgtggtgacatgaacagcttcagccagggcctgtgcctgagctgcaagaagggccgctgcaacacgctgggctaccacgtccgccaggagccgcggagcaagagcaagaggctcttcctcgtaacgcgagcccagtcccccttcaaagtttatcattaccagttaaagatccagttcatcaaccaaactgagacgccaatacaaacaacttttaccatgtcactactcggaacaaaagagaaaatgcagaaaattcccatcactctgggcaaaggaattgctagtaataaaacgtattcctttcttatcacgctggatgtggatatcggcgagctgatcatgatcaagttcaagtgggaaaacagtgcagtgtgggccaatgtctgggacacggtccagaccatcatcccatggagcacagggccgcgccactcaggcctcgttctgaagacgatcagagtcaaagcaggagaaacccagcaaagaatgacattttgttcagaaaacacagatgacctactacttcgcccaacccaggaaaaaatcttcgtgaaatgtgaaataaagtctaaaacatcaaagcgaaagatcagatgagatttaatgaagacccagtgtaaagaataaatgaatcttactccttaaatggaatgg

SEQ ID NO: 63288 - DNA, 317 bp, Homo sapiens
ttctcccctcccccgtcggagtcagtccctctcttcaaccgcccccaccccctagtactggtctcagcttctccagcgggcctcagccccgtccacccccaaccccgacgcccctttctccgcgccagttctggcccttctcccatatttataagtgtccggccgggacgggcggtgggcgcggcgtccccggcgcgtatcgtaggcagtgtaccgtggccgtgccgtcagagtgtgcgtgtgcgtgtgtgccgtgtcgaggctgtgtagagtgcattgtacagcatattttcatgaataaaattgttttaaatatt

SEQ ID NO: 63289 - DNA, 263 bp, Homo sapiens
cactgtatttgatggcagtgtactaagaagcaattctccaggaaaccaggaatctcaatctaagagtggttccttgagccctcaaaaagtattaaaaatgaaaatttatactgaaaacatgaaatctcaaataaatgaaggtaaagatttttgtggaaataaaattgttgagaacaaaatattactgcaccttgaaaatcctagcacattaccacaggataaagctttagagacattactccaaccctgtaaagattgtcaaa

SEQ ID NO: 63290 - DNA, 844 bp, Homo sapiens
tgagttcctaggtggggagacaggggtgcagctcagatttaaatcaggatagcagcactttcgtgaaaagcctaggcacacagactcccttcatcagggagctgttggtgtggagcttccttttcctgtttcgtgtccttcccaaagtcccactgctattcttgcttttggagtgtgagtgctgcctgtgagaagacttcttctctgcccagctggcccctgcagactgcctccagccctaaggggagcatgaactgcctcatttgcccaagtcagaagggaagcggggaagcagggagaaagcacatggtttctctctgctggggccttaagtccatgagggagtttcccattttacatttttcctctgccctgcccatactcctcttcctcagaactgaacatgttttaaatagaatcccccaacctgagttcttctgcacttctctgtctgataagggccaaggtccagcatttttaccctggctcaaattctgatgccatccaatgatttgcttacagactaaatttttcccccatttttgactcccccacacccgtttgtgcttccattagagataaaggatttcaaaacatttctgtgaaataaactgaaactgaaacatggcttccctcttctcttcccctccctttgtatgtttcactggccggctctgagcgtccaggtaactggggaaggaggaagtcactgttgcctcaaatgttccagccgagaagtagcagctttgccatatgctgggtgactttgtctcaggacagtgtggggccaaagtgtttattctgcaccagcagctagcagactcaagggaaaagtgcaatgctg

SEQ ID NO: 63291 - DNA, 536 bp, Homo sapiens
agcctgtttaccatattgtgagtaatatcatctccccctctggagacctctggagattatgaactgtttcacagacgggtgtacaccctcagtgtacagagggcgtacacccatctgtattgggagtaatatcatcctcttcctccctgaatattaagaacagtatcacaggggtgtttctactccctgcgatatcgcgtgtcatatcctcctctcccacgttgcaattagaaacaatatcagtgggggcgtgtccaccttctgtcatattgaaagtaatatcattttcttccctccaggaccgtgggaacaatatctcaggggggtttccactttctgccatatatgtagtcacatcacccactccgccctggaatattattaaggaccatctaacacgagggtgtatacgtcctgcgatattacgagtaatatcaacttcttggcttctgaatatgaggaagaatatcacagggtgggtgtacacctcgtgctctattatgcggagtcgtatctgtctattatggggagtaata

SEQ ID NO: 63292 - DNA, 175 bp, Homo sapiens
aagaaaaagatattaagatgggcaagtcctggtggcaagacaagcagatgacattacagacaatggacatcaaactgctgccaagctaatttagattgtaaaaacagctccatagtcaataacatgagtgatcttaaatatgcacaattaagctacttctcctttaatactatct

SEQ ID NO: 63293 - DNA, 197 bp, Homo sapiens
tctgaaagacatatcttaaaagagactgatatggcaaattacacagggaagttgggggatctgggagcgtatttgtgcgatactggtgggggacagctatgctctctactgtaagtgggatgtcaacatgtaagaagtagtaatataatactgttatctagcgacatggaagtaaacaccaaaagaatcattcaaaa

SEQ ID NO: 63294 - DNA, 484 bp, Homo sapiens
gattgcttaagtgtatcttgaaatatgcagagttgacttatttttatgatttaattgggttaattcagtatgtttatcacctctcacattatttactatttacttcttaccttgttaccttgtttgtaattgtcttatcaattgtattgataggtcctcttgtacactagaagtagaactcaactccaagcaataagaatacttttagtgggccgggcgcagtggctcacgcctgtaatcccagggtgctggaattgcagacatgagccactgcacccagcctttatgttaaaccttgaatatacatcatctcatgggatagatgccattattattacacacatgcccattttataaatgaggaaaccgagatgcagagaggccaagaaactggcccaacgtcatgcaattagggagtggtgagaccaggatttaacctaggtaatttggttcagagctttaccactgtgctttattgcttcat

SEQ ID NO: 63295 - DNA, 386 bp, Homo sapiens
cacgaggtggcgctataatctattactcaatttataaatgcttcgtggattgcttgctgactattctctttttgttcctgttttacttgcttactttttaaaaatttatttttttaattgaaaaataaaaattgcatctatttattgcatacaacatgttactttgaaatatgcatactctgtggaatgcctaaattgagctaattaacgtatgcattacctcacacactttttatcttttgtgtggtgagaacatttaaaatctactctctaggcaaatttgcaaaaatacaatacaatacaatacattgttattaactgtagtcataatattgtgcaatggatctgtagaactaattcctgccatctaactgaaattttgtact

SEQ ID NO: 63296 - DNA, 583 bp, Homo sapiens
ttccaaacataactcagccagacccctctggtctctaaatagtatctcttctctttgtctttttctgtttcaggcctccagttaccaactcctgtctggtttcatgtccttttctatctggcagtgggaataatgtttttagtgaacactgttctctgggtgacaatacgtaaagaactgaaaagaaagaaaaagtggaatttagaaatctctttggattctggtcatgagaagaaggtaatttccagccttcaagaagacagacatttagaagaagagctgaaatgtcaggaacaaaaagaagaacagctgcaggaaggggtgcaccggaaggagccccagggggccacgtagcagcggctcagttggtggccatcgatctggaccgtcccctgcccacttgctccccatgagcactgcgtacaaacatccaaaagttcaacaacaccagaactgtgtgtctcatggtatataactcttaaagcaaataaatgaactgacttcaactgggatacatttggaaatgtggtcatcaaagatgacttgaaatgaggcctactctaaagaattcttgaaaaactta

SEQ ID NO: 63297 - DNA, 1127 bp, Homo sapiens
cggctggtacggccggaattagggatttcactactcccaccagcttggagacaacatgtggttcttgacaactctgctcctttgggttccagttgatgggcaagtggacaccacaaaggcagtgatcactttgcagcctccatgggtcagcgtgttccaagaggaaaccgtaaccttgcactgtgaggtgctccatctgcctgggagcagctccacacagtggtttctcaatggcacagccactcagacctcgacccccagctacagaatcacctctgccagtgtcaatgacagtggtgaatacaggtgccagagaggtctctcagggcgaagtgaccccatacagctggaaatccacagaggctggctactactgcaggtctccagcagagtcttcatggaaggagaacctctggccttgaggtgtcatgcgtggaaggataagctggtgtacaatgtgctttactatcgaaatggcaaagcctttaagtttttccactggaattctaacctcaccattctgaaaaccaacataagtcacaatggcacctaccattgctcaggcatgggaaagcatcgctacacatcagcaggaatatcacaatacactgtgaaaggcctccagttaccaactcctgtctggtttcatgtccttttctatctggcagtgggaataatgtttttagtgaacactgttctctgggtgacaatacgtaaagaactgaaaagaaagaaaaagtggaatttagaaatctctttggattctggtcatgagaagaaggtaatttccagccttcaagaagacagacatttagaagaagagctgaaatgtcaggaacaaaaagaagaacagctgcaggaaggggtgcaccggaaggagccccagggggccacgtagcagcggctcagttggtggccatcgatctggaccgtcccctgcccacttgctccccatgagcactgcgtacaaacatccaaaagttcaacaacaccagaactgtgtgtctcatggtatataactcttaaagcaaataaatgaactgacttcaactgggatacatttggaaatgtggtcatcaaagatgacttgaaatgaggcctactctaaagaattcttgaaaaactta

SEQ ID NO: 63298 - DNA, 861 bp, Homo sapiens
cggctggtacggccggaattagggatttcactactcccaccagcttggagacaacatgtggttcttgacaactctgctcctttgggttccagttgagctggctactactgcaggtctccagcagagtcttcatggaaggagaacctctggccttgaggtgtcatgcgtggaaggataagctggtgtacaatgtgctttactatcgaaatggcaaagcctttaagtttttccactggaattctaacctcaccattctgaaaaccaacataagtcacaatggcacctaccattgctcaggcatgggaaagcatcgctacacatcagcaggaatatcacaatacactgtgaaaggcctccagttaccaactcctgtctggtttcatgtccttttctatctggcagtgggaataatgtttttagtgaacactgttctctgggtgacaatacgtaaagaactgaaaagaaagaaaaagtggaatttagaaatctctttggattctggtcatgagaagaaggtaatttccagccttcaagaagacagacatttagaagaagagctgaaatgtcaggaacaaaaagaagaacagctgcaggaaggggtgcaccggaaggagccccagggggccacgtagcagcggctcagttggtggccatcgatctggaccgtcccctgcccacttgctccccatgagcactgcgtacaaacatccaaaagttcaacaacaccagaactgtgtgtctcatggtatataactcttaaagcaaataaatgaactgacttcaactgggatacatttggaaatgtggtcatcaaagatgacttgaaatgaggcctactctaaagaattcttgaaaaactta

SEQ ID NO: 63299 - DNA, 1475 bp, Homo sapiens
cggctggtacggccggaattagggatttcactactcccaccagcttggagacaacatgtggttcttgacaactctgctcctttgggttccagttgatgggcaagtggacaccacaaaggcagtgatcactttgcagcctccatgggtcagcgtgttccaagaggaaaccgtaaccttgcactgtgaggtgctccatctgcctgggagcagctccacacagtggtttctcaatggcacagccactcagacctcgacccccagctacagaatcacctctgccagtgtcaatgacagtggtgaatacaggtgccagagaggtctctcagggcgaagtgaccccatacagctggaaatccacagaggctggctactactgcaggtctccagcagagtcttcatggaaggagaacctctggccttgaggtgtcatgcgtggaaggataagctggtgtacaatgtgctttactatcgaaatggcaaagcctttaagtttttccactggaattctaacctcaccattctgaaaaccaacataagtcacaatggcacctaccattgctcaggcatgggaaagcatcgctacacatcagcaggaatatcacaatacactgtgaaagagctatttccagctccagtgctgaatgcatctgtgacatccccactcctggaggggaatctggtcaccctgagctgtgaaacaaagttgctcttgcagaggcctggtttgtagctttacttctccttctacatgggcagcaagaccctgcgaggcaggaacacatcctctgaataccaaatactaactgctagaagagaagactctgggttatactggtgcgaggctgccacagaggatggaaatgtccttaagcacagccctgagttggagcttcaagtgcttggtgagaatgacgggaagccactggcacagaagaagggactcccttatctcccatgggactgaggcctccagttaccaactcctgtctggtttcatgtccttttctatctggcagtgggaataatgtttttagtgaacactgttctctgggtgacaatacgtaaagaactgaaaagaaagaaaaagtggaatttagaaatctctttggattctggtcatgagaagaaggtaatttccagccttcaagaagacagacatttagaagaagagctgaaatgtcaggaacaaaaagaagaacagctgcaggaaggggtgcaccggaaggagccccagggggccacgtagcagcggctcagttggtggccatcgatctggaccgtcccctgcccacttgctccccatgagcactgcgtacaaacatccaaaagttcaacaacaccagaactgtgtgtctcatggtatataactcttaaagcaaataaatgaactgacttcaactgggatacatttggaaatgtggtcatcaaagatgacttgaaatgaggcctactctaaagaattcttgaaaaactta

SEQ ID NO: 63300 - DNA, 1026 bp, Homo sapiens
ctgatctcttgcagttccagttgatgggcaagtggcctccatgggtcagcgtgttccaagaggaaaccgtaaccttgcactgtgaggtgctccatctgcctgggagcagctccacacagtggtttctcaatggcacagccactcagacctcgacccccagctacagaatcacctctgccagtgtcaatgacagtggtgaatacaggtgccagagaggtctctcagggcgaagtgaccccatacagctggaaatccacagaggctggctactactgcaggtctccagcagagtcttcatggaaggagaacctctggccttgaggtgtcatgcgtggaaggataagctggtgtacaatgtgctttactatcgaaatggcaaagcctttaagtttttccactggaattctaacctcaccattctgaaaaccaacataagtcacaatggcacctaccattgctcaggcatgggaaagcatcgctacacatcagcaggaatatcacaatacactgtgaaaggcctccagttaccaactcctgtctggtttcatgtccttttctatctggcagtgggaataatgtttttagtgaacactgttctctgggtgacaatacgtaaagaactgaaaagaaagaaaaagtggaatttagaaatctctttggattctggtcatgagaagaaggtaatttccagccttcaagaagacagacatttagaagaagagctgaaatgtcaggaacaaaaagaagaacagctgcaggaaggggtgcaccggaaggagccccagggggccacgtagcagcggctcagttggtggccatcgatctggaccgtcccctgcccacttgctccccatgagcactgcgtacaaacatccaaaagttcaacaacaccagaactgtgtgtctcatggtatataactcttaaagcaaataaatgaactgacttcaactgggatacatttggaaatgtggtcatcaaagatgacttgaaatgaggcctactctaaagaattcttgaaaaactta

SEQ ID NO: 63301 - DNA, 1412 bp, Homo sapiens
cggctggtacggccggaattagggatttcactactcccaccagcttggagacaacatgtggttcttgacaactctgctcctttgggttccagttgatgggcaagtggacaccacaaaggcagtgatcactttgcagcctccatgggtcagcgtgttccaagaggaaaccgtaaccttgcactgtgaggtgctccatctgcctgggagcagctccacacagtggtttctcaatggcacagccactcagacctcgacccccagctacagaatcacctctgccagtgtcaatgacagtggtgaatacaggtgccagagaggtctctcagggcgaagtgaccccatacagctggaaatccacagaggctggctactactgcaggtctccagcagagtcttcatggaaggagaacctctggccttgaggtgtcatgcgtggaaggataagctggtgtacaatgtgctttactatcgaaatggcaaagcctttaagtttttccactggaattctaacctcaccattctgaaaaccaacataagtcacaatggcacctaccattgctcaggcatgggaaagcatcgctacacatcagcaggaatatcacaatacactgtgaaagagctatttccagctccagtgctgaatgcatctgtgacatccccactcctggaggggaatctggtcaccctgagctgtgaaacaaagttgctcttgcagaggcctggtttgtagctttacttctccttctacatgggcagcaagaccctgcgaggcaggaacacatcctctgaataccaaatactaactgctagaagagaagactctgggttatactggtgcgaggctgccacagaggatggaaatgtccttaagcacagccctgagttggagcttcaagtgcttggcctccagttaccaactcctgtctggtttcatgtccttttctatctggcagtgggaataatgtttttagtgaacactgttctctgggtgacaatacgtaaagaactgaaaagaaagaaaaagtggaatttagaaatctctttggattctggtcatgagaagaaggtaatttccagccttcaagaagacagacatttagaagaagagctgaaatgtcaggaacaaaaagaagaacagctgcaggaaggggtgcaccggaaggagccccagggggccacgtagcagcggctcagttggtggccatcgatctggaccgtcccctgcccacttgctccccatgagcactgcgtacaaacatccaaaagttcaacaacaccagaactgtgtgtctcatggtatataactcttaaagcaaataaatgaactgacttcaactgggatacatttggaaatgtggtcatcaaagatgacttgaaatgaggcctactctaaagaattcttgaaaaactta

SEQ ID NO: 63302 - DNA, 373 bp, Homo sapiens
ctaagcactgcggacacaaatattgctaaaccgtgtcatgaacattggccctgcctgtgaacttagtactaggtggcacagatcatagcgtggaaggtgcctgatagaatgcatgtgcacagccacacgggaggtctctttcactttggtgttcttgcagagtttgttgtaaagagaatttccaagtgaggaatttccctctctggtattccattgtcaaacttgagattacacataggccccagttgtaataaaatccaacttaattatccaacatcttgtggtctaagattcaggtgttgaagaaaatgtggcaatttaataatactcacggtactcttccacattaaaatgaatttttttttcagaatta

SEQ ID NO: 63303 - DNA, 162 bp, Homo sapiens
agctgagaatccttgagcttaccatttgatatttctatattaatttaaagaaaagtcaaaagattttgaaaacagcaatagaagtaagatcctttaagctctattcagcagcccctaagaaaagtgatgaggacactgtgcatgcccatatgtgaacatggt

SEQ ID NO: 63304 - DNA, 297 bp, Homo sapiens
aaaatctgacaagtgtgttgacaacggtgattttaaaggtcctaaaagattctccagatatcagagccattttcacatagtagaagggcacattccctgcagtggcctgtgtcatacacagccaatttaaccttttcactgcctggttattctgcaaagtgcatcctagaatgcccttcccctctgagctcctctacaaaattctgattctttctcaaactgtaaagcctctggcatttgccaagagccaaggccctcctgaagccatagtttgagaacaagccaagaggcagacat

SEQ ID NO: 63305 - DNA, 601 bp, Homo sapiens
gtagaaggggagacttggtctcatgtgtgagttttagtttaagagtttgccctgccaccttcctgccatggctgtttccaaacagctgagtgagccaaggtcacaagggcttggcctgatgttgattttgttttgtttgttttactgtcactggtttttatattttcatggtagaacaggtttgccctagcctgttttacttagttcggaaaaaaaaattcttgcttcctttcccgagccttgctgctgcatagtttattgctgggtcaggttcttcgtgcatttggtttgatgtttggcaacccccagaagtgtgtcactgggttgctaactgacacttttaaatcctttagcttcaacactttcccagcccaaccaaaaggttcacagtggattccttattatctttattctgcattgcctttcagtaaagggaattgctttgcacacttgatttggtgatactaaaagatagtggccggctgggtgtggtggctcatgcctgtaatcccagcactttgggaggctaagacaggtggatcacctgaggtcaggagttcgagaccagcctgaccaacatggtgaaaccctgtctctacta

SEQ ID NO: 63306 - DNA, 1038 bp, Homo sapiens
cttcgtgctccaccctgcactgggtacacacaggtggaggcaaggcccccaggcatgctgcttataaggtatctgtatgcgtccttcaattatctgtacaaatttcacattcactccatatttttctacatgtttcttccatgttgacagttggaagaccttcaagcagcccctggtggctgtttttaggtcttcagctgcagttaggctgttccacgcatgagatcgtgaaagagatcatttctcgctcggtctaacagcagggccctgtggtcagtcttcctatcagactttctgaagggttgggaataacagaagggtatttttaacacatgagagaaaactgccatctgaatgctaaacatatttgtccccaacaccccagagtaacaaatgaaaagaattacatgagttgcttgtggacacgtcccagctcctttttttatcttgctctcctgtcttgagggttcttctccaagtgacactccttcctcaagccccccaggcctatcattaacctgctgggatccttcccaccaggactgtgattgccctgaaacttgaccagtataatccatggtgcacagtaatttatggccatattcttcagtagcctgagttagtctgttctgtcatcatgagaggtgagctacatacagcagagagggcccgatagggcttagatgttttgtctcctccaaatctcgtgttgaaatgtgacctccagtactggaggtgggcctgctgggaggggtcgggtcatgggaacggatccctcatgaatggcttggtgctgtccttggcaatagtgagcgagttctcactctgagttcacaggagatctggttgtttaagagagtgtggcacctgccccctcacagtcttgctcccaccctagccgtgtgacacacctgttctcccttcgcttccagcatgattggaagcttcctgagcccctcaccaggagcagacactacccatgcttcctgtacagcctgtaaaatcatgagccaattaaaccccttttctttataaatt

SEQ ID NO: 63307 - DNA, 556 bp, Homo sapiens
cacaacaatagaaacttacacatggcaaatggctatgcagtacagctcccgatatctggtccactaaattgacctttgagcttagtgtgggaatttcttgcctcctttctatcacttctgagaacaaattctataagcagaaatgcctggaattattgtctggggtcgaggtgttttgtttcaatataagctggccagtctggaaccaaaaggacgaatgtttaacttgtataatcttcttgcagggaaacaggcaagtgtttttgcaagcataaaaggcacaaagtggagtttatttttggtcagagagatgaagaagtaaatcacaaggcaaaatttgttgtttgtttgaagaggggagcagtattaacaagcaaataaaatgccttctatgatttccacagttacaattatagatcctaatcttgcaaatacatgtcaccaaatgcacaacattttgggaatgatggtaaaattgtatgactgaaaaaatcataaatatttaagctatattgttttattaataaattgggtacttacagaattaaaaaaaaag

SEQ ID NO: 63308 - DNA, 534 bp, Homo sapiens
aataaataaaaaatacttctgctatgaaaaacctagttggtatttttgcttatttaatactatagaaatatggtgatctcatctttaatagagtgcttttaaggtccccagtgataatctcctaaaatcatgaactttaagaatttataatgttaatatgaggaaatgaaatctggattatctcaccacatattatataattcattagtgacagagcaagaactccaggtcacctgtctattccatgtttttcctatctgcctttaaatgttgagatactacccttatctcatgtgaatggagaaactgcctaaaatgctaaaactgactcagaggcacccagacataagtgaagtgtgattagaaaatcctggtcagttgagtcttagccaaatgtgtacctactgtgtactgcctctatcaagtcaatgaaaacatgatctgagaactgtaagtccatttatggaaaggtttgatttagagatattttgaacttccagtgatgagccccttctcaaatagctgtattctgaa

SEQ ID NO: 63309 - DNA, 308 bp, Homo sapiens
tcacatatatacattaaaaaatttccttaagtggatatatttctaaaatgtcctcaaatttggagcctcactcttgtgagtttcttcctttctcacagtcagctctgactatgcttttccacacaatattatcccctgacatcaagtgtgtggaaggtgcagaagttcttgcagaaatccataaataaatgaaaaatcctttgttttggcctcctaggctggctttgcagtcacgtagaggtagcctagctttggaaatgttgctaaacatgtctggtttaccctctttcttactcctttcccacaat

SEQ ID NO: 63310 - DNA, 402 bp, Homo sapiens
gcatagggaagactgaaattcttgaattcctatggttgagtggaatcttataactagttatgacgtttgaattttgtgtggaagtgacatgcaacagacacttccaggctggagcctggagcctatttgtgactttttagagctttcttttgtctttggtacaatagccagcagcattcaagatggtggctgctccatcagcctgggactccaggtgactacaataagcaaagtttcctgcttaaatgtaatgaatacgtagcttcagtaaaaaagaaaccggctgggcgtggtgtaatcccacctgtaatcccaacactttgggaggttgaggtgggcggatcacctgaggtcgggagttcgagaccagcctgaccaacatggagaaaccccgtctccatt

SEQ ID NO: 63311 - DNA, 513 bp, Homo sapiens
gcatttggtggatgggaagagtgtagagacaaaactatcagaaggctattgtgaggtcctccgagtatgattttggtggctgtaatgggaacaaagagaaagtgaggaatgtaacagacaccagcagagattaccagtgagtgcaggcatgcagccgtggagatggagacagagggctatcaggaggaagaaatgatctggagataaggtgattcatccagctctagagggcaggctgaaatactggcaaaatagagaaagcataaaagtttagcagacaattggaagcgcagacctggcactaaggacagaggggacacttagaaatgtgcagtcaggactgatctgctcagaggtcataactgatacgtttttgaagaaagggagcacaaggagaggagagccaggacccaccagggcatggcaggaggaggagaggggggtgaatcagggcagcgcctctgtggaaccgcgggaagagtgtttcaaggaagaagtgtttcacgggacgca

SEQ ID NO: 63312 - DNA, 949 bp, Homo sapiens
atcatagctcactgcagccttgaactcctggactcaagcagtcctcccacctcagcctcctgaatagctgaatacaggcatgcgctaccatacctggctaattattattattgtttttgtagaaatggggtcttgctctatagcccaggctggtcttgaactcctgggctcaagccatcctcctgccctggcctcccaaagtgctgggattataggcatgagccacggtgcccagcctttgtcttagtttttggtccccctcacccgaccccagagttctagaaccattcccttgcaaagaaagggactgctcacggctggggatggagaagtgctgtggtaggagccctttcttctctttcttccccagctggattgccaaacctaccctgcggtcctcgtcttcctggccccatagctcctcctcaccaagcatgtcttccccactgcagagagctgcgggaggtaccaagagggccttgtctgcatcttctagttcctctgccagtctacccttcgatgacagggactcaaaccatccctcagagggtaagtagatgttgcattgtgcggccacttcctgtgtccgtggcagccttccccctctcgttttcccacattgatgataatattcgtgggactgtgtgaatacaccagaagtgctgtactcgttcagcacagtgacaccctccctccagctccaggtgttttttttttggcggtcctagatgttgtagacatcaaaatagtagtacatcctgttttttgtttgtttgtttgtttgtatgagatggaatcttgccctgtcgcccaggctggagtgcagtggtgtgatcttggctcactgcaacctccgccttccgggttcaagcacatcctgtttttaatccatcatccatcgtgtctaaacctctcttaaacacatttctgtgttcagtatgtacaaccc

SEQ ID NO: 63313 - DNA, 800 bp, Homo sapiens
ctgccaaccagttatttagcatgctttttattttagttacacagagcgtaacattaacccaagagcagaaaggttttatttacagggttttcgaacttggtttgtaagacagctgccatcacaagcatagcttacaaatgtgctggggacccctaattgggaagtgctttcctctcaaatttttattttttatttttagagacagagtcttgctctgtcatccaggctggagtgcaatggcacgtttttcggcttaccgcaactgccgcctcctgggttcaagcgatagctgggattacaggcatgcgccaccatgcccagctaatttatttgtatttttagtagagacggggtttctccatgttggtcaggctggtctcgaactcccgacctcaggtgatgtgcacacctcagcctcccaataaaccatgacttttaagaggaatagcaggtttacttcccctgccagcattggggtgctctctaagcaacagtaggcggagagtggtctggcgtattaaaaacaaaggatcgtcaagtgggccttcccaggcattgctttgacttagtacatgtagaggatgtggcagttctctccgtccctgccactgctggtttctttgttaaatgtttagttgaaatggcctgatacgatatttgagtagttcactgttggtgctttgcctagcaggattctaatcttgctttggttgtggtcccctgatgccctcctgttaggagtggaggaggtcgaagctccttgtaagatatgattactgggaccattagtgtcaagttcc

SEQ ID NO: 63314 - DNA, 1055 bp, Homo sapiens
ctgccaaccagttatttagcatgctttttattttagttacacagagcgtaacattaacccaagagcagaaaggttttatttacagggttttcgaacttggtttgtaagacagctgccatcacaagcatagcttacaaatgtgctggggacccctaattgggaagtgctttcctctcaaatttttattttttatttttagagacagagtcttgctctgtcatccaggctggagtgcagtggcgtgatctcggctcactgtagcctctgcctcctgagtttaagcgattctcctgccttggcctcccaaagtgctggaattacaggcatgagccgctgcatctggccatcctctcaaattttcaagtgttccacaagtatgttctctactgaagagttgctgcatccttgaatcttgggtgatttgaggcacagaaactatgactttattttttgagatggagttttgctcttgttgcccaggctggagtgcaatggcacgtttttcggcttaccgcaactgccgcctcctgggttcaagcgatagctgggattacaggcatgcgccaccatgcccagctaatttatttgtatttttagtagagacggggtttctccatgttggtcaggctggtctcgaactcccgacctcaggtgatgtgcacacctcagcctcccaataaaccatgacttttaagaggaatagcaggtttacttcccctgccagcattggggtgctctctaagcaacagtaggcggagagtggtctggcgtattaaaaacaaaggatcgtcaagtgggccttcccaggcattgctttgacttagtacatgtagaggatgtggcagttctctccgtccctgccactgctggtttctttgttaaatgtttagttgaaatggcctgatacgatatttgagtagttcactgttggtgctttgcctagcaggattctaatcttgctttggttgtggtcccctgatgccctcctgttaggagtggaggaggtcgaagctccttgtaagatatgattactgggaccattagtgtcaagttcc

SEQ ID NO: 63315 - DNA, 176 bp, Homo sapiens
gcaaaaagatgtaatatatgtaatatggcatcacagaagaggtgagaaatgtacattttaaaagatattagccaaacatttctaaaacccatgaaggatatcaagtacatcaaggttcaaggaatgctactaacttgaagaacaaaatgtacaaagagagtctcattgtgttgcac

SEQ ID NO: 63316 - DNA, 199 bp, Homo sapiens
gttttagaagataagggttgaggctaccgatcctaagtatttgcattttaacatggtgatttctgataaataaaaggataacctttctgggttcttaggagcaaagaagataatggctgcggaattgctctacagcataatgtataagaatttcgttgggtcattaataaataatgcaattattttatcacattttcaa

SEQ ID NO: 63317 - DNA, 433 bp, Homo sapiens
ggcctcaggacgctttggaatgaagagccagggctgtcttttgtgtgacgcgagagccgccgggacgcttcaactctgcagctgctgaagctctgcgagcgaagtcgatgcccaagagagaggggtttggacgtcgtgagaggcgaggcggccgtgttcattcattgttctcgttctagggctctgggtgtgcccctggtattcattctgtggtgggaagaaggaatggaacttagtgtatccttgagatgtgaacgggttctagggggtcacttaatctaagtggaaaatgaattcaaggcacgttcattgagcgtttctgcttgcctggtcctctgtgggctgagtggagagactctgccctccctgcgctcctaaggcgtgaaaacaatgcagtgtgataagaattggcttatcaagtgttatggggatt

SEQ ID NO: 63318 - DNA, 367 bp, Homo sapiens
cttctcttccatcaagactacatctcaaccatccaaagaaactagattggttataattgtctagactggttataattgtaaaaagcagaatagcctgggcacggtggctcgtgcctgtaatcccagcactttgggaggccgaggcaggtggatcacctgaggtcaggaattcgagaccagcctgaccaacatggagaaaccctatctctactaaaaatataaaattagccaggcgtgggggtgcatgcctgtaatcccagctcctcgggaggctgaggcaggagaatcgcttaaacctgggaggcggaggttgccgtgagccgagatcatgccattgcactccagcctgggcaagaagagcggggaa

SEQ ID NO: 63319 - DNA, 766 bp, Homo sapiens
tcggttgcccttcaaacgcctgcaacaccagtgatgatgtaaacttctctccttggcaggacatgggcaaacatgctgattggtgcaaatgtggtgccgagctgtccatagctgcagtgaaagatgaagagcaagaccttctctaggttttctagctttcattaaatgtatttttttccccagagctaatttgaaagttgattggaccactgtggatggggtgtcattaagaatgtgggaaataggggccgagtgcggtggctcacacctgtaatcccagcagtttggaaggccagggcaggtggatcgcttgatcccaggaggtcgagaccagcctggggaacacatcctgtctctacaaaaaatacaaaaattagccaggcagggtggtgcatgcctgtagtcccagctacttgggaggctgaggcaggagaattttttgagcccaggatgcagaggttgaagtgagccaagatcgtgccactgcactccagccttgagacagagcgagaccctgtctcaaaaaaaaaaaaagaacgtgggaaatatgaacctttgaaagttaatctgtgaattgaaagtttaacaataaaagtagttgtttgtttcctttggaagagttttgttccagatgtttgtaatttggttgtttgtaatttggaatgagagaatttttttttcttaggagtgattgcaagaaattaacatgaacaacagtggtcataactgattaaaagctgacacgtcagtaacaaaattgtttata

SEQ ID NO: 63320 - DNA, 3673 bp, Homo sapiens
cgcgtacgcgggtcacgtgagggcgcggcgcggcagcagctccggcggccgagacgggggcggcggccgcgcgggtctggcgggaccggtttggaagactttgccggcctgcagattggccttaagagaaggacggagccacatactgctgacggcccagaactggcagagagaaggttgccatggctgctgttgacagtttctacctcttgtacagggaaatcgccaggtcttgcaattgctatatggaagctctagctttggttggagcctggtatacggccagaaaaagcatcactgtcatctgtgacttttacagcctgatcaggctgcattttatcccccgcctggggagcagagcagacttgatcaagcagtatggaagatgggccgttgtcagcggtgcaacagatgggattggaaaagcctacgctgaagagttagcaagccgaggtctcaatataatcctgattagtcggaacgaggagaagttgcaggttgttgctaaagacatagccgacacgtacaaagtggaaactgatattatagttgcggacttcagcagcggtcgtgagatctaccttccaattcgagaagccctgaaggacaaagacgttggcatcttggtaaataacgtgggtgtgttttatccctacccgcagtatttcactcagctgtccgaggacaagctctgggacatcataaatgtgaacattgccgccgctagtttgatggtccatgttgtgttaccgggaatggtggagagaaagaaaggtgccatcgtcacgatctcttctggctcctgctgcaaacccactcctcagctggctgcattttctgcttctaaggcttatttagaccacttcagcagagccttgcaatatgaatatgcctctaaaggaatctttgtacagagtctaatccctttctatgtagccaccagcatgacagcacccagcaactttctgcacaggtgctcgtggttggtgccttcgccaaaagtctatgcacatcatgctgtttctactcttgggatttccaaaaggaccacaggatattggtcccattctattcagtttctttttgcacagtatatgcctgaatggctctgggtgtggggagcaaatattctcaaccgttcactacgtaaggaagccttatcctgcacagcctgagtctggatggccacttgagaagttttgccaactcctgggaacctcgatattctgacatttggaaaaacacatttaatttatctcctgtgtttcattgctgattattcagcatactgttgattcgtcatttgcaaaacacacataataccgtcagagtgctgtgaaaaaccttaagggtgtgtggatggcacaggatcaataatgcctgaggctgattgacgacatctacatttcagtgctttttccctaagctgtttgaaagttacgcttttctgttgttctagagccacagcagtctaatattgaaatataatatgatttgtcaggtcttataatttcagatgttgttttttaagggaaattgaccatttcactagaggagttgtgctggtttttaaatgtgcatcaagaaagactactgaaaagtattattttgtaactaagattgctggtactattaggaaaaatctgtgtgtattgtatagctctagctgtttgactatctgtaatgaaaatgctgcacttcaactggtatttcattagagaaccgtgtgtgtgcgtgtgtgtggtgcctttgagcaactttatttatggttaccatatttttaaaaagattttttgtcagggtgacttaacatggactcttatagggtattaaaacaatctagattattccttttcatcctaaataagcctaccaaatttcatgctgttggtttgccatgaatgatattacttcctacattatatttgtgttttttcaaatctgctatggaatgaacttattcctagatttggatatgtaagagaaacctgcagtcatcttttgatttataaggcaattcttgtggataaatagtgatttctcagcctctgacccattttataactgaaatttagccctttagagcttgttatatctggttttcctacgtttttctatgtaatattattccattccagtagcattattgatagaaatagtaagtatttatggaatagtaaaatatggacaaattacgtgtgtgacatatctgtcaatataagttagaagcttattcttggtttgtgtaatgaatttatgtattgtagtgaatacctttactggtgtgaagataattatgcacaaaccctcacaatacgcgttaacattgaaacctgtgaaatgtccttagtttgggtcatataaagccaaccatttttgaggaccatgtacctagtgctttgaaaactctaagtcactatatgaatatgacaatatgtgcacatttaaaattcagagctcggcattgtgatactgatgcagaagctagtagattggttaaaagtctggacttctgtggcatttttttcgtgacgtgataatctatcataagcagacctaagcacagttttatgaacacaattttgcccatgacattgcctacaggatttccagatgtgacttgcactcagaagatcagtggtcaacttcagaagctcttccacgcttagatcatgtcttcagaacttagatgtgaaaatctacacactgggagatgctgtgagccccaaggttttgatggagtttgcttggaatcctcttgacttcatgccacattgacgtgaactttgatgtataataagcagcagcaacttcatgtgaaaatatggtcaggtagttatatgtaaggttacgtggtccagtaatgtcttagattgataaattaggtatggaatccatcagtgttacgtgatgagaataggtgaacacaccttgtcagtgatgatgtaaacttctctccttggcaggacatgggcaaacatgctgattggtgcaaatgtggtgccgagctgtccatagctgcagtgaaagatgaagagcaagaccttctctaggttttctagctttcattaaatgtatttttttccccagagctaatttgaaagttgattggaccactgtggatggggtgtcattaagaatgtgggaaataggggccgagtgcggtggctcacacctgtaatcccagcagtttggaaggccagggcaggtggatcgcttgatcccaggaggtcgagaccagcctggggaacacatcctgtctctacaaaaaatacaaaaattagccaggcagggtggtgcatgcctgtagtcccagctacttgggaggctgaggcaggagaattttttgagcccaggatgcagaggttgaagtgagccaagatcgtgccactgcactccagccttgagacagagcgagaccctgtctcaaaaaaaaaaaaagaacgtgggaaatatgaacctttgaaagttaatctgtgaattgaaagtttaacaataaaagtagttgtttgtttcctttggaagagttttgttccagatgtttgtaatttggttgtttgtaatttggaatgagagaatttttttttcttaggagtgattgcaagaaattaacatgaacaacagtggtcataactgattaaaagctgacacgtcagtaacaaaattgtttata

SEQ ID NO: 63321 - DNA, 3622 bp, Homo sapiens
cgcgtacgcgggtcacgtgagggcgcggcgcggcagcagctccggcggccgagacgggggcggcggccgcgcgggtctggcgggaccggtttggaagactttgccggcctgcagattggccttaagagaaggacggagccacatactgctgacggcccagaactggcagagagaaggttgccatggctgctgttgacagtttctacctcttgtacagggaaatcgccaggtcttgcaattgctatatggaagctctagctttggttggagcctggtatacggccagaaaaagcatcactgtcatctgtgacttttacagcctgatcaggctgcattttatcccccgcctggggagcagagcagacttgatcaagcagtatggaagatgggccgttgtcagcggtctcaatataatcctgattagtcggaacgaggagaagttgcaggttgttgctaaagacatagccgacacgtacaaagtggaaactgatattatagttgcggacttcagcagcggtcgtgagatctaccttccaattcgagaagccctgaaggacaaagacgttggcatcttggtaaataacgtgggtgtgttttatccctacccgcagtatttcactcagctgtccgaggacaagctctgggacatcataaatgtgaacattgccgccgctagtttgatggtccatgttgtgttaccgggaatggtggagagaaagaaaggtgccatcgtcacgatctcttctggctcctgctgcaaacccactcctcagctggctgcattttctgcttctaaggcttatttagaccacttcagcagagccttgcaatatgaatatgcctctaaaggaatctttgtacagagtctaatccctttctatgtagccaccagcatgacagcacccagcaactttctgcacaggtgctcgtggttggtgccttcgccaaaagtctatgcacatcatgctgtttctactcttgggatttccaaaaggaccacaggatattggtcccattctattcagtttctttttgcacagtatatgcctgaatggctctgggtgtggggagcaaatattctcaaccgttcactacgtaaggaagccttatcctgcacagcctgagtctggatggccacttgagaagttttgccaactcctgggaacctcgatattctgacatttggaaaaacacatttaatttatctcctgtgtttcattgctgattattcagcatactgttgattcgtcatttgcaaaacacacataataccgtcagagtgctgtgaaaaaccttaagggtgtgtggatggcacaggatcaataatgcctgaggctgattgacgacatctacatttcagtgctttttccctaagctgtttgaaagttacgcttttctgttgttctagagccacagcagtctaatattgaaatataatatgatttgtcaggtcttataatttcagatgttgttttttaagggaaattgaccatttcactagaggagttgtgctggtttttaaatgtgcatcaagaaagactactgaaaagtattattttgtaactaagattgctggtactattaggaaaaatctgtgtgtattgtatagctctagctgtttgactatctgtaatgaaaatgctgcacttcaactggtatttcattagagaaccgtgtgtgtgcgtgtgtgtggtgcctttgagcaactttatttatggttaccatatttttaaaaagattttttgtcagggtgacttaacatggactcttatagggtattaaaacaatctagattattccttttcatcctaaataagcctaccaaatttcatgctgttggtttgccatgaatgatattacttcctacattatatttgtgttttttcaaatctgctatggaatgaacttattcctagatttggatatgtaagagaaacctgcagtcatcttttgatttataaggcaattcttgtggataaatagtgatttctcagcctctgacccattttataactgaaatttagccctttagagcttgttatatctggttttcctacgtttttctatgtaatattattccattccagtagcattattgatagaaatagtaagtatttatggaatagtaaaatatggacaaattacgtgtgtgacatatctgtcaatataagttagaagcttattcttggtttgtgtaatgaatttatgtattgtagtgaatacctttactggtgtgaagataattatgcacaaaccctcacaatacgcgttaacattgaaacctgtgaaatgtccttagtttgggtcatataaagccaaccatttttgaggaccatgtacctagtgctttgaaaactctaagtcactatatgaatatgacaatatgtgcacatttaaaattcagagctcggcattgtgatactgatgcagaagctagtagattggttaaaagtctggacttctgtggcatttttttcgtgacgtgataatctatcataagcagacctaagcacagttttatgaacacaattttgcccatgacattgcctacaggatttccagatgtgacttgcactcagaagatcagtggtcaacttcagaagctcttccacgcttagatcatgtcttcagaacttagatgtgaaaatctacacactgggagatgctgtgagccccaaggttttgatggagtttgcttggaatcctcttgacttcatgccacattgacgtgaactttgatgtataataagcagcagcaacttcatgtgaaaatatggtcaggtagttatatgtaaggttacgtggtccagtaatgtcttagattgataaattaggtatggaatccatcagtgttacgtgatgagaataggtgaacacaccttgtcagtgatgatgtaaacttctctccttggcaggacatgggcaaacatgctgattggtgcaaatgtggtgccgagctgtccatagctgcagtgaaagatgaagagcaagaccttctctaggttttctagctttcattaaatgtatttttttccccagagctaatttgaaagttgattggaccactgtggatggggtgtcattaagaatgtgggaaataggggccgagtgcggtggctcacacctgtaatcccagcagtttggaaggccagggcaggtggatcgcttgatcccaggaggtcgagaccagcctggggaacacatcctgtctctacaaaaaatacaaaaattagccaggcagggtggtgcatgcctgtagtcccagctacttgggaggctgaggcaggagaattttttgagcccaggatgcagaggttgaagtgagccaagatcgtgccactgcactccagccttgagacagagcgagaccctgtctcaaaaaaaaaaaaagaacgtgggaaatatgaacctttgaaagttaatctgtgaattgaaagtttaacaataaaagtagttgtttgtttcctttggaagagttttgttccagatgtttgtaatttggttgtttgtaatttggaatgagagaatttttttttcttaggagtgattgcaagaaattaacatgaacaacagtggtcataactgattaaaagctgacacgtcagtaacaaaattgtttata

SEQ ID NO: 63322 - DNA, 3539 bp, Homo sapiens
cgcgtacgcgggtcacgtgagggcgcggcgcggcagcagctccggcggccgagacgggggcggcggccgcgcgggtctggcgggaccggtttggaagactttgccggcctgcagattggccttaagagaaggacggagccacatactgctgacggcccagaactggcagagagaaggttgccatggctgctgttgacagtttctacctcttgtacagggaaatcgccaggtcttgcaattgctatatggaagctctagctttggttggagcctggtatacggccagaaaaagcatcactgtcatctgtgacttttacagcctgatcaggctgcattttatcccccgcctggggagcagagcagacttgatcaagcagtatggaagatgggccgttgtcagcggtgcaacagatgggattggaaaagcctacgctgaagagttagcaagccgaggtctcaatataatcctgattagtcggaacgaggagaagttgcaggttgttgctaaagacatagccgacacgtacaaagtggaaactgatattatagttgcggacttcagcagcggtcgtgagatctaccttccaattcgagaagccctgaaggacaaagacgttggcatcttggtaaataacgtgggtgtgttttatccctacccgcagtatttcactcagctgtccgaggacaagctctgggacatcataaatgtgaacattgccgccgctagtttgatggtccatgttgtgttaccgggaatggtggagagaaagaaaggtgccatcgtcacgatctcttctggctcctgctgcaaacccactcctcagctggctgcattttctgcttctaaggcttatttagaccacttcagcagagccttgcaatatgaatatgcctctaaaggaatctttgtacagagtctaatccctttctatgtagccaccagcatgacagcacccagcaactttctgcacaggtgctcgtggttggtgccttcgccaaaagtctatgcacatcatgctgtttctactcttgggatttccaaaaggaccacaggatattggtcccattctattcagtttctttttgcacagtatatgcctgaatggctctgggtgtggggagcaaatattctcaaccgttcactacgtaaggaagccttatcctgcacagcctgagtctggatggccacttgagaagttttgccaactcctgggaacctcgatattctgacatttggaaaaacacatttaatttatctcctgtgtttcattgctgattattcagcatactgttgattcgtcatttgcaaaacacacataataccgtcagagtgctgtgaaaaaccttaagggtgtgtggatggcacaggatcaataatgcctgaggctgattgacgacatctacatttcagtgctttttccctaagctgtttgaaagttacgcttttctgttgttctagagccacagcagtctaatattgaaatataatatgatttgtcaggtcttataatttcagatgttgttttttaagggaaattgaccatttcactagaggagttgtgctggtttttaaatgtgcatcaagaaagactactgaaaagtattattttgtaactaagattgctggtactattaggaaaaatctgtgtgtattgtatagctctagctgtttgactatctgtaatgaaaatgctgcacttcaactggtatttcattagagaaccgtgtgtgtgcgtgtgtgtggtgcctttgagcaactttatttatggttaccatatttttaaaaagattttttgtcagggtgacttaacatggactcttatagggtattaaaacaatctagattattccttttcatcctaaataagcctaccaaatttcatgctgttggtttgccatgaatgatattacttcctacattatatttgtgttttttcaaatctgctatggaatgaacttattcctagatttggatatgtaagagaaacctgcagtcatcttttgatttataaggcaattcttgtggataaatagtgatttctcagcctctgacccattttataactgaaatttagccctttagagcttgttatatctggttttcctacgtttttctatgtaatattattccattccagtagcattattgatagaaatagtaagtatttatggaatagtaaaatatggacaaattacgtgtgtgacatatctgtcaatataagttagaagcttattcttggtttgtgtaatgaatttatgtattgtagtgaatacctttactggtgtgaagataattatgcacaaaccctcacaatacgcgttaacattgaaacctgtgaaatgtccttagtttgggtcatataaagccaaccatttttgaggaccatgtacctagtgctttgaaaactctaagtcactatatgaatatgacaatatgtgcacatttaaaattcagagctcggcattgtgatactgatgcagaagctagtagattggttaaaagtctggacttctgtggcatttttttcgtgacgtgataatctatcataagcagacctaagcacagttttatgaacacaattttgcccatgacattgcctacaggatttccagatgtgacttgcactcagaagatcagtggtcaacttcagaagctcttccacgcttagatcatgtcttcagaacttagatgtgaaaatctacacactgggagatgctgtgagccccaaggttttgatggagtttgcttggaatcctcttgacttcatgccacattgacgtgaactttgatgtataataagcagcagcaacttcatgtgaaaatatggtcaggacatgggcaaacatgctgattggtgcaaatgtggtgccgagctgtccatagctgcagtgaaagatgaagagcaagaccttctctaggttttctagctttcattaaatgtatttttttccccagagctaatttgaaagttgattggaccactgtggatggggtgtcattaagaatgtgggaaataggggccgagtgcggtggctcacacctgtaatcccagcagtttggaaggccagggcaggtggatcgcttgatcccaggaggtcgagaccagcctggggaacacatcctgtctctacaaaaaatacaaaaattagccaggcagggtggtgcatgcctgtagtcccagctacttgggaggctgaggcaggagaattttttgagcccaggatgcagaggttgaagtgagccaagatcgtgccactgcactccagccttgagacagagcgagaccctgtctcaaaaaaaaaaaaagaacgtgggaaatatgaacctttgaaagttaatctgtgaattgaaagtttaacaataaaagtagttgtttgtttcctttggaagagttttgttccagatgtttgtaatttggttgtttgtaatttggaatgagagaatttttttttcttaggagtgattgcaagaaattaacatgaacaacagtggtcataactgattaaaagctgacacgtcagtaacaaaattgtttata

SEQ ID NO: 63323 - DNA, 2957 bp, Homo sapiens
cgcgtacgcgggtcacgtgagggcgcggcgcggcagcagctccggcggccgagacgggggcggcggccgcgcgggtctggcgggaccggtttggaagactttgccggcctgcagattggccttaagagaaggacggagccacatactgctgacggcccagaactggcagagagaaggttgccatggctgctgttgacagtttctacctcttgtacagggaaatcgccaggtcttgcaattgctatatggaagctctagctttggttggagcctggtatacggccagaaaaagcatcactgtcatctgtgacttttacagcctgatcaggctgcattttatcccccgcctggggagcagagcagacttgatcaagcagtatggaagatgggccgttgtcagcggtgcaacagatgggattggaaaagcctacgctgaagagttagcaagccgaggtctcaatataatcctgattagtcggaacgaggagaagttgcaggttgttgctaaagacatagccgacacgtacaaagtggaaactgatattatagttgcggacttcagcagcggtcgtgagatctaccttccaattcgagaagccctgaaggacaaagacgttggcatcttggtaaataacgtgggtgtgttttatccctacccgcagtatttcactcagctgtccgaggacaagctctgggacatcataaatgtgaacattgccgccgctagtttgatggtccatgttgtgttaccgggaatggtggagagaaagaaaggtgccatcgtcacgatctcttctggctcctgctgcaaacccactcctcagctggctgcattttctgcttctaaggcttatttagaccacttcagcagagccttgcaatatgaatatgcctctaaaggaatctttgtacagagtctaatccctttctatgtagccaccagcatgacagcacccagcaactttctgcacaggtgctcgtggttggtgccttcgccaaaagtctatgcacatcatgctgtttctactcttgggatttccaaaaggaccacaggatattggtcccattctattcagtttctttttgcacagtatatgcctgaatggctctgggtgtggggagcaaatattctcaaccgttcactacgtaaggaagccttatcctgcacagcctgagtctggatggccacttgagaagttttgccaactcctgggaacctcgatattctgacatttggaaaaacacatttaatttatctcctgtgtttcattgctgattattcagcatactgttgattcgtcatttgcaaaacacacataataccgtcagagtgctgtgaaaaaccttaagggtgtgtggatggcacaggatcaataatgcctgaggctgattgacgacatctacatttcagtgctttttccctaagctgtttgaaagttacgcttttctgttgttctagagccacagcagtctaatattgaaatataatatgatttgtcaggtcttataatttcagatgttgttttttaagggaaattgaccatttcactagaggagttgtgctggtttttaaatgtgcatcaagaaagactactgaaaagtattattttgtaactaagattgctggtactattaggaaaaatctgtgtgtattgtatagctctagctgtttgactatctgtaatgaaaatgctgcacttcaactggtatttcattagagaaccgtgtgtgtgcgtgtgtgtggtgcctttgagcaactttatttatggttaccatatttttaaaaagattttttgtcagggtgacttaacatggactcttatagggtattaaaacaatctagattattccttttcatcctaaataagcctaccaaatttcatgctgttggtttgccatgaatgatattacttcctacattatatttgtgttttttcaaatctgctatggaatgaacttattcctagatttggatatgtaagagaaacctgcagtcatcttttgatttataaggcaattcttgtggataaatagtgatttctcagcctctgacccattttataactgaaatttagccctttagagcttgttatatctggttttcctacgtttttctatgtaatattattccattccagtagcattattgatagaaatagtaagtatttatggaatagtaaaatatggacaaattacgtgtgtgacatatctgtcaatataagttagaagcttattcttggtttgtgtaatgaatttatgtattgtagtgaatacctttactggtgtgaagataattatgcacaaaccctcacaatacgcgttaacattgaaacctgtgaaatgtccttagtttgggtcatataaagccaaccatttttgaggaccatgtacctagtgctttgaaaactctaagtcactatatgaatatgacaatatgtgcacatttaaaattcagagctcggcattgtgatactgatgcagaagctagtagattggttaaaagtctggacttctgtggcatttttttcgtgacgtgataatctatcataagcagacctaagcacagttttatgaacacaattttgcccatgacattgcctacaggatttccagatgtgacttgcactcagaagatcagtggtcaacttcagaagctcttccacgcttagatcatgtcttcagaacttagatgtgaaaatctacacactgggagatgctgtgagccccaaggttttgatggagtttgcttggaatcctcttgacttcatgccacattgacgtgaactttgatgtataataagcagcagcaacttcatgtgaaaatatggtcaggacatgggcaaacatgctgattggtgcaaatgtggtgccgagctgtccatagctgcagtgaaagatgaagagcaagaccttctctaggttttctagctttcattaaatgtatttttttccccaga

SEQ ID NO: 63324 - DNA, 1461 bp, Homo sapiens
  misc_feature (20)..(20): n is a, c, g, or t
  misc_feature (37)..(37): n is a, c, g, or t
  misc_feature (39)..(39): n is a, c, g, or t
  misc_feature (51)..(51): n is a, c, g, or t
tctgcttatgatagattatnacgtaacgaaaaaaatncnacaaaagtccanactttaaaccaatctactagcttctgcatcagtatcacaaaaccctcacaatacgcgttaacattgaaacctgtgaaatgtccttagtttgggtcatataaagccaaccatttttgaggaccatgtacctagtgctttgaaaactctaagtcactatatgaatatgacaatatgtgcacatttaaaattcagagctcggcattgtgatactgatgcagaagctagtagattggttaaaagtctggacttctgtggcatttttttcgtgacgtgataatctatcataagcagacctaagcacagttttatgaacacaattttgcccatgacattgcctacaggatttccagatgtgacttgcactcagaagatcagtggtcaacttcagaagctcttccacgcttagatcatgtcttcagaacttagatgtgaaaatctacacactgggagatgctgtgagccccaaggttttgatggagtttgcttggaatcctcttgacttcatgccacattgacgtgaactttgatgtataataagcagcagcaacttcatgtgaaaatatggtcaggtagttatatgtaaggttacgtggtccagtaatgtcttagattgataaattaggtatggaatccatcagtgttacgtgatgagaataggtgaacacaccttgtcagtgatgatgtaaacttctctccttggcaggacatgggcaaacatgctgattggtgcaaatgtggtgccgagctgtccatagctgcagtgaaagatgaagagcaagaccttctctaggttttctagctttcattaaatgtatttttttccccagagctaatttgaaagttgattggaccactgtggatggggtgtcattaagaatgtgggaaataggggccgagtgcggtggctcacacctgtaatcccagcagtttggaaggccagggcaggtggatcgcttgatcccaggaggtcgagaccagcctggggaacacatcctgtctctacaaaaaatacaaaaattagccaggcagggtggtgcatgcctgtagtcccagctacttgggaggctgaggcaggagaattttttgagcccaggatgcagaggttgaagtgagccaagatcgtgccactgcactccagccttgagacagagcgagaccctgtctcaaaaaaaaaaaaagaacgtgggaaatatgaacctttgaaagttaatctgtgaattgaaagtttaacaataaaagtagttgtttgtttcctttggaagagttttgttccagatgtttgtaatttggttgtttgtaatttggaatgagagaatttttttttcttaggagtgattgcaagaaattaacatgaacaacagtggtcataactgattaaaagctgacacgtcagtaacaaaattgtttata

SEQ ID NO: 63325 - DNA, 508 bp, Homo sapiens
tgagcacttggatgttactttaatgtaaagttttcccagctgaactatgaggaagaggaaaggcatttgtttcttgttggttttattcacagattggccttaagagaaggacggagccacatactgctgacggcccagaactggcagagagaaggtaagagaccccagggcagggaacgaccacagcagaaaaactggggccccctttgtggtcaggcgccttttgctagacatttacttcaaaaaggttcagattcttgaaaaaaatcgggcttaaggaggaagcttccatctgtgtgggttcctccatgaggcatgcctgacctcctttttgtagcgagagccttactctataggcttggagcaactcatttccccacaaatactgctttggctacaacccattgatcttgatatgtagtatctgttttttctttctttttttttttttcttttttcttttttgagacggagtctccctctgtcgtccaggctggagtgcagtggc

SEQ ID NO: 63326 - DNA, 534 bp, Homo sapiens
cgcgtacgcgggtcacgtgagggcgcggcgcggcagcagctccggcggccgagacgggggcggcggccgcgcgggtctggcgggaccggtttggaagactttgccggcctgcagattggccttaagagaaggacggagccacatactgctgacggcccagaactggcagagagaaggttgccatggctgctgttgacagtttctacctcttgtacagggaaatcgccaggtcttgcaattgctatatggaagctctagctttggttggagcctggtatacggccagaaaaagcatcactgtcatctgtgacttttacagcctgatcaggctgcattttatcccccgcctggggagcagagcagacttgatcaagcagtatggaagatgggccgttgtcagcggtaacctactttataatcaaaataatcttttctgtgaagtcggatgcattattcaaggagctattgaatttaatgtggtgtttttatgggaacatgctgataaaaaaataaaacttatggctcctgccgtga

SEQ ID NO: 63327 - DNA, 3590 bp, Homo sapiens
cacatctacggagtccctttggccacataagattggccttaagagaaggacggagccacatactgctgacggcccagaactggcagagagaaggttgccatggctgctgttgacagtttctacctcttgtacagggaaatcgccaggtcttgcaattgctatatggaagctctagctttggttggagcctggtatacggccagaaaaagcatcactgtcatctgtgacttttacagcctgatcaggctgcattttatcccccgcctggggagcagagcagacttgatcaagcagtatggaagatgggccgttgtcagcggtgcaacagatgggattggaaaagcctacgctgaagagttagcaagccgaggtctcaatataatcctgattagtcggaacgaggagaagttgcaggttgttgctaaagacatagccgacacgtacaaagtggaaactgatattatagttgcggacttcagcagcggtcgtgagatctaccttccaattcgagaagccctgaaggacaaagacgttggcatcttggtaaataacgtgggtgtgttttatccctacccgcagtatttcactcagctgtccgaggacaagctctgggacatcataaatgtgaacattgccgccgctagtttgatggtccatgttgtgttaccgggaatggtggagagaaagaaaggtgccatcgtcacgatctcttctggctcctgctgcaaacccactcctcagctggctgcattttctgcttctaaggcttatttagaccacttcagcagagccttgcaatatgaatatgcctctaaaggaatctttgtacagagtctaatccctttctatgtagccaccagcatgacagcacccagcaactttctgcacaggtgctcgtggttggtgccttcgccaaaagtctatgcacatcatgctgtttctactcttgggatttccaaaaggaccacaggatattggtcccattctattcagtttctttttgcacagtatatgcctgaatggctctgggtgtggggagcaaatattctcaaccgttcactacgtaaggaagccttatcctgcacagcctgagtctggatggccacttgagaagttttgccaactcctgggaacctcgatattctgacatttggaaaaacacatttaatttatctcctgtgtttcattgctgattattcagcatactgttgattcgtcatttgcaaaacacacataataccgtcagagtgctgtgaaaaaccttaagggtgtgtggatggcacaggatcaataatgcctgaggctgattgacgacatctacatttcagtgctttttccctaagctgtttgaaagttacgcttttctgttgttctagagccacagcagtctaatattgaaatataatatgatttgtcaggtcttataatttcagatgttgttttttaagggaaattgaccatttcactagaggagttgtgctggtttttaaatgtgcatcaagaaagactactgaaaagtattattttgtaactaagattgctggtactattaggaaaaatctgtgtgtattgtatagctctagctgtttgactatctgtaatgaaaatgctgcacttcaactggtatttcattagagaaccgtgtgtgtgcgtgtgtgtggtgcctttgagcaactttatttatggttaccatatttttaaaaagattttttgtcagggtgacttaacatggactcttatagggtattaaaacaatctagattattccttttcatcctaaataagcctaccaaatttcatgctgttggtttgccatgaatgatattacttcctacattatatttgtgttttttcaaatctgctatggaatgaacttattcctagatttggatatgtaagagaaacctgcagtcatcttttgatttataaggcaattcttgtggataaatagtgatttctcagcctctgacccattttataactgaaatttagccctttagagcttgttatatctggttttcctacgtttttctatgtaatattattccattccagtagcattattgatagaaatagtaagtatttatggaatagtaaaatatggacaaattacgtgtgtgacatatctgtcaatataagttagaagcttattcttggtttgtgtaatgaatttatgtattgtagtgaatacctttactggtgtgaagataattatgcacaaaccctcacaatacgcgttaacattgaaacctgtgaaatgtccttagtttgggtcatataaagccaaccatttttgaggaccatgtacctagtgctttgaaaactctaagtcactatatgaatatgacaatatgtgcacatttaaaattcagagctcggcattgtgatactgatgcagaagctagtagattggttaaaagtctggacttctgtggcatttttttcgtgacgtgataatctatcataagcagacctaagcacagttttatgaacacaattttgcccatgacattgcctacaggatttccagatgtgacttgcactcagaagatcagtggtcaacttcagaagctcttccacgcttagatcatgtcttcagaacttagatgtgaaaatctacacactgggagatgctgtgagccccaaggttttgatggagtttgcttggaatcctcttgacttcatgccacattgacgtgaactttgatgtataataagcagcagcaacttcatgtgaaaatatggtcaggtagttatatgtaaggttacgtggtccagtaatgtcttagattgataaattaggtatggaatccatcagtgttacgtgatgagaataggtgaacacaccttgtcagtgatgatgtaaacttctctccttggcaggacatgggcaaacatgctgattggtgcaaatgtggtgccgagctgtccatagctgcagtgaaagatgaagagcaagaccttctctaggttttctagctttcattaaatgtatttttttccccagagctaatttgaaagttgattggaccactgtggatggggtgtcattaagaatgtgggaaataggggccgagtgcggtggctcacacctgtaatcccagcagtttggaaggccagggcaggtggatcgcttgatcccaggaggtcgagaccagcctggggaacacatcctgtctctacaaaaaatacaaaaattagccaggcagggtggtgcatgcctgtagtcccagctacttgggaggctgaggcaggagaattttttgagcccaggatgcagaggttgaagtgagccaagatcgtgccactgcactccagccttgagacagagcgagaccctgtctcaaaaaaaaaaaaagaacgtgggaaatatgaacctttgaaagttaatctgtgaattgaaagtttaacaataaaagtagttgtttgtttcctttggaagagttttgttccagatgtttgtaatttggttgtttgtaatttggaatgagagaatttttttttcttaggagtgattgcaagaaattaacatgaacaacagtggtcataactgattaaaagctgacacgtcagtaacaaaattgtttata

SEQ ID NO: 63328 - DNA, 3091 bp, Homo sapiens
cgcgtacgcgggtcacgtgagggcgcggcgcggcagcagctccggcggccgagacgggggcggcggccgcgcgggtctggcgggaccggtttggaagactttgccggcctgcagattggccttaagagaaggacggagccacatactgctgacggcccagaactggcagagagaaggttgccatggctgctgttgacagtttctacctcttgtacagggaaatcgccaggtcttgcaattgctatatggaagctctagctttggttggagcctggtatacggccagaaaaagcatcactgtcatctgtgacttttacagcctgatcaggctgcattttatcccccgcctggggagcagagcagacttgatcaagcagtatggaagatgggccgttgtcagcggtgcaacagatgggattggaaaagcctacgctgaagagttagcaagccgaggtctcaatataatcctgattagtcggaacgaggagaagttgcaggttgttgctaaagacatagccgacacgtacaaagtggaaactgatattatagttgcggacttcagcagcggtcgtgagatctaccttccaattcgagaagccctgaaggacaaagacgttggcatcttggtaaataacgtgggtgtgttttatccctacccgcagtatttcactcagctgtccgaggacaagctctgggacatcataaatgtgaacattgccgccgctagtttgatggtccatgttgtgttaccgggaatggtggagagaaagaaaggtgccatcgtcacgatctcttctggctcctgctgcaaacccactcctcagctggctgcattttctgcttctaaggcttatttagaccacttcagcagagccttgcaatatgaatatgcctctaaaggaatctttgtacagagtctaatccctttctatgtagccaccagcatgacagcacccagcaactttctgcacaggtgctcgtggttggtgccttcgccaaaagtctatgcacatcatgctgtttctactcttgggatttccaaaaggaccacaggatattggtcccattctattcagtttctttttgcacagtatatgcctgaatggctctgggtgtggggagcaaatattctcaaccgttcactacgtaaggaagccttatcctgcacagcctgagtctggatggccacttgagaagttttgccaactcctgggaacctcgatattctgacatttggaaaaacacatttaatttatctcctgtgtttcattgctgattattcagcatactgttgattcgtcatttgcaaaacacacataataccgtcagagtgctgtgaaaaaccttaagggtgtgtggatggcacaggatcaataatgcctgaggctgattgacgacatctacatttcagtgctttttccctaagctgtttgaaagttacgcttttctgttgttctagagccacagcagtctaatattgaaatataatatgatttgtcaggtcttataatttcagatgttgttttttaagggaaattgaccatttcactagaggagttgtgctggtttttaaatgtgcatcaagaaagactactgaaaagtattattttgtaactaagattgctggtactattaggaaaaatctgtgtgtattgtatagctctagctgtttgactatctgtaatgaaaatgctgcacttcaactggtatttcattagagaaccgtgtgtgtgcgtgtgtgtggtgcctttgagcaactttatttatggttaccatatttttaaaaagattttttgtcagggtgacttaacatggactcttatagggtattaaaacaatctagattattccttttcatcctaaataagcctaccaaatttcatgctgttggtttgccatgaatgatattacttcctacattatatttgtgttttttcaaatctgctatggaatgaacttattcctagatttggatatgtaagagaaacctgcagtcatcttttgatttataaggcaattcttgtggataaatagtgatttctcagcctctgacccattttataactgaaatttagccctttagagcttgttatatctggttttcctacgtttttctatgtaatattattccattccagtagcattattgatagaaatagtaagtatttatggaatagtaaaatatggacaaattacgtgtgtgacatatctgtcaatataagttagaagcttattcttggtttgtgtaatgaatttatgtattgtagtgaatacctttactggtgtgaagataattatgcacaaaccctcacaatacgcgttaacattgaaacctgtgaaatgtccttagtttgggtcatataaagccaaccatttttgaggaccatgtacctagtgctttgaaaactctaagtcactatatgaatatgacaatatgtgcacatttaaaattcagagctcggcattgtgatactgatgcagaagctagtagattggttaaaagtctggacttctgtggcatttttttcgtgacgtgataatctatcataagcagacctaagcacagttttatgaacacaattttgcccatgacattgcctacaggatttccagatgtgacttgcactcagaagatcagtggtcaacttcagaagctcttccacgcttagatcatgtcttcagaacttagatgtgaaaatctacacactgggagatgctgtgagccccaaggttttgatggagtttgcttggaatcctcttgacttcatgccacattgacgtgaactttgatgtataataagcagcagcaacttcatgtgaaaatatggtcaggtagttatatgtaaggttacgtggtccagtaatgtcttagattgataaattaggtatggaatccatcagtgttacgtgatgagaataggtgaacacaccttgtcagtgatgatgtaaacttctctccttggcaggacatgggcaaacatgctgattggtgcaaatgtggtgccgagctgtccatagctgcagtgaaagatgaagagcaagaccttctctaggttttctagctttcattaaatgtatttttttccccaga

SEQ ID NO: 63329 - DNA, 385 bp, Homo sapiens
tcaaggttgacacatcaaggttgacacataaaggtggaggagtcagttcttcaaagaacagagaaaaatgctgcaggaagtagaacagcatggacaaagtcattgaggttaagaaggcacctattcaacaaactgaaggaactcctgcaggaagtagaacagcatggacaaagtcattgaggttaagaaggcacctattcaacaaactgaaggaactccagtatagtgaacgagggaagagtcacataaaaagagatgggaaagcaggtggggtggcacaggcctgttgtcccagctactccataggctgagcatgttatgatcatgtctatgaatagccactgtactccagccagagtgacagagctgagaccccatctccact

SEQ ID NO: 63330 - DNA, 835 bp, Homo sapiens
ggaaatgcaaataaaaaccacaatgaaattatataacactagatggctgtcataaaaaagacaaataataaaaattgttggtgagggtgtggagaaatcagaattctcatacgctgctggtggaaatgtaaaatagtggagagactttggaaaacagtctggcaattcctcaaaaggttaaacatagagttaccacataagcccattctattccatttctaggtatataaccaagagaaatgaaaacatacacccatgcaaaaatttgtgccaaaagttcatagtaacattattcataatagccaaaaagcgcaaacaacccaaatgtcccaaatgtctatcaagtgatgaatggattaaaaattgtgttatacccaaacaccagactattactcagccatacgaaggaggtgcgcactcacgttacaacacaaataaaccttgaaaatattatactaagtgaaagaagctggttaccaaaaaaacccccacatattatatgattcgatttatatgaaatgtccagaacaggcaaatccatacaagcacaaagtagattcttggtttcccagggctggagatggaggagatgagggaagttaaggggtgacagctgaaagggtgacagctaaaagggatggaggtttctctgagaggctggggaagatgtgtgaaattgtactgtggcaatggttggtggcacagctctgtgaatatagtaaaagccactgagtggtacaattgaaaccagtgaattgtgtggtatgtgaattatatttcaataaaaaaagtacatatctaattgatataaaaagactggactggaaacacattt

SEQ ID NO: 63331 - DNA, 321 bp, Homo sapiens
tctgagctggattctaccaacaatcttcttaaggaactgccttttgagatttaaaccttattcctctttaatttcccagcgtcctctctgcctaacgaggctggctgtctactttgggctttagtaatgcctatccccttgcaactcctccatcataccacgcaattacacacctccgggcctttgctgttacttacttcacccagaacttgctcccttctttcctccctgctttttcctagcccattttataacattagacaatttaggagttaccttctctaggaaccctttttggaacctcttatagaggactaaggt

SEQ ID NO: 63332 - DNA, 476 bp, Homo sapiens
agggctgttgtttttgcctgtcatggagttccgttcattctgaacatgtcaccggggactttggaatgtgtatccataactccctgattttcaaccacattccagcctgcctgactcatgaagcgtggagcgacccaggaacatcccagctcctcatgtcccacattcttcaggctttctcttagttttggcatgtgcatgtaaatgtcaacagatcaataaaggcaaaaaccaggtagatcccataaatcccgctgagcctgtcatagctatcaaattatacccagataaagcttctggtggctaatgacatggccatcacccagcgtggacgtgggcaggaggggctctccgggagcatctggtctgctgtggagacacttgtcatctggaggctctgtggctctaatggagggtgatgctttgaacgcgactatctcccccataaaaaaataaataaataataagtataattt

SEQ ID NO: 63333 - DNA, 666 bp, Homo sapiens
agggctgttgtttttgcctgtcatggagttccgttcattctgaacatgtcaccggggactttggaatgtgtatccataactccctgattttcaaccacattccagcctgcctgactcatgaagcgtggagcgacccaggaacatcccagctcctcatgtcccacattcttcaggctttctcttagttttggcatgtgcatgtaaatgtcaacagctgcttctgctgactcctcgtctcaattaatcgcggctctgtcttccgtttgctgaagccgaagacctccccgctctctcagagcccatgtctggcacatcagcgaatctcgttggcactgccgtcaaacacatccatctaggatctccccgcacttcacgccacccaccgcgctagtctgtggatccctgtttctctcttggatgtagtaatagtcacatagctggacttctgccctggcacttcttcagccccttgttagaggaatcctgctaaatgttggatgatttaccccccacctcccgcaccccccgccacacacacataggagctccactggctcctcataactctcagggtgccagcctgtctctgccatgacccgaaagctctccgtcatctgtctcccgcccctccctcactgactctatctgccaccctctccctgttgt

SEQ ID NO: 63334 - DNA, 379 bp, Homo sapiens
ccgcttttagggaagattctctgcctgatgtgtgagcgctctaacctcttcatctgtgttcagtccccttgcaatgcttctctaagatcaataaaggcaaaaaccaggtagatcccataaatcccgctgagcctgtcatagctatcaaattatacccagataaagcttctggtggctaatgacatggccatcacccagcgtggacgtgggcaggaggggctctccgggagcatctggtctgctgtggagacacttgtcatctggaggctctgtggctctaatggagggtgatgctttgaacgcgactatctcccccataaaaaaataaataaataataagtataatttaaaaataaacaaagatctggatttgcaggct

SEQ ID NO: 63335 - DNA, 344 bp, Homo sapiens
gatgtccaatattacaacttccaactgttcacgctgttgtctgtttcttctatcaataaaggcaaaaaccaggtagatcccataaatcccgctgagcctgtcatagctatcaaattatacccagataaagcttctggtggctaatgacatggccatcacccagcgtggacgtgggcaggaggggctctccgggagcatctggtctgctgtggagacacttgtcatctggaggctctgtggctctaatggagggtgatgctttgaacgcgactatctcccccataaaaaaataaataaataataagtataatttaaaaataaacaaagatctggatttgcaggct

SEQ ID NO: 63336 - DNA, 1082 bp, Homo sapiens
tgtatttcttcttttagcttagtgatctctgaaaagagaaggaaagaggtggctgtagacctggactccccttccagaccacaacttccccggtgatatgggaccctggaggaggaagtctacaatgtgggggaggtgagttaccaggaagataacctttgcactcagaaggcttgcgaaccccagaggagactgtctgtctgagagatcaccttacccacactgtggaataaaaatattgcctctaacattagggaactggcattcccctcctccactgtttgaaaaggtcagaactggtccttcaagccaaataagttactgcttttgaggtgaagctggtaagacagatctggggcctgcaggcaaagtgggttcagtttccgtttgtagtcaaggcaacttcttccaaaagaggctttcaacctgcctgggcttctaggcccagttgagatccagtgtgactcacaggttataactagtggaccttccatcctcacggagccttggctccacctaccacttggcctgagtcagaagtaaaacaaaaactaaaacgaacaaacaaagaaacttaaaaacataaaggtagagaaagaaagaaaaccacctcagtttgaatctggggttgtcatgtctagctgtatgacgttgagcaagtcactcgacttctctgagcctcagtttccacagattatagggctgagtgagatgaggttgtgacggtgtttgcacactacattggacaaggggctgagcatcatcatatggccaaaagcctgacaaacaacactggtccccacacaagcaactctggtccctcctgaacccacaccaagccaagtgttctccctgtggcagagcacccgtgcacaagagacctgggtagctggaatcaaggtttcacctctccgctcagactttcactttatatataccttactttttgctctgtatgaagtattttatttcagccataatttttttctactttagaaagccaataagaattaatcaatcaataattgccttgatgggggaaaaaccaataaaagtagagctataacaggacttgaacttaa

SEQ ID NO: 63337 - DNA, 443 bp, Homo sapiens
aaaaaattattctaagacctgcaaatgggaaagtcatggtccaagttgggccatttctcattaacaataagttggagcccagtgctcaatcaacctggctcaaaacaccctgatagtccattctgggatcaccctgtaaatcagaaatcatcccacctactctagacaaatgggagatcctggctagtttacctttttctattcctgtgattttaattgcttgctctaaactagggaagtaatctcccaaaataatagcttgaatgtgctacatactatactacgtgcacttaaaaatattacattgaggctgggcgtggtggctcatgcctgtaatcccagaactttgggaggccaaggtgggaggatcacctgaggtcgggagttcaagaccagcctgaccaacatggataaaccctgtctctattaaaaatacaaaatta

SEQ ID NO: 63338 - DNA, 1409 bp, Homo sapiens
tattgattcctaagtagattgactataatctcatgataagtatgtatatgtgcatgggaaaacaacattcaataatagtctttgtgtttaaaactatcatggtatacattttcttatgtggtgcttgaggagtttcattctacagtttacaaggtgtaggtttgcaccccaaattctcagggtatgctatttcacccaaatacttgaaagaaaaaggtgccctgtattttatcagtactgttgagggggaaattttttgtgtaagttgtttgataaaactgcttataaaaatcaaattcacaaaatatgttaggctttcacataatttctaaggagatatatgtagaaataagatatatattatcaagagactgcttatatattcttaactagcttctgggtcctaagtagacctcacaggtgcataaaatcattaataaagcatgtagcacttgctaattggtgccttaagcttgaatctaatcagaattgcagactcgggtcctctgggaaaaaaacatgtccgtctgtggcacgtgtgagtactaggcccaggggaagagtctgaaaattgaattcttttgtgtgtcctgtgtctcagaagagaactgaatgttcagagcagcgtttgtaagctattaacattcagtatttcgtgttgcaactagaacacattattagatttattcctgtttaattcataatggtgcagaataaaacacacacatctgatttgatttctttttctttttttaagtttcataattgctttttatggctagtgttaatggcaaaaagtcctttccagggctccctgaataatctaccatacctgtatccatagcaggtgatgcttttttttatccccactttgaagacgtgtgtttctgtatttacacataaatcatactattgtatattaaagacagcagtggttgaaaagaatgtgaacactgtagaagttatgttggaaaaaaggagagtaaattgtgtgattaatggggaaggatattggataatgttataccccggactatgaaaaaagctggtggtaaatgggaagaatgtgaaattttaaactgctctcaacgtaggaatcttggtggaaaagttcctacctgaggtctgatatgattcaattatagaatgcaatgagcttggccaaggggactttgaatccagccaaggaaactttgaatctcgacagctctgagaatcacattttcagtgcattgaatatggagtaaactatttagacaaggattctgtgagactaggctacttacctttaattgccagcatttgtaaatgattgtgcaatcttgtgtaatggtcttttattttgactgttttggaaaaaaaatgttttattgtttttttttcccagtaaaaattacttcaaagaaaac

SEQ ID NO: 63339 - DNA, 5872 bp, Homo sapiens
  misc_feature (2888)..(2888): n is a, c, g, or t
  misc_feature (3170)..(3170): n is a, c, g, or t
  misc_feature (3186)..(3186): n is a, c, g, or t
  misc_feature (3217)..(3217): n is a, c, g, or t
cgttccgctaccaagagaggcttccggtcagcggagggtttgctccgtctcttggtgaacttgaacagaggcagaggcaaaagcaaaacatttctgcgccaggagatgaggggcggtagagccctggaatggagatgtccttgacgcctgggcagaggctgcagctgcaggaccctgtggccactggagataagtaatggtgccatttgaacacctactggaaacggggcaggaacagtgagtgaccccaggcgagcacaggcaggtgccaggagccaggatgcaaggatgacgcctccggaggccctggcctcactcccacctgggcgctaggagccatcccggggctccagccaggagccctgctgcccaggggcatggccaaacctttcttccgactccagaagtttctccgccgaacacagttcctgctgttcttcctcacggctgcctacctgatgaccggcagcctgctgctgctgcagcgggtccgcgtggctctcccacagggcccccgggcacccggccccctgcagaccttgccagtggccgccgtggcgctgggcgtgggcttgctggacagcagagccctgcacgaccctcgagtcagcccagagctgctgctgggtgtggacatgctgcagagccccctgacccggccccggcccggcccccgctggctccggagccgcaactcggagctgcgtcagttgcgtcgccgctggttccaccacttcatgagtgactcccagggaccgcccgccctgggccccgaggctgccaggcccgccatccacagccgaggcacctacattggatgcttcagtgacgatggccatgagaggactctgaaaggagctgtgttttatgacttgagaaagatgactgtctcccactgccaggatgcgtgtgctgagcggtcctatgtctacgccggcttggaggccggggcggagtgttactgcgggaaccggctgccagcggtgagcgtggggctggaagagtgtaaccatgagtgcaaaggcgagaagggctctgtgtgcggggctgtggaccggctctccgtgtaccgtgtggacgagctgcagccgggctccaggaagcggcggaccgccacctaccgcggatgcttccgactgccagagaacatcacacatgccttccccagctccctgatacaggccaatgtgaccgtggggacttgctcgggcttttgttcccagaaagagttccccttggccattctcaggggctgggaatgctactgtgcttaccctaccccccggttcaacctgcgggatgccatggacagctcagtatgtggccaggaccctgaggcacagaggctggcagaatactgtgaggtctaccagacacctgtgcaagacactcgttgtacagacaggaggttcctgcctaacaaatccaaagtgtttgtggctttgtcaagcttcccaggagccgggaacacgtgggcacggcacctcattgagcatgccactggcttctatacagggagctactactttgatggaaccctctacaacaaagggttcaagggcgaaaaggaccactggcggagccgacgcaccatctgtgtcaaaacccacgagagtggcaggagggagattgagatgtttgattcagccatcctgctaatccggaacccatacaggtccctggtggcagaattcaacagaaaatgtgccgggcacctgggatatgcagctgaccgcaactggaagagcaaagagtggccggactttgtcaacagctacgcctcgtggtggtcctcgcacgtcctggactggctcaagtacgggaagcggctgctggtggtgcactacgaggagctgcggcgcagcctggtgcccacgttacgggagatggtggccttcctcaacgtgtctgtgagcgaggagcggctgctctgcgtggagaacaacaaggagggcagcttccggcggcgcggccggcgctcccacgaccctgagcccttcaccccggagatgaaagacttgatcaatggctacatccggacggtggaccaagccctgcgtgaccacaactggacggggctgcccagggagtatgtgcccagatgataggcctggcccacgccgccgcccccgctgagtgacgcaatcgcaccacggggctgcgctccccactctgatgctcaggcccgtggcctcactgggacgaacggtgggtggggggctcaccctggtgctgcctcccgcacaaggagacctggacacaacagacacacatcacaaggcgaacacaaatggacacacatacctggccacgaacccacacctcctcagacactcagacaccactccaggctcatagccccgtcttgatgcagagaagccacccacgtggggtgtgccaggcacccccagatacaaatgcagccacgcacagacgtaacacacaggtgccaggccgtgtgctcctggaggctggctggctgtctctctcacacagatacacgtgcgctccctgggatccgggaggccctgggcttcctgtgtgtagccctggcatagacttgctcgtcagggtgttcgactctgggatgctgggccgggcagacatttatgctctgagcagcaaggaccattgggatggaggtgggcacaaagactgctgcttccagggtgtgcggccctggccgtgtgtctgacatcccataaatgtgtgtgtggtgtgactacgggcaccacaaactccgcagccttgcctctcttttctctgtggctgggctggctgcaccatgggcagggttgaggactgccccccaccccgcccaagccaatgcagacactgacctcaagaccagccacaccaagtctgtgcactgcccaccacccccttcnacccctcctacaccatgctcctgggcctggggcctccttgcctggcttcttcctccagctatcctcagggaagctggagattcaagtcatgccccagaagcaaggtgtaagcatgggggcgtggggaagagggcaggagctgaagttccaggggagcccaggacccctggggacctgtacactagcaggatgggtcttgggagttggcatggggagattgtaagggctgtatctccgcgattactggtactggtgctccacccataggggccctgttctctntggggtcccacactgnggtcatgagagctagttctcatgagagcagnacccctaggtctggtcctgccagcctgggatgggggtcaatgtatgctacacatcttgggctcacaagtgaggctgtggaggccaggaggttcaagtatggagggtaggagtgcaacccaggagcaacgctcaaggtggccgagatgcagggaggattgtggcgatccggttgcacactggcctctgtggaggtcagggaggtgggaaggtgggtgggcctgaactcaggcagcccttcagtggcttcttcaggcctaggataaccctggccaggccccatggtcctgctctgggtcagctgtcagggagacctcccttcagcctgagccaagctgcattgggaggagaaggcagggtgagggatctgggagagcaggatgttgagatatcctgaccctctgcttcctagcctgatgatggggaacacagagccacccgctatgagcacaggccgggggtggaaggcccagtagagctgcccttccccagatggaagcttcctccaaccttcagtttggccagtgggtgggtttgggcatctgtgcccctggtggcctccaaatccttcctgggattcccccaaacccacactgatgcgaagctgttcttgaccctcccatagcatcaactcagttcagctcaaagctagaaacaccaaggtctttgaaaatgtttattggctcaggatagcttcagcatccaatctgcgaaggcccctgatggagctatttcttcctagtatcaggagcaattgagacccctcaggagtttccacactgctgtggacgggatagccagggcagacctgcatcccagcgcaagcctagatccttgaaagcaatgtcaggtgtggcagtggggaagccatggaggctgggaagggcaaagtgtggagagaggagtgaccgggactggagccagggtctggggagagcaacagcaccaggcttttcctggtagttggattggtacattcactgctgccaggtacccagagatgtcatctctctccaggtagagcatcaccagctcctgtggccttgtagatgactctgtacctcagtgaagagtgcaggcaagtagagtgatggggtcagtgtccatccagtttacgctgagtcagtccatacagcaagacacctggcacttggcaggtactcctggatgttgatgagcaaggaagagcaacggccctgtcagctggcagtggtcctcacagccttcatcccaggtctgcctacgtgggagatctcatcagaaacaggaacggggatctgtctgtgcttgcaggaaagtccatttgtttttctccaagttaggtctcatctacagctcttagcttctcagtaaagaggatactctcccaaccagccaaggaataaaagctgatctgtatgtagggcagaagtgtggcaaatgcatcaggaaccggttagaacagaacagagaaaccctgactgtctacagattccaactttaatagcaagcctgtggagttacacaaacctgtgttaaaacatgtaatttttatggatttcatctcccgttgtggatcaatttggaaaaaccaaaatatgtaattttaaaaaactaaaacacatcctggtagtcccagtgatgtgtaaatgagagagaagaatagacaggcttccaaaccctgggaagaaagctgcttaattatgtgaacatcttataatgaagtctcttgcagctaaaattagattttgagtgcatgaatctgtgataatgtttgcatatcagaatgcattctccccttaaaagtagcagtagccacttggttcttagggggccccaagaggagaggagaagtgctgaggttgatgttacgactgcaagaattcttgggacacaggtttgttttctgctgacttgctcggaaacccattggaggtatctgaaatgtgatgactccaaaggggttcatttcactatagggagaaattgattcgtctgacttcctatttatcaccactcaatattgggtgagttggtctgaacaaggtggggataaagtagagtggaaataatgtagagtcgtcagactgaaaggccaggttgtagtcccagctcttatctgccatcttggacaaagcttttcccatctccagtctcagtttcccatccataaaatgggggaagtggtaggtcttgctgattgcatccacattcattcctccatttcctttcccagcaaccccccatttctgtttgggaattcatatgatctgccagagcctctccaggggtggaatacatgtcctggactaagccaatgacaccttccatctttccagctatggtgactgggttaggtatgatcttgtgagttaagacaatgaagccagagggaatttcaagacttatgggaatgctgggtagaagctgttttaattcccctgttgaatgtgaaaaaggtagtagtattcctgggtctttatgatgaccaccttgggccttgggatcatgaccaggaatcacgtgaagctgacaccactgaagggagagttgagaggcagaaagagatcaagtccttggtgaaattgtttaagtacaggatcaagccttgcttgagattggccttacctctggactttttttgttatatgagctaataaattctgtttattgtttaa

SEQ ID NO: 63340 - DNA, 5864 bp, Homo sapiens
  misc_feature (2880)..(2880): n is a, c, g, or t
  misc_feature (3162)..(3162): n is a, c, g, or t
  misc_feature (3178)..(3178): n is a, c, g, or t
  misc_feature (3209)..(3209): n is a, c, g, or t
gcggggggctgcgggctcggcgcccggggaaggcgggccatgggcgcgggtgcgggcgccccagccggccgcgatcgcgggatttctgcgccaggagatgaggggcggtagagccctggaatggagatgtccttgacgcctgggcagaggctgcagctgcaggaccctgtggccactggagataagtaatggtgccatttgaacacctactggaaacggggcaggaacagtgagtgaccccaggcgagcacaggcaggtgccaggagccaggatgcaaggatgacgcctccggaggccctggcctcactcccacctgggcgctaggagccatcccggggctccagccaggagccctgctgcccaggggcatggccaaacctttcttccgactccagaagtttctccgccgaacacagttcctgctgttcttcctcacggctgcctacctgatgaccggcagcctgctgctgctgcagcgggtccgcgtggctctcccacagggcccccgggcacccggccccctgcagaccttgccagtggccgccgtggcgctgggcgtgggcttgctggacagcagagccctgcacgaccctcgagtcagcccagagctgctgctgggtgtggacatgctgcagagccccctgacccggccccggcccggcccccgctggctccggagccgcaactcggagctgcgtcagttgcgtcgccgctggttccaccacttcatgagtgactcccagggaccgcccgccctgggccccgaggctgccaggcccgccatccacagccgaggcacctacattggatgcttcagtgacgatggccatgagaggactctgaaaggagctgtgttttatgacttgagaaagatgactgtctcccactgccaggatgcgtgtgctgagcggtcctatgtctacgccggcttggaggccggggcggagtgttactgcgggaaccggctgccagcggtgagcgtggggctggaagagtgtaaccatgagtgcaaaggcgagaagggctctgtgtgcggggctgtggaccggctctccgtgtaccgtgtggacgagctgcagccgggctccaggaagcggcggaccgccacctaccgcggatgcttccgactgccagagaacatcacacatgccttccccagctccctgatacaggccaatgtgaccgtggggacttgctcgggcttttgttcccagaaagagttccccttggccattctcaggggctgggaatgctactgtgcttaccctaccccccggttcaacctgcgggatgccatggacagctcagtatgtggccaggaccctgaggcacagaggctggcagaatactgtgaggtctaccagacacctgtgcaagacactcgttgtacagacaggaggttcctgcctaacaaatccaaagtgtttgtggctttgtcaagcttcccaggagccgggaacacgtgggcacggcacctcattgagcatgccactggcttctatacagggagctactactttgatggaaccctctacaacaaagggttcaagggcgaaaaggaccactggcggagccgacgcaccatctgtgtcaaaacccacgagagtggcaggagggagattgagatgtttgattcagccatcctgctaatccggaacccatacaggtccctggtggcagaattcaacagaaaatgtgccgggcacctgggatatgcagctgaccgcaactggaagagcaaagagtggccggactttgtcaacagctacgcctcgtggtggtcctcgcacgtcctggactggctcaagtacgggaagcggctgctggtggtgcactacgaggagctgcggcgcagcctggtgcccacgttacgggagatggtggccttcctcaacgtgtctgtgagcgaggagcggctgctctgcgtggagaacaacaaggagggcagcttccggcggcgcggccggcgctcccacgaccctgagcccttcaccccggagatgaaagacttgatcaatggctacatccggacggtggaccaagccctgcgtgaccacaactggacggggctgcccagggagtatgtgcccagatgataggcctggcccacgccgccgcccccgctgagtgacgcaatcgcaccacggggctgcgctccccactctgatgctcaggcccgtggcctcactgggacgaacggtgggtggggggctcaccctggtgctgcctcccgcacaaggagacctggacacaacagacacacatcacaaggcgaacacaaatggacacacatacctggccacgaacccacacctcctcagacactcagacaccactccaggctcatagccccgtcttgatgcagagaagccacccacgtggggtgtgccaggcacccccagatacaaatgcagccacgcacagacgtaacacacaggtgccaggccgtgtgctcctggaggctggctggctgtctctctcacacagatacacgtgcgctccctgggatccgggaggccctgggcttcctgtgtgtagccctggcatagacttgctcgtcagggtgttcgactctgggatgctgggccgggcagacatttatgctctgagcagcaaggaccattgggatggaggtgggcacaaagactgctgcttccagggtgtgcggccctggccgtgtgtctgacatcccataaatgtgtgtgtggtgtgactacgggcaccacaaactccgcagccttgcctctcttttctctgtggctgggctggctgcaccatgggcagggttgaggactgccccccaccccgcccaagccaatgcagacactgacctcaagaccagccacaccaagtctgtgcactgcccaccacccccttcnacccctcctacaccatgctcctgggcctggggcctccttgcctggcttcttcctccagctatcctcagggaagctggagattcaagtcatgccccagaagcaaggtgtaagcatgggggcgtggggaagagggcaggagctgaagttccaggggagcccaggacccctggggacctgtacactagcaggatgggtcttgggagttggcatggggagattgtaagggctgtatctccgcgattactggtactggtgctccacccataggggccctgttctctntggggtcccacactgnggtcatgagagctagttctcatgagagcagnacccctaggtctggtcctgccagcctgggatgggggtcaatgtatgctacacatcttgggctcacaagtgaggctgtggaggccaggaggttcaagtatggagggtaggagtgcaacccaggagcaacgctcaaggtggccgagatgcagggaggattgtggcgatccggttgcacactggcctctgtggaggtcagggaggtgggaaggtgggtgggcctgaactcaggcagcccttcagtggcttcttcaggcctaggataaccctggccaggccccatggtcctgctctgggtcagctgtcagggagacctcccttcagcctgagccaagctgcattgggaggagaaggcagggtgagggatctgggagagcaggatgttgagatatcctgaccctctgcttcctagcctgatgatggggaacacagagccacccgctatgagcacaggccgggggtggaaggcccagtagagctgcccttccccagatggaagcttcctccaaccttcagtttggccagtgggtgggtttgggcatctgtgcccctggtggcctccaaatccttcctgggattcccccaaacccacactgatgcgaagctgttcttgaccctcccatagcatcaactcagttcagctcaaagctagaaacaccaaggtctttgaaaatgtttattggctcaggatagcttcagcatccaatctgcgaaggcccctgatggagctatttcttcctagtatcaggagcaattgagacccctcaggagtttccacactgctgtggacgggatagccagggcagacctgcatcccagcgcaagcctagatccttgaaagcaatgtcaggtgtggcagtggggaagccatggaggctgggaagggcaaagtgtggagagaggagtgaccgggactggagccagggtctggggagagcaacagcaccaggcttttcctggtagttggattggtacattcactgctgccaggtacccagagatgtcatctctctccaggtagagcatcaccagctcctgtggccttgtagatgactctgtacctcagtgaagagtgcaggcaagtagagtgatggggtcagtgtccatccagtttacgctgagtcagtccatacagcaagacacctggcacttggcaggtactcctggatgttgatgagcaaggaagagcaacggccctgtcagctggcagtggtcctcacagccttcatcccaggtctgcctacgtgggagatctcatcagaaacaggaacggggatctgtctgtgcttgcaggaaagtccatttgtttttctccaagttaggtctcatctacagctcttagcttctcagtaaagaggatactctcccaaccagccaaggaataaaagctgatctgtatgtagggcagaagtgtggcaaatgcatcaggaaccggttagaacagaacagagaaaccctgactgtctacagattccaactttaatagcaagcctgtggagttacacaaacctgtgttaaaacatgtaatttttatggatttcatctcccgttgtggatcaatttggaaaaaccaaaatatgtaattttaaaaaactaaaacacatcctggtagtcccagtgatgtgtaaatgagagagaagaatagacaggcttccaaaccctgggaagaaagctgcttaattatgtgaacatcttataatgaagtctcttgcagctaaaattagattttgagtgcatgaatctgtgataatgtttgcatatcagaatgcattctccccttaaaagtagcagtagccacttggttcttagggggccccaagaggagaggagaagtgctgaggttgatgttacgactgcaagaattcttgggacacaggtttgttttctgctgacttgctcggaaacccattggaggtatctgaaatgtgatgactccaaaggggttcatttcactatagggagaaattgattcgtctgacttcctatttatcaccactcaatattgggtgagttggtctgaacaaggtggggataaagtagagtggaaataatgtagagtcgtcagactgaaaggccaggttgtagtcccagctcttatctgccatcttggacaaagcttttcccatctccagtctcagtttcccatccataaaatgggggaagtggtaggtcttgctgattgcatccacattcattcctccatttcctttcccagcaaccccccatttctgtttgggaattcatatgatctgccagagcctctccaggggtggaatacatgtcctggactaagccaatgacaccttccatctttccagctatggtgactgggttaggtatgatcttgtgagttaagacaatgaagccagagggaatttcaagacttatgggaatgctgggtagaagctgttttaattcccctgttgaatgtgaaaaaggtagtagtattcctgggtctttatgatgaccaccttgggccttgggatcatgaccaggaatcacgtgaagctgacaccactgaagggagagttgagaggcagaaagagatcaagtccttggtgaaattgtttaagtacaggatcaagccttgcttgagattggccttacctctggactttttttgttatatgagctaataaattctgtttattgtttaa

SEQ ID NO: 63341 - DNA, 5879 bp, Homo sapiens
  misc_feature (44)..(44): n is a, c, g, or t
  misc_feature (2895)..(2895): n is a, c, g, or t
  misc_feature (3177)..(3177): n is a, c, g, or t
  misc_feature (3193)..(3193): n is a, c, g, or t
  misc_feature (3224)..(3224): n is a, c, g, or t
agctcgcgttaagctgtgttcctggaccgcctgggggcctgtgncctatgcactgctccatctctcccatgtttcaggcttcatccatggctctggatttctgcgccaggagatgaggggcggtagagccctggaatggagatgtccttgacgcctgggcagaggctgcagctgcaggaccctgtggccactggagataagtaatggtgccatttgaacacctactggaaacggggcaggaacagtgagtgaccccaggcgagcacaggcaggtgccaggagccaggatgcaaggatgacgcctccggaggccctggcctcactcccacctgggcgctaggagccatcccggggctccagccaggagccctgctgcccaggggcatggccaaacctttcttccgactccagaagtttctccgccgaacacagttcctgctgttcttcctcacggctgcctacctgatgaccggcagcctgctgctgctgcagcgggtccgcgtggctctcccacagggcccccgggcacccggccccctgcagaccttgccagtggccgccgtggcgctgggcgtgggcttgctggacagcagagccctgcacgaccctcgagtcagcccagagctgctgctgggtgtggacatgctgcagagccccctgacccggccccggcccggcccccgctggctccggagccgcaactcggagctgcgtcagttgcgtcgccgctggttccaccacttcatgagtgactcccagggaccgcccgccctgggccccgaggctgccaggcccgccatccacagccgaggcacctacattggatgcttcagtgacgatggccatgagaggactctgaaaggagctgtgttttatgacttgagaaagatgactgtctcccactgccaggatgcgtgtgctgagcggtcctatgtctacgccggcttggaggccggggcggagtgttactgcgggaaccggctgccagcggtgagcgtggggctggaagagtgtaaccatgagtgcaaaggcgagaagggctctgtgtgcggggctgtggaccggctctccgtgtaccgtgtggacgagctgcagccgggctccaggaagcggcggaccgccacctaccgcggatgcttccgactgccagagaacatcacacatgccttccccagctccctgatacaggccaatgtgaccgtggggacttgctcgggcttttgttcccagaaagagttccccttggccattctcaggggctgggaatgctactgtgcttaccctaccccccggttcaacctgcgggatgccatggacagctcagtatgtggccaggaccctgaggcacagaggctggcagaatactgtgaggtctaccagacacctgtgcaagacactcgttgtacagacaggaggttcctgcctaacaaatccaaagtgtttgtggctttgtcaagcttcccaggagccgggaacacgtgggcacggcacctcattgagcatgccactggcttctatacagggagctactactttgatggaaccctctacaacaaagggttcaagggcgaaaaggaccactggcggagccgacgcaccatctgtgtcaaaacccacgagagtggcaggagggagattgagatgtttgattcagccatcctgctaatccggaacccatacaggtccctggtggcagaattcaacagaaaatgtgccgggcacctgggatatgcagctgaccgcaactggaagagcaaagagtggccggactttgtcaacagctacgcctcgtggtggtcctcgcacgtcctggactggctcaagtacgggaagcggctgctggtggtgcactacgaggagctgcggcgcagcctggtgcccacgttacgggagatggtggccttcctcaacgtgtctgtgagcgaggagcggctgctctgcgtggagaacaacaaggagggcagcttccggcggcgcggccggcgctcccacgaccctgagcccttcaccccggagatgaaagacttgatcaatggctacatccggacggtggaccaagccctgcgtgaccacaactggacggggctgcccagggagtatgtgcccagatgataggcctggcccacgccgccgcccccgctgagtgacgcaatcgcaccacggggctgcgctccccactctgatgctcaggcccgtggcctcactgggacgaacggtgggtggggggctcaccctggtgctgcctcccgcacaaggagacctggacacaacagacacacatcacaaggcgaacacaaatggacacacatacctggccacgaacccacacctcctcagacactcagacaccactccaggctcatagccccgtcttgatgcagagaagccacccacgtggggtgtgccaggcacccccagatacaaatgcagccacgcacagacgtaacacacaggtgccaggccgtgtgctcctggaggctggctggctgtctctctcacacagatacacgtgcgctccctgggatccgggaggccctgggcttcctgtgtgtagccctggcatagacttgctcgtcagggtgttcgactctgggatgctgggccgggcagacatttatgctctgagcagcaaggaccattgggatggaggtgggcacaaagactgctgcttccagggtgtgcggccctggccgtgtgtctgacatcccataaatgtgtgtgtggtgtgactacgggcaccacaaactccgcagccttgcctctcttttctctgtggctgggctggctgcaccatgggcagggttgaggactgccccccaccccgcccaagccaatgcagacactgacctcaagaccagccacaccaagtctgtgcactgcccaccacccccttcnacccctcctacaccatgctcctgggcctggggcctccttgcctggcttcttcctccagctatcctcagggaagctggagattcaagtcatgccccagaagcaaggtgtaagcatgggggcgtggggaagagggcaggagctgaagttccaggggagcccaggacccctggggacctgtacactagcaggatgggtcttgggagttggcatggggagattgtaagggctgtatctccgcgattactggtactggtgctccacccataggggccctgttctctntggggtcccacactgnggtcatgagagctagttctcatgagagcagnacccctaggtctggtcctgccagcctgggatgggggtcaatgtatgctacacatcttgggctcacaagtgaggctgtggaggccaggaggttcaagtatggagggtaggagtgcaacccaggagcaacgctcaaggtggccgagatgcagggaggattgtggcgatccggttgcacactggcctctgtggaggtcagggaggtgggaaggtgggtgggcctgaactcaggcagcccttcagtggcttcttcaggcctaggataaccctggccaggccccatggtcctgctctgggtcagctgtcagggagacctcccttcagcctgagccaagctgcattgggaggagaaggcagggtgagggatctgggagagcaggatgttgagatatcctgaccctctgcttcctagcctgatgatggggaacacagagccacccgctatgagcacaggccgggggtggaaggcccagtagagctgcccttccccagatggaagcttcctccaaccttcagtttggccagtgggtgggtttgggcatctgtgcccctggtggcctccaaatccttcctgggattcccccaaacccacactgatgcgaagctgttcttgaccctcccatagcatcaactcagttcagctcaaagctagaaacaccaaggtctttgaaaatgtttattggctcaggatagcttcagcatccaatctgcgaaggcccctgatggagctatttcttcctagtatcaggagcaattgagacccctcaggagtttccacactgctgtggacgggatagccagggcagacctgcatcccagcgcaagcctagatccttgaaagcaatgtcaggtgtggcagtggggaagccatggaggctgggaagggcaaagtgtggagagaggagtgaccgggactggagccagggtctggggagagcaacagcaccaggcttttcctggtagttggattggtacattcactgctgccaggtacccagagatgtcatctctctccaggtagagcatcaccagctcctgtggccttgtagatgactctgtacctcagtgaagagtgcaggcaagtagagtgatggggtcagtgtccatccagtttacgctgagtcagtccatacagcaagacacctggcacttggcaggtactcctggatgttgatgagcaaggaagagcaacggccctgtcagctggcagtggtcctcacagccttcatcccaggtctgcctacgtgggagatctcatcagaaacaggaacggggatctgtctgtgcttgcaggaaagtccatttgtttttctccaagttaggtctcatctacagctcttagcttctcagtaaagaggatactctcccaaccagccaaggaataaaagctgatctgtatgtagggcagaagtgtggcaaatgcatcaggaaccggttagaacagaacagagaaaccctgactgtctacagattccaactttaatagcaagcctgtggagttacacaaacctgtgttaaaacatgtaatttttatggatttcatctcccgttgtggatcaatttggaaaaaccaaaatatgtaattttaaaaaactaaaacacatcctggtagtcccagtgatgtgtaaatgagagagaagaatagacaggcttccaaaccctgggaagaaagctgcttaattatgtgaacatcttataatgaagtctcttgcagctaaaattagattttgagtgcatgaatctgtgataatgtttgcatatcagaatgcattctccccttaaaagtagcagtagccacttggttcttagggggccccaagaggagaggagaagtgctgaggttgatgttacgactgcaagaattcttgggacacaggtttgttttctgctgacttgctcggaaacccattggaggtatctgaaatgtgatgactccaaaggggttcatttcactatagggagaaattgattcgtctgacttcctatttatcaccactcaatattgggtgagttggtctgaacaaggtggggataaagtagagtggaaataatgtagagtcgtcagactgaaaggccaggttgtagtcccagctcttatctgccatcttggacaaagcttttcccatctccagtctcagtttcccatccataaaatgggggaagtggtaggtcttgctgattgcatccacattcattcctccatttcctttcccagcaaccccccatttctgtttgggaattcatatgatctgccagagcctctccaggggtggaatacatgtcctggactaagccaatgacaccttccatctttccagctatggtgactgggttaggtatgatcttgtgagttaagacaatgaagccagagggaatttcaagacttatgggaatgctgggtagaagctgttttaattcccctgttgaatgtgaaaaaggtagtagtattcctgggtctttatgatgaccaccttgggccttgggatcatgaccaggaatcacgtgaagctgacaccactgaagggagagttgagaggcagaaagagatcaagtccttggtgaaattgtttaagtacaggatcaagccttgcttgagattggccttacctctggactttttttgttatatgagctaataaattctgtttattgtttaa

SEQ ID NO: 63342 - DNA, 5809 bp, Homo sapiens
  misc_feature (2825)..(2825): n is a, c, g, or t
  misc_feature (3107)..(3107): n is a, c, g, or t
  misc_feature (3123)..(3123): n is a, c, g, or t
  misc_feature (3154)..(3154): n is a, c, g, or t
cgttccgctaccaagagaggcttccggtcagcggagggtttgctccgtctcttggtgaacttgaacagaggcagaggcaaaagcaaaacatttctgcgccaggagatgaggggcggtagagccctggaatggagatgtccttgacgcctgggcagaggctgcagctgcaggaccctgtggccactggagataagtaatggtgccatttgaacacctactggaaacggggcaggaacagtgagtgaccccaggcgagcacaggcaggtgccaggagccaggatgcaaggatgacgcctccggaggccctggcctcactcccacctgggcgctaggagccatcccggggctccagccaggagccctgctgcccaggggcatggccaaacctttcttccgactccagaagtttctccgccgaacacagttcctgctgttcttcctcacggctgcctacctgatgaccggcagcctgctgctgctgcagcgggtccgcgtggctctcccacagggcccccgggcacccggccccctgcagaccttgccagtggccgccgtggcgctgggcgtgggcttgctggacagcagagccctgcacgaccctcgagtcagcccagagctgctgctgggtgtggacatgctgcagagccccctgacccggccccggcccggcccccgctggctccggagccgcaactcggagctgcgtcagttgcgtcgccgctggttccaccacttcatgagtgactcccagggaccgcccgccctgggccccgaggctgccaggcccgccatccacagccgaggcacctacattggatgcttcagtgacgatggccatgagaggactctgaaaggagctgtgttttatgacttgagaaagatgactgtctcccactgccaggatgcgtgtgctgagcggtcctatgtctacgccggcttggaggccggggcggagtgttactgcgggaaccggctgccagcggtgagcgtggggctggaagagtgtaaccatgagtgcaaaggcgagaagggctctgtgtgcggggctgtggaccggctctccgtgtaccgtgtggacgagctgcagccgggctccaggaagcggcggaccgccacctaccgcggatgcttccgactgccagagaacatcacacatgccttccccagctccctgatacaggccaatgtgaccgtggggacttgctcgggcttttgttcccagaaagagttccccttggccattctcaggggctgggaatgctactgtgcttaccctaccccccggttcaacctgcgggatgccatggacagctcagtatgtggccaggaccctgaggcacagaggctggcagaatactgtgaggtctaccagacacctgtgcaagacactcgttgtacagacaggaggttcctgcctaacaaatccaaagtgtttgtggctttgtcaagcttcccaggagccgggaacacgtgggcacggcacctcattgagcatgccactggcttctatacagggagctactactttgatggaaccctctacaacaaagggttcaagggcgaaaaggaccactggcggagccgacgcaccatctgtgtcaaaacccacgagagtggcaggagggagattgagatgtttgattcagccatcctgctaatccggaacccatacaggtccctggtggcagaattcaacagaaaatgtgccgggcacctgggatatgcagctgaccgcaactggaagagcaaagagtggccggactttgtcaacagctacgcctcgtggtggtcctcgcacgtcctggactggctcaagtacgggaagcggctgctggtggtgcactacgaggagctgcggcgcagcctggtgcccacgttacgggagatggtggccttcctcaacgtgtctgtgagcgaggagcggctgctctgcgtggagaacaacaaggagggcagcttccggcggcgcggccggcgctcccacgaccctgagcccttcaccccggagatgaaagacttgatcaatggctacatccggacggtggaccaagccctgcgtgaccacaactggacggggctgcccagggagtatgtgcccagatgataggcctggcccacgccgccgcccccgctgagtgacgcaatcgcaccacggggtcaccctggtgctgcctcccgcacaaggagacctggacacaacagacacacatcacaaggcgaacacaaatggacacacatacctggccacgaacccacacctcctcagacactcagacaccactccaggctcatagccccgtcttgatgcagagaagccacccacgtggggtgtgccaggcacccccagatacaaatgcagccacgcacagacgtaacacacaggtgccaggccgtgtgctcctggaggctggctggctgtctctctcacacagatacacgtgcgctccctgggatccgggaggccctgggcttcctgtgtgtagccctggcatagacttgctcgtcagggtgttcgactctgggatgctgggccgggcagacatttatgctctgagcagcaaggaccattgggatggaggtgggcacaaagactgctgcttccagggtgtgcggccctggccgtgtgtctgacatcccataaatgtgtgtgtggtgtgactacgggcaccacaaactccgcagccttgcctctcttttctctgtggctgggctggctgcaccatgggcagggttgaggactgccccccaccccgcccaagccaatgcagacactgacctcaagaccagccacaccaagtctgtgcactgcccaccacccccttcnacccctcctacaccatgctcctgggcctggggcctccttgcctggcttcttcctccagctatcctcagggaagctggagattcaagtcatgccccagaagcaaggtgtaagcatgggggcgtggggaagagggcaggagctgaagttccaggggagcccaggacccctggggacctgtacactagcaggatgggtcttgggagttggcatggggagattgtaagggctgtatctccgcgattactggtactggtgctccacccataggggccctgttctctntggggtcccacactgnggtcatgagagctagttctcatgagagcagnacccctaggtctggtcctgccagcctgggatgggggtcaatgtatgctacacatcttgggctcacaagtgaggctgtggaggccaggaggttcaagtatggagggtaggagtgcaacccaggagcaacgctcaaggtggccgagatgcagggaggattgtggcgatccggttgcacactggcctctgtggaggtcagggaggtgggaaggtgggtgggcctgaactcaggcagcccttcagtggcttcttcaggcctaggataaccctggccaggccccatggtcctgctctgggtcagctgtcagggagacctcccttcagcctgagccaagctgcattgggaggagaaggcagggtgagggatctgggagagcaggatgttgagatatcctgaccctctgcttcctagcctgatgatggggaacacagagccacccgctatgagcacaggccgggggtggaaggcccagtagagctgcccttccccagatggaagcttcctccaaccttcagtttggccagtgggtgggtttgggcatctgtgcccctggtggcctccaaatccttcctgggattcccccaaacccacactgatgcgaagctgttcttgaccctcccatagcatcaactcagttcagctcaaagctagaaacaccaaggtctttgaaaatgtttattggctcaggatagcttcagcatccaatctgcgaaggcccctgatggagctatttcttcctagtatcaggagcaattgagacccctcaggagtttccacactgctgtggacgggatagccagggcagacctgcatcccagcgcaagcctagatccttgaaagcaatgtcaggtgtggcagtggggaagccatggaggctgggaagggcaaagtgtggagagaggagtgaccgggactggagccagggtctggggagagcaacagcaccaggcttttcctggtagttggattggtacattcactgctgccaggtacccagagatgtcatctctctccaggtagagcatcaccagctcctgtggccttgtagatgactctgtacctcagtgaagagtgcaggcaagtagagtgatggggtcagtgtccatccagtttacgctgagtcagtccatacagcaagacacctggcacttggcaggtactcctggatgttgatgagcaaggaagagcaacggccctgtcagctggcagtggtcctcacagccttcatcccaggtctgcctacgtgggagatctcatcagaaacaggaacggggatctgtctgtgcttgcaggaaagtccatttgtttttctccaagttaggtctcatctacagctcttagcttctcagtaaagaggatactctcccaaccagccaaggaataaaagctgatctgtatgtagggcagaagtgtggcaaatgcatcaggaaccggttagaacagaacagagaaaccctgactgtctacagattccaactttaatagcaagcctgtggagttacacaaacctgtgttaaaacatgtaatttttatggatttcatctcccgttgtggatcaatttggaaaaaccaaaatatgtaattttaaaaaactaaaacacatcctggtagtcccagtgatgtgtaaatgagagagaagaatagacaggcttccaaaccctgggaagaaagctgcttaattatgtgaacatcttataatgaagtctcttgcagctaaaattagattttgagtgcatgaatctgtgataatgtttgcatatcagaatgcattctccccttaaaagtagcagtagccacttggttcttagggggccccaagaggagaggagaagtgctgaggttgatgttacgactgcaagaattcttgggacacaggtttgttttctgctgacttgctcggaaacccattggaggtatctgaaatgtgatgactccaaaggggttcatttcactatagggagaaattgattcgtctgacttcctatttatcaccactcaatattgggtgagttggtctgaacaaggtggggataaagtagagtggaaataatgtagagtcgtcagactgaaaggccaggttgtagtcccagctcttatctgccatcttggacaaagcttttcccatctccagtctcagtttcccatccataaaatgggggaagtggtaggtcttgctgattgcatccacattcattcctccatttcctttcccagcaaccccccatttctgtttgggaattcatatgatctgccagagcctctccaggggtggaatacatgtcctggactaagccaatgacaccttccatctttccagctatggtgactgggttaggtatgatcttgtgagttaagacaatgaagccagagggaatttcaagacttatgggaatgctgggtagaagctgttttaattcccctgttgaatgtgaaaaaggtagtagtattcctgggtctttatgatgaccaccttgggccttgggatcatgaccaggaatcacgtgaagctgacaccactgaagggagagttgagaggcagaaagagatcaagtccttggtgaaattgtttaagtacaggatcaagccttgcttgagattggccttacctctggactttttttgttatatgagctaataaattctgtttattgtttaa

SEQ ID NO: 63343 - DNA, 5755 bp, Homo sapiens
  misc_feature (2771)..(2771): n is a, c, g, or t
  misc_feature (3053)..(3053): n is a, c, g, or t
  misc_feature (3069)..(3069): n is a, c, g, or t
  misc_feature (3100)..(3100): n is a, c, g, or t
cgttccgctaccaagagaggcttccggtcagcggagggtttgctccgtctcttggtgaacttgaacagaggcagaggcaaaagcaaaacatttctgcgccaggagatgaggggcggtagagccctggaatggagatgtccttgacgcctgggcagaggctgcagctgcaggaccctgtggccactggagataagtaatggtgccatttgaacacctactggaaacggggcaggaacagtgagtgaccccaggcgagcacaggcaggtgccaggagccaggatgcaaggatgacgcctccggaggccctggcctcactcccacctgggcgctaggagccatcccggggctccagccaggagccctgctgcccaggggcatggccaaacctttcttccgactccagaagtttctccgccgaacacagttcctgctgttcttcctcacggctgcctacctgatgaccggcagcctgctgctgctgcagcgggtccgcgtggctctcccacagggcccccgggcacccggccccctgcagaccttgccagtggccgccgtggcgctgggcgtgggcttgctggacagcagagccctgcacgaccctcgagtcagcccagagctgctgctgggtgtggacatgctgcagagccccctgacccggccccggcccggcccccgctggctccggagccgcaactcggagctgcgtcagttgcgtcgccgctggttccaccacttcatgagtgactcccagggaccgcccgccctgggccccgaggctgccaggcccgccatccacagccgagcctatgtctacgccggcttggaggccggggcggagtgttactgcgggaaccggctgccagcggtgagcgtggggctggaagagtgtaaccatgagtgcaaaggcgagaagggctctgtgtgcggggctgtggaccggctctccgtgtaccgtgtggacgagctgcagccgggctccaggaagcggcggaccgccacctaccgcggatgcttccgactgccagagaacatcacacatgccttccccagctccctgatacaggccaatgtgaccgtggggacttgctcgggcttttgttcccagaaagagttccccttggccattctcaggggctgggaatgctactgtgcttaccctaccccccggttcaacctgcgggatgccatggacagctcagtatgtggccaggaccctgaggcacagaggctggcagaatactgtgaggtctaccagacacctgtgcaagacactcgttgtacagacaggaggttcctgcctaacaaatccaaagtgtttgtggctttgtcaagcttcccaggagccgggaacacgtgggcacggcacctcattgagcatgccactggcttctatacagggagctactactttgatggaaccctctacaacaaagggttcaagggcgaaaaggaccactggcggagccgacgcaccatctgtgtcaaaacccacgagagtggcaggagggagattgagatgtttgattcagccatcctgctaatccggaacccatacaggtccctggtggcagaattcaacagaaaatgtgccgggcacctgggatatgcagctgaccgcaactggaagagcaaagagtggccggactttgtcaacagctacgcctcgtggtggtcctcgcacgtcctggactggctcaagtacgggaagcggctgctggtggtgcactacgaggagctgcggcgcagcctggtgcccacgttacgggagatggtggccttcctcaacgtgtctgtgagcgaggagcggctgctctgcgtggagaacaacaaggagggcagcttccggcggcgcggccggcgctcccacgaccctgagcccttcaccccggagatgaaagacttgatcaatggctacatccggacggtggaccaagccctgcgtgaccacaactggacggggctgcccagggagtatgtgcccagatgataggcctggcccacgccgccgcccccgctgagtgacgcaatcgcaccacggggctgcgctccccactctgatgctcaggcccgtggcctcactgggacgaacggtgggtggggggctcaccctggtgctgcctcccgcacaaggagacctggacacaacagacacacatcacaaggcgaacacaaatggacacacatacctggccacgaacccacacctcctcagacactcagacaccactccaggctcatagccccgtcttgatgcagagaagccacccacgtggggtgtgccaggcacccccagatacaaatgcagccacgcacagacgtaacacacaggtgccaggccgtgtgctcctggaggctggctggctgtctctctcacacagatacacgtgcgctccctgggatccgggaggccctgggcttcctgtgtgtagccctggcatagacttgctcgtcagggtgttcgactctgggatgctgggccgggcagacatttatgctctgagcagcaaggaccattgggatggaggtgggcacaaagactgctgcttccagggtgtgcggccctggccgtgtgtctgacatcccataaatgtgtgtgtggtgtgactacgggcaccacaaactccgcagccttgcctctcttttctctgtggctgggctggctgcaccatgggcagggttgaggactgccccccaccccgcccaagccaatgcagacactgacctcaagaccagccacaccaagtctgtgcactgcccaccacccccttcnacccctcctacaccatgctcctgggcctggggcctccttgcctggcttcttcctccagctatcctcagggaagctggagattcaagtcatgccccagaagcaaggtgtaagcatgggggcgtggggaagagggcaggagctgaagttccaggggagcccaggacccctggggacctgtacactagcaggatgggtcttgggagttggcatggggagattgtaagggctgtatctccgcgattactggtactggtgctccacccataggggccctgttctctntggggtcccacactgnggtcatgagagctagttctcatgagagcagnacccctaggtctggtcctgccagcctgggatgggggtcaatgtatgctacacatcttgggctcacaagtgaggctgtggaggccaggaggttcaagtatggagggtaggagtgcaacccaggagcaacgctcaaggtggccgagatgcagggaggattgtggcgatccggttgcacactggcctctgtggaggtcagggaggtgggaaggtgggtgggcctgaactcaggcagcccttcagtggcttcttcaggcctaggataaccctggccaggccccatggtcctgctctgggtcagctgtcagggagacctcccttcagcctgagccaagctgcattgggaggagaaggcagggtgagggatctgggagagcaggatgttgagatatcctgaccctctgcttcctagcctgatgatggggaacacagagccacccgctatgagcacaggccgggggtggaaggcccagtagagctgcccttccccagatggaagcttcctccaaccttcagtttggccagtgggtgggtttgggcatctgtgcccctggtggcctccaaatccttcctgggattcccccaaacccacactgatgcgaagctgttcttgaccctcccatagcatcaactcagttcagctcaaagctagaaacaccaaggtctttgaaaatgtttattggctcaggatagcttcagcatccaatctgcgaaggcccctgatggagctatttcttcctagtatcaggagcaattgagacccctcaggagtttccacactgctgtggacgggatagccagggcagacctgcatcccagcgcaagcctagatccttgaaagcaatgtcaggtgtggcagtggggaagccatggaggctgggaagggcaaagtgtggagagaggagtgaccgggactggagccagggtctggggagagcaacagcaccaggcttttcctggtagttggattggtacattcactgctgccaggtacccagagatgtcatctctctccaggtagagcatcaccagctcctgtggccttgtagatgactctgtacctcagtgaagagtgcaggcaagtagagtgatggggtcagtgtccatccagtttacgctgagtcagtccatacagcaagacacctggcacttggcaggtactcctggatgttgatgagcaaggaagagcaacggccctgtcagctggcagtggtcctcacagccttcatcccaggtctgcctacgtgggagatctcatcagaaacaggaacggggatctgtctgtgcttgcaggaaagtccatttgtttttctccaagttaggtctcatctacagctcttagcttctcagtaaagaggatactctcccaaccagccaaggaataaaagctgatctgtatgtagggcagaagtgtggcaaatgcatcaggaaccggttagaacagaacagagaaaccctgactgtctacagattccaactttaatagcaagcctgtggagttacacaaacctgtgttaaaacatgtaatttttatggatttcatctcccgttgtggatcaatttggaaaaaccaaaatatgtaattttaaaaaactaaaacacatcctggtagtcccagtgatgtgtaaatgagagagaagaatagacaggcttccaaaccctgggaagaaagctgcttaattatgtgaacatcttataatgaagtctcttgcagctaaaattagattttgagtgcatgaatctgtgataatgtttgcatatcagaatgcattctccccttaaaagtagcagtagccacttggttcttagggggccccaagaggagaggagaagtgctgaggttgatgttacgactgcaagaattcttgggacacaggtttgttttctgctgacttgctcggaaacccattggaggtatctgaaatgtgatgactccaaaggggttcatttcactatagggagaaattgattcgtctgacttcctatttatcaccactcaatattgggtgagttggtctgaacaaggtggggataaagtagagtggaaataatgtagagtcgtcagactgaaaggccaggttgtagtcccagctcttatctgccatcttggacaaagcttttcccatctccagtctcagtttcccatccataaaatgggggaagtggtaggtcttgctgattgcatccacattcattcctccatttcctttcccagcaaccccccatttctgtttgggaattcatatgatctgccagagcctctccaggggtggaatacatgtcctggactaagccaatgacaccttccatctttccagctatggtgactgggttaggtatgatcttgtgagttaagacaatgaagccagagggaatttcaagacttatgggaatgctgggtagaagctgttttaattcccctgttgaatgtgaaaaaggtagtagtattcctgggtctttatgatgaccaccttgggccttgggatcatgaccaggaatcacgtgaagctgacaccactgaagggagagttgagaggcagaaagagatcaagtccttggtgaaattgtttaagtacaggatcaagccttgcttgagattggccttacctctggactttttttgttatatgagctaataaattctgtttattgtttaa

SEQ ID NO: 63344 - DNA, 5835 bp, Homo sapiens
  misc_feature (2825)..(2825): n is a, c, g, or t
  misc_feature (3107)..(3107): n is a, c, g, or t
  misc_feature (3123)..(3123): n is a, c, g, or t
  misc_feature (3154)..(3154): n is a, c, g, or t
  misc_feature (5815)..(5816): n is a, c, g, or t
cgttccgctaccaagagaggcttccggtcagcggagggtttgctccgtctcttggtgaacttgaacagaggcagaggcaaaagcaaaacatttctgcgccaggagatgaggggcggtagagccctggaatggagatgtccttgacgcctgggcagaggctgcagctgcaggaccctgtggccactggagataagtaatggtgccatttgaacacctactggaaacggggcaggaacagtgagtgaccccaggcgagcacaggcaggtgccaggagccaggatgcaaggatgacgcctccggaggccctggcctcactcccacctgggcgctaggagccatcccggggctccagccaggagccctgctgcccaggggcatggccaaacctttcttccgactccagaagtttctccgccgaacacagttcctgctgttcttcctcacggctgcctacctgatgaccggcagcctgctgctgctgcagcgggtccgcgtggctctcccacagggcccccgggcacccggccccctgcagaccttgccagtggccgccgtggcgctgggcgtgggcttgctggacagcagagccctgcacgaccctcgagtcagcccagagctgctgctgggtgtggacatgctgcagagccccctgacccggccccggcccggcccccgctggctccggagccgcaactcggagctgcgtcagttgcgtcgccgctggttccaccacttcatgagtgactcccagggaccgcccgccctgggccccgaggctgccaggcccgccatccacagccgaggcacctacattggatgcttcagtgacgatggccatgagaggactctgaaaggagctgtgttttatgacttgagaaagatgactgtctcccactgccaggatgcgtgtgctgagcggtcctatgtctacgccggcttggaggccggggcggagtgttactgcgggaaccggctgccagcggtgagcgtggggctggaagagtgtaaccatgagtgcaaaggcgagaagggctctgtgtgcggggctgtggaccggctctccgtgtaccgtgtggacgagctgcagccgggctccaggaagcggcggaccgccacctaccgcggatgcttccgactgccagagaacatcacacatgccttccccagctccctgatacaggccaatgtgaccgtggggacttgctcgggcttttgttcccagaaagagttccccttggccattctcaggggctgggaatgctactgtgcttaccctaccccccggttcaacctgcgggatgccatggacagctcagtatgtggccaggaccctgaggcacagaggctggcagaatactgtgaggtctaccagacacctgtgcaagacactcgttgtacagacaggaggttcctgcctaacaaatccaaagtgtttgtggctttgtcaagcttcccaggagccgggaacacgtgggcacggcacctcattgagcatgccactggcttctatacagggagctactactttgatggaaccctctacaacaaagggttcaagggcgaaaaggaccactggcggagccgacgcaccatctgtgtcaaaacccacgagagtggcaggagggagattgagatgtttgattcagccatcctgctaatccggaacccatacaggtccctggtggcagaattcaacagaaaatgtgccgggcacctgggatatgcagctgaccgcaactggaagagcaaagagtggccggactttgtcaacagctacgcctcgtggtggtcctcgcacgtcctggactggctcaagtacgggaagcggctgctggtggtgcactacgaggagctgcggcgcagcctggtgcccacgttacgggagatggtggccttcctcaacgtgtctgtgagcgaggagcggctgctctgcgtggagaacaacaaggagggcagcttccggcggcgcggccggcgctcccacgaccctgagcccttcaccccggagatgaaagacttgatcaatggctacatccggacggtggaccaagccctgcgtgaccacaactggacggggctgcccagggagtatgtgcccagatgataggcctggcccacgccgccgcccccgctgagtgacgcaatcgcaccacggggtcaccctggtgctgcctcccgcacaaggagacctggacacaacagacacacatcacaaggcgaacacaaatggacacacatacctggccacgaacccacacctcctcagacactcagacaccactccaggctcatagccccgtcttgatgcagagaagccacccacgtggggtgtgccaggcacccccagatacaaatgcagccacgcacagacgtaacacacaggtgccaggccgtgtgctcctggaggctggctggctgtctctctcacacagatacacgtgcgctccctgggatccgggaggccctgggcttcctgtgtgtagccctggcatagacttgctcgtcagggtgttcgactctgggatgctgggccgggcagacatttatgctctgagcagcaaggaccattgggatggaggtgggcacaaagactgctgcttccagggtgtgcggccctggccgtgtgtctgacatcccataaatgtgtgtgtggtgtgactacgggcaccacaaactccgcagccttgcctctcttttctctgtggctgggctggctgcaccatgggcagggttgaggactgccccccaccccgcccaagccaatgcagacactgacctcaagaccagccacaccaagtctgtgcactgcccaccacccccttcnacccctcctacaccatgctcctgggcctggggcctccttgcctggcttcttcctccagctatcctcagggaagctggagattcaagtcatgccccagaagcaaggtgtaagcatgggggcgtggggaagagggcaggagctgaagttccaggggagcccaggacccctggggacctgtacactagcaggatgggtcttgggagttggcatggggagattgtaagggctgtatctccgcgattactggtactggtgctccacccataggggccctgttctctntggggtcccacactgnggtcatgagagctagttctcatgagagcagnacccctaggtctggtcctgccagcctgggatgggggtcaatgtatgctacacatcttgggctcacaagtgaggctgtggaggccaggaggttcaagtatggagggtaggagtgcaacccaggagcaacgctcaaggtggccgagatgcagggaggattgtggcgatccggttgcacactggcctctgtggaggtcagggaggtgggaaggtgggtgggcctgaactcaggcagcccttcagtggcttcttcaggcctaggataaccctggccaggccccatggtcctgctctgggtcagctgtcagggagacctcccttcagcctgagccaagctgcattgggaggagaaggcagggtgagggatctgggagagcaggatgttgagatatcctgaccctctgcttcctagcctgatgatggggaacacagagccacccgctatgagcacaggccgggggtggaaggcccagtagagctgcccttccccagatggaagcttcctccaaccttcagtttggccagtgggtgggtttgggcatctgtgcccctggtggcctccaaatccttcctgggattcccccaaacccacactgatgcgaagctgttcttgaccctcccatagcatcaactcagttcagctcaaagctagaaacaccaaggtctttgaaaatgtttattggctcaggatagcttcagcatccaatctgcgaaggcccctgatggagctatttcttcctagtatcaggagcaattgagacccctcaggagtttccacactgctgtggacgggatagccagggcagacctgcatcccagcgcaagcctagatccttgaaagcaatgtcaggtgtggcagtggggaagccatggaggctgggaagggcaaagtgtggagagaggagtgaccgggactggagccagggtctggggagagcaacagcaccaggcttttcctggtagttggattggtacattcactgctgccaggtacccagagatgtcatctctctccaggtagagcatcaccagctcctgtggccttgtagatgactctgtacctcagtgaagagtgcaggcaagtagagtgatggggtcagtgtccatccagtttacgctgagtcagtccatacagcaagacacctggcacttggcaggtactcctggatgttgatgagcaaggaagagcaacggccctgtcagctggcagtggtcctcacagccttcatcccaggtctgcctacgtgggagatctcatcagaaacaggaacggggatctgtctgtgcttgcaggaaagtccatttgtttttctccaagttaggtctcatctacagctcttagcttctcagtaaagaggatactctcccaaccagccaaggaataaaagctgatctgtatgtagggcagaagtgtggcaaatgcatcaggaaccggttagaacagaacagagaaaccctgactgtctacagattccaactttaatagcaagcctgtggagttacacaaacctgtgttaaaacatgtaatttttatggatttcatctcccgttgtggatcaatttggaaaaaccaaaatatgtaattttaaaaaactaaaacacatcctggtagtcccagtgatgtgtaaatgagagagaagaatagacaggcttccaaaccctgggaagaaagctgcttaattatgtgaacatcttataatgaagtctcttgcagctaaaattagattttgagtgcatgaatctgtgataatgtttgcatatcagaatgcattctccccttaaaagtagcagtagccacttggttcttagggggccccaagaggagaggagaagtgctgaggttgatgttacgactgcaagaattcttgggacacaggtttgttttctgctgacttgctcggaaacccattggaggtatctgaaatgtgatgactccaaaggggttcatttcactatagggagaaattgattcgtctgacttcctatttatcaccactcaatattgggtgagttggtctgaacaaggtggggataaagtagagtggaaataatgtagagtcgtcagactgaaaggccaggttgtagtcccagctcttatctgccatcttggacaaagcttttcccatctccagtctcagtttcccatccataaaatgggggaagtggtaggtcttgctgattgcatccacattcattcctccatttcctttcccagcaaccccccatttctgtttgggaattcatatgatctgccagagcctctccaggggtggaatacatgtcctggactaagccaatgacaccttccatctttccagctatggtgactgggttaggtatgatcttgtgagttaagacaatgaagccagagggaatttcaagacttatgggaatgctgggtagaagctgttttaattcccctgttgaatgtgaaaaaggtagtagtattcctgggtctttatgatgaccaccttgggccttgggatcatgaccaggaatcacgtgaagctgacaccactgaagggagagttgagaggcagaaagagatcaagtccttggtgaaattgtttaagtacaggatcaagccttgcttgagattggccttacctctggactttttttgttatatgagctaataaattctgtttattgtttaaaaaaannctgcccgaatttgcacgag

SEQ ID NO: 63345 - DNA, 5830 bp, Homo sapiens
  misc_feature (2825)..(2825): n is a, c, g, or t
  misc_feature (3107)..(3107): n is a, c, g, or t
  misc_feature (3123)..(3123): n is a, c, g, or t
  misc_feature (3154)..(3154): n is a, c, g, or t
cgttccgctaccaagagaggcttccggtcagcggagggtttgctccgtctcttggtgaacttgaacagaggcagaggcaaaagcaaaacatttctgcgccaggagatgaggggcggtagagccctggaatggagatgtccttgacgcctgggcagaggctgcagctgcaggaccctgtggccactggagataagtaatggtgccatttgaacacctactggaaacggggcaggaacagtgagtgaccccaggcgagcacaggcaggtgccaggagccaggatgcaaggatgacgcctccggaggccctggcctcactcccacctgggcgctaggagccatcccggggctccagccaggagccctgctgcccaggggcatggccaaacctttcttccgactccagaagtttctccgccgaacacagttcctgctgttcttcctcacggctgcctacctgatgaccggcagcctgctgctgctgcagcgggtccgcgtggctctcccacagggcccccgggcacccggccccctgcagaccttgccagtggccgccgtggcgctgggcgtgggcttgctggacagcagagccctgcacgaccctcgagtcagcccagagctgctgctgggtgtggacatgctgcagagccccctgacccggccccggcccggcccccgctggctccggagccgcaactcggagctgcgtcagttgcgtcgccgctggttccaccacttcatgagtgactcccagggaccgcccgccctgggccccgaggctgccaggcccgccatccacagccgaggcacctacattggatgcttcagtgacgatggccatgagaggactctgaaaggagctgtgttttatgacttgagaaagatgactgtctcccactgccaggatgcgtgtgctgagcggtcctatgtctacgccggcttggaggccggggcggagtgttactgcgggaaccggctgccagcggtgagcgtggggctggaagagtgtaaccatgagtgcaaaggcgagaagggctctgtgtgcggggctgtggaccggctctccgtgtaccgtgtggacgagctgcagccgggctccaggaagcggcggaccgccacctaccgcggatgcttccgactgccagagaacatcacacatgccttccccagctccctgatacaggccaatgtgaccgtggggacttgctcgggcttttgttcccagaaagagttccccttggccattctcaggggctgggaatgctactgtgcttaccctaccccccggttcaacctgcgggatgccatggacagctcagtatgtggccaggaccctgaggcacagaggctggcagaatactgtgaggtctaccagacacctgtgcaagacactcgttgtacagacaggaggttcctgcctaacaaatccaaagtgtttgtggctttgtcaagcttcccaggagccgggaacacgtgggcacggcacctcattgagcatgccactggcttctatacagggagctactactttgatggaaccctctacaacaaagggttcaagggcgaaaaggaccactggcggagccgacgcaccatctgtgtcaaaacccacgagagtggcaggagggagattgagatgtttgattcagccatcctgctaatccggaacccatacaggtccctggtggcagaattcaacagaaaatgtgccgggcacctgggatatgcagctgaccgcaactggaagagcaaagagtggccggactttgtcaacagctacgcctcgtggtggtcctcgcacgtcctggactggctcaagtacgggaagcggctgctggtggtgcactacgaggagctgcggcgcagcctggtgcccacgttacgggagatggtggccttcctcaacgtgtctgtgagcgaggagcggctgctctgcgtggagaacaacaaggagggcagcttccggcggcgcggccggcgctcccacgaccctgagcccttcaccccggagatgaaagacttgatcaatggctacatccggacggtggaccaagccctgcgtgaccacaactggacggggctgcccagggagtatgtgcccagatgataggcctggcccacgccgccgcccccgctgagtgacgcaatcgcaccacggggtcaccctggtgctgcctcccgcacaaggagacctggacacaacagacacacatcacaaggcgaacacaaatggacacacatacctggccacgaacccacacctcctcagacactcagacaccactccaggctcatagccccgtcttgatgcagagaagccacccacgtggggtgtgccaggcacccccagatacaaatgcagccacgcacagacgtaacacacaggtgccaggccgtgtgctcctggaggctggctggctgtctctctcacacagatacacgtgcgctccctgggatccgggaggccctgggcttcctgtgtgtagccctggcatagacttgctcgtcagggtgttcgactctgggatgctgggccgggcagacatttatgctctgagcagcaaggaccattgggatggaggtgggcacaaagactgctgcttccagggtgtgcggccctggccgtgtgtctgacatcccataaatgtgtgtgtggtgtgactacgggcaccacaaactccgcagccttgcctctcttttctctgtggctgggctggctgcaccatgggcagggttgaggactgccccccaccccgcccaagccaatgcagacactgacctcaagaccagccacaccaagtctgtgcactgcccaccacccccttcnacccctcctacaccatgctcctgggcctggggcctccttgcctggcttcttcctccagctatcctcagggaagctggagattcaagtcatgccccagaagcaaggtgtaagcatgggggcgtggggaagagggcaggagctgaagttccaggggagcccaggacccctggggacctgtacactagcaggatgggtcttgggagttggcatggggagattgtaagggctgtatctccgcgattactggtactggtgctccacccataggggccctgttctctntggggtcccacactgnggtcatgagagctagttctcatgagagcagnacccctaggtctggtcctgccagcctgggatgggggtcaatgtatgctacacatcttgggctcacaagtgaggctgtggaggccaggaggttcaagtatggagggtaggagtgcaacccaggagcaacgctcaaggtggccgagatgcagggaggattgtggcgatccggttgcacactggcctctgtggaggtcagggaggtgggaaggtgggtgggcctgaactcaggcagcccttcagtggcttcttcaggcctaggataaccctggccaggccccatggtcctgctctgggtcagctgtcagggagacctcccttcagcctgagccaagctgcattgggaggagaaggcagggtgagggatctgggagagcaggatgttgagatatcctgaccctctgcttcctagcctgatgatggggaacacagagccacccgctatgagcacaggccgggggtggaaggcccagtagagctgcccttccccagatggaagcttcctccaaccttcagtttggccagtgggtgggtttgggcatctgtgcccctggtggcctccaaatccttcctgggattcccccaaacccacactgatgcgaagctgttcttgaccctcccatagcatcaactcagttcagctcaaagctagaaacaccaaggtctttgaaaatgtttattggctcaggatagcttcagcatccaatctgcgaaggcccctgatggagctatttcttcctagtatcaggagcaattgagacccctcaggagtttccacactgctgtggacgggatagccagggcagacctgcatcccagcgcaagcctagatccttgaaagcaatgtcaggtgtggcagtggggaagccatggaggctgggaagggcaaagtgtggagagaggagtgaccgggactggagccagggtctggggagagcaacagcaccaggcttttcctggtagttggattggtacattcactgctgccaggtacccagagatgtcatctctctccaggtagagcatcaccagctcctgtggccttgtagatgactctgtacctcagtgaagagtgcaggcaagtagagtgatggggtcagtgtccatccagtttacgctgagtcagtccatacagcaagacacctggcacttggcaggtactcctggatgttgatgagcaaggaagagcaacggccctgtcagctggcagtggtcctcacagccttcatcccaggtctgcctacgtgggagatctcatcagaaacaggaacggggatctgtctgtgcttgcaggaaagtccatttgtttttctccaagttaggtctcatctacagctcttagcttctcagtaaagaggatactctcccaaccagccaaggaataaaagctgatctgtatgtagggcagaagtgtggcaaatgcatcaggaaccggttagaacagaacagagaaaccctgactgtctacagattccaactttaatagcaagcctgtggagttacacaaacctgtgttaaaacatgtaatttttatggatttcatctcccgttgtggatcaatttggaaaaaccaaaatatgtaattttaaaaaactaaaacacatcctggtagtcccagtgatgtgtaaatgagagagaagaatagacaggcttccaaaccctgggaagaaagctgcttaattatgtgaacatcttataatgaagtctcttgcagctaaaattagattttgagtgcatgaatctgtgataatgtttgcatatcagaatgcattctccccttaaaagtagcagtagccacttggttcttagggggccccaagaggagaggagaagtgctgaggttgatgttacgactgcaagaattcttgggacacaggtttgttttctgctgacttgctcggaaacccattggaggtatctgaaatgtgatgactccaaaggggttcatttcactatagggagaaattgattcgtctgacttcctatttatcaccactcaatattgggtgagttggtctgaacaaggtggggataaagtagagtggaaataatgtagagtcgtcagactgaaaggccaggttgtagtcccagctcttatctgccatcttggacaaagcttttcccatctccagtctcagtttcccatccataaaatgggggaagtggtaggtcttgctgattgcatccacattcattcctccatttcctttcccagcaaccccccatttctgtttgggaattcatatgatctgccagagcctctccaggggtggaatacatgtcctggactaagccaatgacaccttccatctttccagctatggtgactgggttaggtatgatcttgtgagttaagacaatgaagccagagggaatttcaagacttatgggaatgctgggtagaagctgttttaattcccctgttgaatgtgaaaaaggtagtagtattcctgggtctttatgatgaccaccttgggccttgggatcatgaccaggaatcacgtgaagctgacaccactgaagggagagttgagaggcagaaagagatcaagtccttggtgaaattgtttaagtacaggatcaagccttgcttgagattggccttacctctggactttttttgttatatgagctaataaattctgtttattgtttaaaaacaacacaaacaaaaaaaa

SEQ ID NO: 63346 - DNA, 5485 bp, Homo sapiens
  misc_feature (2501)..(2501): n is a, c, g, or t
  misc_feature (2783)..(2783): n is a, c, g, or t
  misc_feature (2799)..(2799): n is a, c, g, or t
  misc_feature (2830)..(2830): n is a, c, g, or t
cgaggctgccaggcccgccatccacagccgaggcacctacattggatgcttcagtgacgatggccatgagaggactctgaaaggagctgtgttttatgacttgagaaagatgactgtctcccacagccaggatgcaaggatgacgcctccggaggccctggcctcactcccacctgggcgctaggagccatcccggggctccagccaggagccctgctgcccaggggcatggccaaacctttcttccgactccagaagtttctccgccgaacacagttcctgctgttcttcctcacggctgcctacctgatgaccggcagcctgctgctgctgcagcgggtccgcgtggctctcccacagggcccccgggcacccggccccctgcagaccttgccagtggccgccgtggcgctgggcgtgggcttgctggacagcagagccctgcacgaccctcgagtcagcccagagctgctgctgggtgtggacatgctgcagagccccctgacccggccccggcccggcccccgctggctccggagccgcaactcggagctgcgtcagttgcgtcgccgctggttccaccacttcatgagtgactcccagggaccgcccaagagtgtaaccatgagtgcaaaggcgagaagggctctgtgtgcggggctgtggaccggctctccgtgtaccgtgtggacgagctgcagccgggctccaggaagcggcggaccgccacctaccgcggatgcttccgactgccagagaacatcacacatgccttccccagctccctgatacaggccaatgtgaccgtggggacttgctcgggcttttgttcccagaaagagttccccttggccattctcaggggctgggaatgctactgtgcttaccctaccccccggttcaacctgcgggatgccatggacagctcagtatgtggccaggaccctgaggcacagaggctggcagaatactgtgaggtctaccagacacctgtgcaagacactcgttgtacagacaggaggttcctgcctaacaaatccaaagtgtttgtggctttgtcaagcttcccaggagccgggaacacgtgggcacggcacctcattgagcatgccactggcttctatacagggagctactactttgatggaaccctctacaacaaagggttcaagggcgaaaaggaccactggcggagccgacgcaccatctgtgtcaaaacccacgagagtggcaggagggagattgagatgtttgattcagccatcctgctaatccggaacccatacaggtccctggtggcagaattcaacagaaaatgtgccgggcacctgggatatgcagctgaccgcaactggaagagcaaagagtggccggactttgtcaacagctacgcctcgtggtggtcctcgcacgtcctggactggctcaagtacgggaagcggctgctggtggtgcactacgaggagctgcggcgcagcctggtgcccacgttacgggagatggtggccttcctcaacgtgtctgtgagcgaggagcggctgctctgcgtggagaacaacaaggagggcagcttccggcggcgcggccggcgctcccacgaccctgagcccttcaccccggagatgaaagacttgatcaatggctacatccggacggtggaccaagccctgcgtgaccacaactggacggggctgcccagggagtatgtgcccagatgataggcctggcccacgccgccgcccccgctgagtgacgcaatcgcaccacggggctgcgctccccactctgatgctcaggcccgtggcctcactgggacgaacggtgggtggggggctcaccctggtgctgcctcccgcacaaggagacctggacacaacagacacacatcacaaggcgaacacaaatggacacacatacctggccacgaacccacacctcctcagacactcagacaccactccaggctcatagccccgtcttgatgcagagaagccacccacgtggggtgtgccaggcacccccagatacaaatgcagccacgcacagacgtaacacacaggtgccaggccgtgtgctcctggaggctggctggctgtctctctcacacagatacacgtgcgctccctgggatccgggaggccctgggcttcctgtgtgtagccctggcatagacttgctcgtcagggtgttcgactctgggatgctgggccgggcagacatttatgctctgagcagcaaggaccattgggatggaggtgggcacaaagactgctgcttccagggtgtgcggccctggccgtgtgtctgacatcccataaatgtgtgtgtggtgtgactacgggcaccacaaactccgcagccttgcctctcttttctctgtggctgggctggctgcaccatgggcagggttgaggactgccccccaccccgcccaagccaatgcagacactgacctcaagaccagccacaccaagtctgtgcactgcccaccacccccttcnacccctcctacaccatgctcctgggcctggggcctccttgcctggcttcttcctccagctatcctcagggaagctggagattcaagtcatgccccagaagcaaggtgtaagcatgggggcgtggggaagagggcaggagctgaagttccaggggagcccaggacccctggggacctgtacactagcaggatgggtcttgggagttggcatggggagattgtaagggctgtatctccgcgattactggtactggtgctccacccataggggccctgttctctntggggtcccacactgnggtcatgagagctagttctcatgagagcagnacccctaggtctggtcctgccagcctgggatgggggtcaatgtatgctacacatcttgggctcacaagtgaggctgtggaggccaggaggttcaagtatggagggtaggagtgcaacccaggagcaacgctcaaggtggccgagatgcagggaggattgtggcgatccggttgcacactggcctctgtggaggtcagggaggtgggaaggtgggtgggcctgaactcaggcagcccttcagtggcttcttcaggcctaggataaccctggccaggccccatggtcctgctctgggtcagctgtcagggagacctcccttcagcctgagccaagctgcattgggaggagaaggcagggtgagggatctgggagagcaggatgttgagatatcctgaccctctgcttcctagcctgatgatggggaacacagagccacccgctatgagcacaggccgggggtggaaggcccagtagagctgcccttccccagatggaagcttcctccaaccttcagtttggccagtgggtgggtttgggcatctgtgcccctggtggcctccaaatccttcctgggattcccccaaacccacactgatgcgaagctgttcttgaccctcccatagcatcaactcagttcagctcaaagctagaaacaccaaggtctttgaaaatgtttattggctcaggatagcttcagcatccaatctgcgaaggcccctgatggagctatttcttcctagtatcaggagcaattgagacccctcaggagtttccacactgctgtggacgggatagccagggcagacctgcatcccagcgcaagcctagatccttgaaagcaatgtcaggtgtggcagtggggaagccatggaggctgggaagggcaaagtgtggagagaggagtgaccgggactggagccagggtctggggagagcaacagcaccaggcttttcctggtagttggattggtacattcactgctgccaggtacccagagatgtcatctctctccaggtagagcatcaccagctcctgtggccttgtagatgactctgtacctcagtgaagagtgcaggcaagtagagtgatggggtcagtgtccatccagtttacgctgagtcagtccatacagcaagacacctggcacttggcaggtactcctggatgttgatgagcaaggaagagcaacggccctgtcagctggcagtggtcctcacagccttcatcccaggtctgcctacgtgggagatctcatcagaaacaggaacggggatctgtctgtgcttgcaggaaagtccatttgtttttctccaagttaggtctcatctacagctcttagcttctcagtaaagaggatactctcccaaccagccaaggaataaaagctgatctgtatgtagggcagaagtgtggcaaatgcatcaggaaccggttagaacagaacagagaaaccctgactgtctacagattccaactttaatagcaagcctgtggagttacacaaacctgtgttaaaacatgtaatttttatggatttcatctcccgttgtggatcaatttggaaaaaccaaaatatgtaattttaaaaaactaaaacacatcctggtagtcccagtgatgtgtaaatgagagagaagaatagacaggcttccaaaccctgggaagaaagctgcttaattatgtgaacatcttataatgaagtctcttgcagctaaaattagattttgagtgcatgaatctgtgataatgtttgcatatcagaatgcattctccccttaaaagtagcagtagccacttggttcttagggggccccaagaggagaggagaagtgctgaggttgatgttacgactgcaagaattcttgggacacaggtttgttttctgctgacttgctcggaaacccattggaggtatctgaaatgtgatgactccaaaggggttcatttcactatagggagaaattgattcgtctgacttcctatttatcaccactcaatattgggtgagttggtctgaacaaggtggggataaagtagagtggaaataatgtagagtcgtcagactgaaaggccaggttgtagtcccagctcttatctgccatcttggacaaagcttttcccatctccagtctcagtttcccatccataaaatgggggaagtggtaggtcttgctgattgcatccacattcattcctccatttcctttcccagcaaccccccatttctgtttgggaattcatatgatctgccagagcctctccaggggtggaatacatgtcctggactaagccaatgacaccttccatctttccagctatggtgactgggttaggtatgatcttgtgagttaagacaatgaagccagagggaatttcaagacttatgggaatgctgggtagaagctgttttaattcccctgttgaatgtgaaaaaggtagtagtattcctgggtctttatgatgaccaccttgggccttgggatcatgaccaggaatcacgtgaagctgacaccactgaagggagagttgagaggcagaaagagatcaagtccttggtgaaattgtttaagtacaggatcaagccttgcttgagattggccttacctctggactttttttgttatatgagctaataaattctgtttattgtttaa

SEQ ID NO: 63347 - DNA, 4142 bp, Homo sapiens
  misc_feature (1158)..(1158): n is a, c, g, or t
  misc_feature (1440)..(1440): n is a, c, g, or t
  misc_feature (1456)..(1456): n is a, c, g, or t
  misc_feature (1487)..(1487): n is a, c, g, or t
gcccgcaactggaagaccaaagagtggccggactttgtcaacagctacgcctcgtggtggtcctcgcacgtcctggactggctcaagtacgggaagcggctgctggtggtgcactacgaggagctgcggcgcagcctggtgcccacgttacgggagatggtggccttcctcaacgtgtctgtgagcgaggagcggctgctctgcgtggagaacaacaaggagggcagcttccggcggcgcggccggcgctcccacgaccctgagcccttcaccccggagatgaaagacttgatcaatggctacatccggacggtggaccaagccctgcgtgaccacaactggacggggctgcccagggagtatgtgcccagatgataggcctggcccacgccgccgcccccgctgagtgacgcaatcgcaccacggggctgcgctccccactctgatgctcaggcccgtggcctcactgggacgaacggtgggtggggggctcaccctggtgctgcctcccgcacaaggagacctggacacaacagacacacatcacaaggcgaacacaaatggacacacatacctggccacgaacccacacctcctcagacactcagacaccactccaggctcatagccccgtcttgatgcagagaagccacccacgtggggtgtgccaggcacccccagatacaaatgcagccacgcacagacgtaacacacaggtgccaggccgtgtgctcctggaggctggctggctgtctctctcacacagatacacgtgcgctccctgggatccgggaggccctgggcttcctgtgtgtagccctggcatagacttgctcgtcagggtgttcgactctgggatgctgggccgggcagacatttatgctctgagcagcaaggaccattgggatggaggtgggcacaaagactgctgcttccagggtgtgcggccctggccgtgtgtctgacatcccataaatgtgtgtgtggtgtgactacgggcaccacaaactccgcagccttgcctctcttttctctgtggctgggctggctgcaccatgggcagggttgaggactgccccccaccccgcccaagccaatgcagacactgacctcaagaccagccacaccaagtctgtgcactgcccaccacccccttcnacccctcctacaccatgctcctgggcctggggcctccttgcctggcttcttcctccagctatcctcagggaagctggagattcaagtcatgccccagaagcaaggtgtaagcatgggggcgtggggaagagggcaggagctgaagttccaggggagcccaggacccctggggacctgtacactagcaggatgggtcttgggagttggcatggggagattgtaagggctgtatctccgcgattactggtactggtgctccacccataggggccctgttctctntggggtcccacactgnggtcatgagagctagttctcatgagagcagnacccctaggtctggtcctgccagcctgggatgggggtcaatgtatgctacacatcttgggctcacaagtgaggctgtggaggccaggaggttcaagtatggagggtaggagtgcaacccaggagcaacgctcaaggtggccgagatgcagggaggattgtggcgatccggttgcacactggcctctgtggaggtcagggaggtgggaaggtgggtgggcctgaactcaggcagcccttcagtggcttcttcaggcctaggataaccctggccaggccccatggtcctgctctgggtcagctgtcagggagacctcccttcagcctgagccaagctgcattgggaggagaaggcagggtgagggatctgggagagcaggatgttgagatatcctgaccctctgcttcctagcctgatgatggggaacacagagccacccgctatgagcacaggccgggggtggaaggcccagtagagctgcccttccccagatggaagcttcctccaaccttcagtttggccagtgggtgggtttgggcatctgtgcccctggtggcctccaaatccttcctgggattcccccaaacccacactgatgcgaagctgttcttgaccctcccatagcatcaactcagttcagctcaaagctagaaacaccaaggtctttgaaaatgtttattggctcaggatagcttcagcatccaatctgcgaaggcccctgatggagctatttcttcctagtatcaggagcaattgagacccctcaggagtttccacactgctgtggacgggatagccagggcagacctgcatcccagcgcaagcctagatccttgaaagcaatgtcaggtgtggcagtggggaagccatggaggctgggaagggcaaagtgtggagagaggagtgaccgggactggagccagggtctggggagagcaacagcaccaggcttttcctggtagttggattggtacattcactgctgccaggtacccagagatgtcatctctctccaggtagagcatcaccagctcctgtggccttgtagatgactctgtacctcagtgaagagtgcaggcaagtagagtgatggggtcagtgtccatccagtttacgctgagtcagtccatacagcaagacacctggcacttggcaggtactcctggatgttgatgagcaaggaagagcaacggccctgtcagctggcagtggtcctcacagccttcatcccaggtctgcctacgtgggagatctcatcagaaacaggaacggggatctgtctgtgcttgcaggaaagtccatttgtttttctccaagttaggtctcatctacagctcttagcttctcagtaaagaggatactctcccaaccagccaaggaataaaagctgatctgtatgtagggcagaagtgtggcaaatgcatcaggaaccggttagaacagaacagagaaaccctgactgtctacagattccaactttaatagcaagcctgtggagttacacaaacctgtgttaaaacatgtaatttttatggatttcatctcccgttgtggatcaatttggaaaaaccaaaatatgtaattttaaaaaactaaaacacatcctggtagtcccagtgatgtgtaaatgagagagaagaatagacaggcttccaaaccctgggaagaaagctgcttaattatgtgaacatcttataatgaagtctcttgcagctaaaattagattttgagtgcatgaatctgtgataatgtttgcatatcagaatgcattctccccttaaaagtagcagtagccacttggttcttagggggccccaagaggagaggagaagtgctgaggttgatgttacgactgcaagaattcttgggacacaggtttgttttctgctgacttgctcggaaacccattggaggtatctgaaatgtgatgactccaaaggggttcatttcactatagggagaaattgattcgtctgacttcctatttatcaccactcaatattgggtgagttggtctgaacaaggtggggataaagtagagtggaaataatgtagagtcgtcagactgaaaggccaggttgtagtcccagctcttatctgccatcttggacaaagcttttcccatctccagtctcagtttcccatccataaaatgggggaagtggtaggtcttgctgattgcatccacattcattcctccatttcctttcccagcaaccccccatttctgtttgggaattcatatgatctgccagagcctctccaggggtggaatacatgtcctggactaagccaatgacaccttccatctttccagctatggtgactgggttaggtatgatcttgtgagttaagacaatgaagccagagggaatttcaagacttatgggaatgctgggtagaagctgttttaattcccctgttgaatgtgaaaaaggtagtagtattcctgggtctttatgatgaccaccttgggccttgggatcatgaccaggaatcacgtgaagctgacaccactgaagggagagttgagaggcagaaagagatcaagtccttggtgaaattgtttaagtacaggatcaagccttgcttgagattggccttacctctggactttttttgttatatgagctaataaattctgtttattgtttaa

SEQ ID NO: 63348 - DNA, 440 bp, Homo sapiens
catgcctgcagtgcactgtaaggatccctgatctgccagagcctctccaggggtggaatacatgtcctggactaagccaatgacaccttccatctttccagctatggtgactgggttaggtatgatcttgtgagttaagacaatgaagccagagggaatttcaagacttatgggaatgctgggtagaagctgttttaattcccctgttgaatgtgaaaaaggtagtagtattcctgggtctttatgatgaccaccttgggccttgggatcatgaccaggaatcacgtgaagctgacaccactgaagggagagttgagaggcagaaagagatcaagtccttggtgaaattgtttaagtacaggatcaagccttgcttgagattggccttacctctggactttttttgttatatgagctaataaattctgtttattgtttaa

SEQ ID NO: 63349 - DNA, 226 bp, Homo sapiens
cgactggtcctatgtcatcccagacattttgccatttaactatcctgaagagccacttgtcatctgaaaatgtgccctcttgagatcaatagtgaacatcgtgtccttttccatctgggagagaaacattatccacactctctttccctctctaagtcactttatctccgattttttctaatgccaagataattaaaatttttaattggctttcttaagactttct

SEQ ID NO: 63350 - DNA, 336 bp, Homo sapiens
tagccacgtttacatgaaaattcctaatatttaaggggagatcgagaaacactgtttccttcccagagctcttctctgaattctacactcatatatccgacaggctactgaaatctccatttggatttctcacaggcacctcaaaagtaatatgtccaaaactgaacccctgatgttttttccctctaaaatcgattcctcctgcaatctgtcccatctcagtaaaggtcaccgccattccccagctcatgagatcaaaacccaagggttgccgcccaggattggcatagtcgaagctgatttttatccccttcgccattaacaactagaaaacta

SEQ ID NO: 63351 - DNA, 342 bp, Homo sapiens
gtgagaagcagcccctcattggcccgctatagagaatcataaagctcaactggcaagagattgggcagggaaaatgtcttctaattagaattctaccatacaacaagaagtaatagtattaacaatactttacacgtggaatcttttgcatctatctacaaatctgcaaggaagacataaagtattatttgagatgtcaggattgatggctgtgaattcatgattatgtccctaggagactacatgctacatctctgtaccacacccccatgatgagcatagagtcctacaccaaagaacttcaccacgttatgtgtgcaataaattttaaagcgctagaat

SEQ ID NO: 63352 - DNA, 2589 bp, Homo sapiens
cgcccgcgcgcgggctcaactttgtagagcgaggggccaacttggcagagcgcgcggccagctttgcagagagcgccctccagggactatgcgtgcggggacacgggtcgctttgggctcttccacccctgcggagcgcactatcccgagccaggggcggtgcaagccccgcccggccctacccagggcggctcctccctccgcagcgccgagacttttagtttcgctttcgctaaaggggccccagacccttgctgcggagcgacggagagagactgtgccagtcccagccgccctaccgccgtgggaacgatggcagatgatcagggctgtattgaagagcagggggttgaggattcagcaaatgaagattcagtggatgctaagccagaccggtcctcgtttgtaccgtccctcttcagtaagaagaagaaaaatgtcaccatgcgatccatcaagaccacccgggaccgagtgcctacatatcagtacaacatgaattttgaaaagctgggcaaatgcatcataataaacaacaagaactttgataaagtgacaggtatgggcgttcgaaacggaacagacaaagatgccgaggcgctcttcaagtgcttccgaagcctgggttttgacgtgattgtctataatgactgctcttgtgccaagatgcaagatctgcttaaaaaagcttctgaagaggaccatacaaatgccgcctgcttcgcctgcatcctcttaagccatggagaagaaaatgtaatttatgggaaagatggtgtcacaccaataaaggatttgacagcccactttaggggggatagatgcaaaacccttttagagaaacccaaactcttcttcattcaggcttgccgagggaccgagcttgatgatggcatccaggccgactcggggcccatcaatgacacagatgctaatcctcgatacaagatcccagtggaagctgacttcctcttcgcctattccacggttccaggctattactcgtggaggagcccaggaagaggctcctggtttgtgcaagccctctgctccatcctggaggagcacggaaaagacctggaaatcatgcagatcctcaccagggtgaatgacagagttgccaggcactttgagtctcagtctgatgacccacacttccatgagaagaagcagatcccctgtgtggtctccatgctcaccaaggaactctacttcagtcaatagccatatcaggggtacattctagctgagaagcaatgggtcactcattaatgaatcacatttttttatgctcttgaaatattcagaaattctccaggattttaatttcaggaaaatgtattgattcaacagggaagaaactttctggtgctgtcttttgttctctgaattttcagagactttttttataatgttattcatttggtgactgtgtaactttctcttaagattaattttctctttgtatgtctgttaccttgttaatagacttaatacatgcaacagaagtgacttctggagaaagctcatggctgtgtccactgcaattggtggtaacagtggtagagtcatgtttgcacttggcaaaaagaatcccaatgtttgacaaaacacagccaaggggatatttactgctctttattgcagaatgtgggtattgagtgtgatttgaatgatttttcattggcttagggcagattttcatgcaaaagttctcatatgagttagaggagaaaaagcttaatgattctgatatgtatccatcaggatccagtctggaaaacagaaaccattctaggtgtttcaacagagggagtttaatacaggaaattgacttacatagatgataaaagagaagccaaacagcaagaagctgttaccacacccagggctatgaggataatgggaagaggtttggtttcctgtgtccagtagtgggatcatccagaggagctggaaccatggtgggggctgcctagtgggagttaggaccaccaatggattgtggaaaatggagccatgacaagaacaaagccactgactgagatggagtgagctgagacagataagagaataccttggtctcacctatcctgccctcacatcttccaccagcaccttactgcccaggcctatctggaagccacctcaccaaggaccttggaagagcaagggacagtgaggcaggagaagaacaagaaatggatgtaagcctggcccataatgtgaacataagtaatcactaatgctcaacaatttatccattcaatcatttattcattgggttgtcagatagtctatgtatgtgtaaaacaatctgttttggctttatgtgcaaaatctgttatagctttaaaatatatctggaactttttagattattccaagccttattttgagtaaatatttgttacttttagttctataagtgaggaagagtttatggcaaagatttttggcactttgttttcaagatggtgttatcttttgaattcttgataaatgactgtttttttctgcctaatagtaactggttaaaaaacaaatgttcatatttattgattaaaaatgtggttgcttaattcctaa

SEQ ID NO: 63353 - DNA, 2604 bp, Homo sapiens
gtggggtaaaacagcagagatcaatgagatcagagcacaccctcggaggaagggatacatgacaaatgcctgaacggagagagggagtgaactgtgcaaacacacagccaggagttttccaaggacagggaggagaaagtataaggcctgctgtaccctcgatgcaaaacatgagaaagccgactgtgccagtcccagccgccctaccgccgtgggaacgatgctgtaatggactgtgttggttggcctccaggcaggaagtggcacttggaaaagaacaccagctgcggtggtagcagtgggatttgtgcttcttatgttacccagatggcagatgatcagggctgtattgaagagcagggggttgaggattcagcaaatgaagattcagtggatgctaagccagaccggtcctcgtttgtaccgtccctcttcagtaagaagaagaaaaatgtcaccatgcgatccatcaagaccacccgggaccgagtgcctacatatcagtacaacatgaattttgaaaagctgggcaaatgcatcataataaacaacaagaactttgataaagtgacaggtatgggcgttcgaaacggaacagacaaagatgccgaggcgctcttcaagtgcttccgaagcctgggttttgacgtgattgtctataatgactgctcttgtgccaagatgcaagatctgcttaaaaaagcttctgaagaggaccatacaaatgccgcctgcttcgcctgcatcctcttaagccatggagaagaaaatgtaatttatgggaaagatggtgtcacaccaataaaggatttgacagcccactttaggggggatagatgcaaaacccttttagagaaacccaaactcttcttcattcaggcttgccgagggaccgagcttgatgatggcatccaggccgactcggggcccatcaatgacacagatgctaatcctcgatacaagatcccagtggaagctgacttcctcttcgcctattccacggttccaggctattactcgtggaggagcccaggaagaggctcctggtttgtgcaagccctctgctccatcctggaggagcacggaaaagacctggaaatcatgcagatcctcaccagggtgaatgacagagttgccaggcactttgagtctcagtctgatgacccacacttccatgagaagaagcagatcccctgtgtggtctccatgctcaccaaggaactctacttcagtcaatagccatatcaggggtacattctagctgagaagcaatgggtcactcattaatgaatcacatttttttatgctcttgaaatattcagaaattctccaggattttaatttcaggaaaatgtattgattcaacagggaagaaactttctggtgctgtcttttgttctctgaattttcagagactttttttataatgttattcatttggtgactgtgtaactttctcttaagattaattttctctttgtatgtctgttaccttgttaatagacttaatacatgcaacagaagtgacttctggagaaagctcatggctgtgtccactgcaattggtggtaacagtggtagagtcatgtttgcacttggcaaaaagaatcccaatgtttgacaaaacacagccaaggggatatttactgctctttattgcagaatgtgggtattgagtgtgatttgaatgatttttcattggcttagggcagattttcatgcaaaagttctcatatgagttagaggagaaaaagcttaatgattctgatatgtatccatcaggatccagtctggaaaacagaaaccattctaggtgtttcaacagagggagtttaatacaggaaattgacttacatagatgataaaagagaagccaaacagcaagaagctgttaccacacccagggctatgaggataatgggaagaggtttggtttcctgtgtccagtagtgggatcatccagaggagctggaaccatggtgggggctgcctagtgggagttaggaccaccaatggattgtggaaaatggagccatgacaagaacaaagccactgactgagatggagtgagctgagacagataagagaataccttggtctcacctatcctgccctcacatcttccaccagcaccttactgcccaggcctatctggaagccacctcaccaaggaccttggaagagcaagggacagtgaggcaggagaagaacaagaaatggatgtaagcctggcccataatgtgaacataagtaatcactaatgctcaacaatttatccattcaatcatttattcattgggttgtcagatagtctatgtatgtgtaaaacaatctgttttggctttatgtgcaaaatctgttatagctttaaaatatatctggaactttttagattattccaagccttattttgagtaaatatttgttacttttagttctataagtgaggaagagtttatggcaaagatttttggcactttgttttcaagatggtgttatcttttgaattcttgataaatgactgtttttttctgcctaatagtaactggttaaaaaacaaatgttcatatttattgattaaaaatgtggttgcttaattcctaa

SEQ ID NO: 63354 - DNA, 2663 bp, Homo sapiens
cgcccgcgcgcgggctcaactttgtagagcgaggggccaacttggcagagcgcgcggccagctttgcagagagcgccctccagggactatgcgtgcggggacacgggtcgctttgggctcttccacccctgcggagcgcactatcccgagccaggggcggtgcaagccccgcccggccctacccagggcggctcctccctccgcagcgccgagacttttagtttcgctttcgctaaaggggccccagacccttgctgcggagcgacggagagagactgtgccagtcccagccgccctaccgccgtgggaacggcaggaagtggcacttggaaaagaacaccagctgcggtggtagcagtgggatttgtgcttcttatgttacccagatggcagatgatcagggctgtattgaagagcagggggttgaggattcagcaaatgaagattcagtggatgctaagccagaccggtcctcgtttgtaccgtccctcttcagtaagaagaagaaaaatgtcaccatgcgatccatcaagaccacccgggaccgagtgcctacatatcagtacaacatgaattttgaaaagctgggcaaatgcatcataataaacaacaagaactttgataaagtgacaggtatgggcgttcgaaacggaacagacaaagatgccgaggcgctcttcaagtgcttccgaagcctgggttttgacgtgattgtctataatgactgctcttgtgccaagatgcaagatctgcttaaaaaagcttctgaagaggaccatacaaatgccgcctgcttcgcctgcatcctcttaagccatggagaagaaaatgtaatttatgggaaagatggtgtcacaccaataaaggatttgacagcccactttaggggggatagatgcaaaacccttttagagaaacccaaactcttcttcattcaggcttgccgagggaccgagcttgatgatggcatccaggccgactcggggcccatcaatgacacagatgctaatcctcgatacaagatcccagtggaagctgacttcctcttcgcctattccacggttccaggctattactcgtggaggagcccaggaagaggctcctggtttgtgcaagccctctgctccatcctggaggagcacggaaaagacctggaaatcatgcagatcctcaccagggtgaatgacagagttgccaggcactttgagtctcagtctgatgacccacacttccatgagaagaagcagatcccctgtgtggtctccatgctcaccaaggaactctacttcagtcaatagccatatcaggggtacattctagctgagaagcaatgggtcactcattaatgaatcacatttttttatgctcttgaaatattcagaaattctccaggattttaatttcaggaaaatgtattgattcaacagggaagaaactttctggtgctgtcttttgttctctgaattttcagagactttttttataatgttattcatttggtgactgtgtaactttctcttaagattaattttctctttgtatgtctgttaccttgttaatagacttaatacatgcaacagaagtgacttctggagaaagctcatggctgtgtccactgcaattggtggtaacagtggtagagtcatgtttgcacttggcaaaaagaatcccaatgtttgacaaaacacagccaaggggatatttactgctctttattgcagaatgtgggtattgagtgtgatttgaatgatttttcattggcttagggcagattttcatgcaaaagttctcatatgagttagaggagaaaaagcttaatgattctgatatgtatccatcaggatccagtctggaaaacagaaaccattctaggtgtttcaacagagggagtttaatacaggaaattgacttacatagatgataaaagagaagccaaacagcaagaagctgttaccacacccagggctatgaggataatgggaagaggtttggtttcctgtgtccagtagtgggatcatccagaggagctggaaccatggtgggggctgcctagtgggagttaggaccaccaatggattgtggaaaatggagccatgacaagaacaaagccactgactgagatggagtgagctgagacagataagagaataccttggtctcacctatcctgccctcacatcttccaccagcaccttactgcccaggcctatctggaagccacctcaccaaggaccttggaagagcaagggacagtgaggcaggagaagaacaagaaatggatgtaagcctggcccataatgtgaacataagtaatcactaatgctcaacaatttatccattcaatcatttattcattgggttgtcagatagtctatgtatgtgtaaaacaatctgttttggctttatgtgcaaaatctgttatagctttaaaatatatctggaactttttagattattccaagccttattttgagtaaatatttgttacttttagttctataagtgaggaagagtttatggcaaagatttttggcactttgttttcaagatggtgttatcttttgaattcttgataaatgactgtttttttctgcctaatagtaactggttaaaaaacaaatgttcatatttattgattaaaaatgtggttgcttaattcctaa

SEQ ID NO: 63355 - DNA, 2392 bp, Homo sapiens
gtccaccagcaagctgggctgctgggtgggtacttccttcaaagctgagggagcgtcctacgcccacgcgcgcaggagggcgccccccgcaaagcaacgtctaggagaccacagtggatgccacagcgggcccgaagcggatcagccttgtgggatggcagatgatcagggctgtattgaagagcagggggttgaggattcagcaaatgaagattcagtggatgctaagccagaccggtcctcgtttgtaccgtccctcttcagtaagaagaagaaaaatgtcaccatgcgatccatcaagaccacccgggaccgagtgcctacatatcagtacaacatgaattttgaaaagctgggcaaatgcatcataataaacaacaagaactttgataaagtgacaggtatgggcgttcgaaacggaacagacaaagatgccgaggcgctcttcaagtgcttccgaagcctgggttttgacgtgattgtctataatgactgctcttgtgccaagatgcaagatctgcttaaaaaagcttctgaagaggaccatacaaatgccgcctgcttcgcctgcatcctcttaagccatggagaagaaaatatcttgctctgtcacccaggctggagtgcagcggcgtgatctcggaagactgcaacctccacctcccaggcttgccgagggaccgagcttgatgatggcatccaggccgactcggggcccatcaatgacacagatgctaatcctcgatacaagatcccagtggaagctgacttcctcttcgcctattccacggttccaggctattactcgtggaggagcccaggaagaggctcctggtttgtgcaagccctctgctccatcctggaggagcacggaaaagacctggaaatcatgcagatcctcaccagggtgaatgacagagttgccaggcactttgagtctcagtctgatgacccacacttccatgagaagaagcagatcccctgtgtggtctccatgctcaccaaggaactctacttcagtcaatagccatatcaggggtacattctagctgagaagcaatgggtcactcattaatgaatcacatttttttatgctcttgaaatattcagaaattctccaggattttaatttcaggaaaatgtattgattcaacagggaagaaactttctggtgctgtcttttgttctctgaattttcagagactttttttataatgttattcatttggtgactgtgtaactttctcttaagattaattttctctttgtatgtctgttaccttgttaatagacttaatacatgcaacagaagtgacttctggagaaagctcatggctgtgtccactgcaattggtggtaacagtggtagagtcatgtttgcacttggcaaaaagaatcccaatgtttgacaaaacacagccaaggggatatttactgctctttattgcagaatgtgggtattgagtgtgatttgaatgatttttcattggcttagggcagattttcatgcaaaagttctcatatgagttagaggagaaaaagcttaatgattctgatatgtatccatcaggatccagtctggaaaacagaaaccattctaggtgtttcaacagagggagtttaatacaggaaattgacttacatagatgataaaagagaagccaaacagcaagaagctgttaccacacccagggctatgaggataatgggaagaggtttggtttcctgtgtccagtagtgggatcatccagaggagctggaaccatggtgggggctgcctagtgggagttaggaccaccaatggattgtggaaaatggagccatgacaagaacaaagccactgactgagatggagtgagctgagacagataagagaataccttggtctcacctatcctgccctcacatcttccaccagcaccttactgcccaggcctatctggaagccacctcaccaaggaccttggaagagcaagggacagtgaggcaggagaagaacaagaaatggatgtaagcctggcccataatgtgaacataagtaatcactaatgctcaacaatttatccattcaatcatttattcattgggttgtcagatagtctatgtatgtgtaaaacaatctgttttggctttatgtgcaaaatctgttatagctttaaaatatatctggaactttttagattattccaagccttattttgagtaaatatttgttacttttagttctataagtgaggaagagtttatggcaaagatttttggcactttgttttcaagatggtgttatcttttgaattcttgataaatgactgtttttttctgcctaatagtaactggttaaaaaacaaatgttcatatttattgattaaaaatgtggttgcttaattcctaa

SEQ ID NO: 63356 - DNA, 1054 bp, Homo sapiens
cgcccgcgcgcgggctcaactttgtagagcgaggggccaacttggcagagcgcgcggccagctttgcagagagcgccctccagggactatgcgtgcggggacacgggtcgctttgggctcttccacccctgcggagcgcactatcccgagccaggggcggtgcaagccccgcccggccctacccagggcggctcctccctccgcagcgccgagacttttagtttcgctttcgctaaaggggccccagacccttgctgcggagcgacggagagagactgtgccagtcccagccgccctaccgccgtgggaacgatggcagatgatcagggctgtattgaagagcagggggttgaggattcagcaaatgaagattcagtggatgctaagccagaccggtcctcgtttgtaccgtccctcttcagtaagaagaagaaaaatgtcaccatgcgatccatcaagaccacccgggaccgagtgcctacatatcagtacaacatgaattttgaaaagctgggcaaatgcatcataataaacaacaagaactttgataaagtgacaggtatgggcgttcgaaacggaacagacaaagatgccgaggcgctcttcaagtgcttccgaagcctgggttttgacgtgattgtctataatgactgatcttgctctgtcacccaggctggagtgcagcggcgtgatctcggaagactgcaacctccacctcccaggttcaagcaatactcctgcctcagcctcctgagtagctgggattacaggcacgcaccaccacgcctggctaatttttgtatttttagaagagaggggtttcgccatgttggccaggctggtctcaaactcctggcgtcaagtgatccacccacctcaggctcccaaagtgctgggattacaggtgtgagcctccacacccagccacaaattatgaaggtttctttaagacattgcaatacttttatttgctttgcttagtcatttgaaacacattcattcatttatcttttcatcaaattatcattgagctcctaagtatgccaggcacagt

SEQ ID NO: 63357 - DNA, 2431 bp, Homo sapiens
gtccaccagcaagctgggctgctgggtgggtacttccttcaaagctgagggagcgtcctacgcccacgcgcgcaggagggcgccccccgcaaagcaacgtctaggagaccacagtggatgccacagcgggcccgaagcggatcagccttgtgggatggcagatgatcagggctgtattgaagagcagggggttgaggattcagcaaatgaagattcagtggatgctaagccagaccggtcctcgtttgtaccgtccctcttcagtaagaagaagaaaaatgtcaccatgcgatccatcaagaccacccgggaccgagtgcctacatatcagtacaacatgaattttgaaaagctgggcaaatgcatcataataaacaacaagaactttgataaagtgacaggtatgggcgttcgaaacggaacagacaaagatgccgaggcgctcttcaagtgcttccgaagcctgggttttgacgtgattgtctataatgactgctcttgtgccaagatgcaagatctgcttaaaaaagcttctgaagaggaccatacaaatgccgcctgcttcgcctgcatcctcttaagccatggagaagaaaatgtaatttatgggaaagatggtgtcacaccaataaaggatttgacagcccactttaggggggatagatgcaaaacccttttagagaaacccaaactcttcttcattcaggcttgccgagggaccgagcttgatgatggcatccaggccgactcggggcccatcaatgacacagatgctaatcctcgatacaagatcccagtggaagctgacttcctcttcgcctattccacggttccaggctattactcgtggaggagcccaggaagaggctcctggtttgtgcaagccctctgctccatcctggaggagcacggaaaagacctggaaatcatgcagatcctcaccagggtgaatgacagagttgccaggcactttgagtctcagtctgatgacccacacttccatgagaagaagcagatcccctgtgtggtctccatgctcaccaaggaactctacttcagtcaatagccatatcaggggtacattctagctgagaagcaatgggtcactcattaatgaatcacatttttttatgctcttgaaatattcagaaattctccaggattttaatttcaggaaaatgtattgattcaacagggaagaaactttctggtgctgtcttttgttctctgaattttcagagactttttttataatgttattcatttggtgactgtgtaactttctcttaagattaattttctctttgtatgtctgttaccttgttaatagacttaatacatgcaacagaagtgacttctggagaaagctcatggctgtgtccactgcaattggtggtaacagtggtagagtcatgtttgcacttggcaaaaagaatcccaatgtttgacaaaacacagccaaggggatatttactgctctttattgcagaatgtgggtattgagtgtgatttgaatgatttttcattggcttagggcagattttcatgcaaaagttctcatatgagttagaggagaaaaagcttaatgattctgatatgtatccatcaggatccagtctggaaaacagaaaccattctaggtgtttcaacagagggagtttaatacaggaaattgacttacatagatgataaaagagaagccaaacagcaagaagctgttaccacacccagggctatgaggataatgggaagaggtttggtttcctgtgtccagtagtgggatcatccagaggagctggaaccatggtgggggctgcctagtgggagttaggaccaccaatggattgtggaaaatggagccatgacaagaacaaagccactgactgagatggagtgagctgagacagataagagaataccttggtctcacctatcctgccctcacatcttccaccagcaccttactgcccaggcctatctggaagccacctcaccaaggaccttggaagagcaagggacagtgaggcaggagaagaacaagaaatggatgtaagcctggcccataatgtgaacataagtaatcactaatgctcaacaatttatccattcaatcatttattcattgggttgtcagatagtctatgtatgtgtaaaacaatctgttttggctttatgtgcaaaatctgttatagctttaaaatatatctggaactttttagattattccaagccttattttgagtaaatatttgttacttttagttctataagtgaggaagagtttatggcaaagatttttggcactttgttttcaagatggtgttatcttttgaattcttgataaatgactgtttttttctgcctaatagtaactggttaaaaaacaaatgttcatatttattgattaaaaatgtggttgcttaattcctaa

SEQ ID NO: 63358 - DNA, 3009 bp, Homo sapiens
cgcccgcgcgcgggctcaactttgtagagcgaggggccaacttggcagagcgcgcggccagctttgcagagagcgccctccagggactatgcgtgcggggacacgggtcgctttgggctcttccacccctgcggagcgcactatcccgagccaggggcggtgcaagccccgcccggccctacccagggcggctcctccctccgcagcgccgagacttttagtttcgctttcgctaaaggggccccagacccttgctgcggagcgacggagagagactgtgccagtcccagccgccctaccgccgtgggaacgatggcagatgatcagggctgtattgaagagcagggggttgaggattcagcaaatgaagattcagtggatgctaagccagaccggtcctcgtttgtaccgtccctcttcagtaagaagaagaaaaatgtcaccatgcgatccatcaagaccacccgggaccgagtgcctacatatcagtacaacatgaattttgaaaagctgggcaaatgcatcataataaacaacaagaactttgataaagtgacaggtatgggcgttcgaaacggaacagacaaagatgccgaggcgctcttcaagtgcttccgaagcctgggttttgacgtgattgtctataatgactgctcttgtgccaagatgcaagatctgcttaaaaaagcttctgaagaggaccatacaaatgccgcctgcttcgcctgcatcctcttaagccatggagaagaaaatgtaatttatgggaaagatggtgtcacaccaataaaggatttgacagcccactttaggggggatagatgcaaaacccttttagagaaacccaaactcttcttcattcaggcttgccgagggaccgagcttgatgatggcatccaggccgactcggggcccatcaatgacacagatgctaatcctcgatacaagatcccagtggaagctgacttcctcttcgcctattccacggttccaggctattactcgtggaggagcccaggaagaggctcctggtttgtgcaagccctctgctccatcctggaggagcacggaaaagacctggaaatcatgcagatcctcaccagggtgaatgacagagttgccaggcactttgagtctcagtctgatgacccacacttccatgagaagaagcagatcccctgtgtggtctccatgctcaccaaggaactctacttcagtcaatagccatatcaggggtacattctagctgagaagcaatgggtcactcattaatgaatcacatttttttatgctcttgaaatattcagaaattctccaggattttaatttcaggaaaatgtattgattcaacagggaagaaactttctggtgctgtcttttgttctctgaattttcagagactttttttataatgttattcatttggtgactgtgtaactttctcttaagattaattttctctttgtatgtctgttaccttgttaatagacttaatacatgcaacagaagtgacttctggagaaagctcatggctgtgtccactgcaattggtggtaacagtggtagagtcatgtttgcacttggcaaaaagaatcccaatgtttgacaaaacacagccaaggggatatttactgctctttattgcagaatgtgggtattgagtgtgatttgaatgatttttcattggcttagggcagattttcatgcaaaagttctcatatgagttagaggagaaaaagcttaatgattctgatatgtatccatcaggatccagtctggaaaacagaaaccattctaggtgtttcaacagagggagtttaatacaggaaattgacttacatagatgataaaagagaagccaaacagcaagaagctgttaccacacccagggctatgaggataatgggaagaggtttggtttcctgtgtccagtagtgggatcatccagaggagctggaaccatggtgggggctgcctagtgggagttaggaccaccaatggattgtggaaaatggagccatgacaagaacaaagccactgactgagatggagtgagctgagacagataagagaataccttggtctcacctatcctgccctcacatcttccaccagcaccttactgcccaggcctatctggaagccacctcaccaaggaccttggaagagcaagggacagtgaggcaggagaagaacaagaaatggatgtaagcctggcccataatgtgaacataagtaatcactaatgctcaacaatttatccattcaatcatttattcattgggttgtcagatagtctatgtatgtgtaaaacaatctgttttggctttatgtgcaaaatctgttatagctttaaaatatatctggaactttttagattattccaagccttattttgagtaaatatttgttacttttagttctataagtgaggaagagtttatggcaaagatttttggcactttgttttcaagatggtgttatcttttgaattcttgataaatgactgtttttttctgcctaatagtaactggttaaaaaacaaatgttcatatttattgattaaaaatgtggttgcttaattcctaaaaaaaaaaaaaaaaaaaaaaaaaaaaaaaaaaagggggggggggaaatccggggggcggtggcgttgggcaaaagggtggctcccctatagatagcggagtaggtatttatgtaacaataggaaccttgggcgcgtgtgttttaaccaattgtgcaggaaagggggaaaagtggcttacgtgggagacactcttggtggggaaggaggacccccttacactcggtggggtggtggaacattaatgtggggaacaacgtctctccctacggagagtcttatgacgaagcctcttagggggaacactatacatatttttcaaagggtgttaatacgttggtaaacaatagcggacatattgctggtaggcctgagagatttggggtcagcgggcttgtcttttctgaaaagttttttacgga

SEQ ID NO: 63359 - DNA, 2602 bp, Homo sapiens
gcaccggatcaggtcacacgggcgggtggacgcagagctccgactagccgcaagtccagcgctcttttgtgctgcttctttgtggaaggaaatgtgaagaaaacccagcgtcaccctgtaaaccagacaaaatacaaaacagtggagaagcccagagaaggcaaaacagattccggatatttctcttttaaaagtaaaatggcatcatggaagaaatttggccttccgaaagtggaggataaagtcatgttcaaggggaagaacagcaatacagcatctgcggcttagacatacagagctcgtctgtaatttggagtaagataggagtgggggcggagagggggaaggccatgccctttcagagattctgagaaactccaaccataaaagtccatgacaactcaagtgcagtacccgtgaccccatgtttgtcagtaagaagaagaaaaatgtcaccatgcgatccatcaagaccacccgggaccgagtgcctacatatcagtacaacatgaattttgaaaagctgggcaaatgcatcataataaacaacaagaactttgataaagtgacaggtatgggcgttcgaaacggaacagacaaagatgccgaggcgctcttcaagtgcttccgaagcctgggttttgacgtgattgtctataatgactgctcttgtgccaagatgcaagatctgcttaaaaaagcttctgaagaggaccatacaaatgccgcctgcttcgcctgcatcctcttaagccatggagaagaaaatgtaatttatgggaaagatggtgtcacaccaataaaggatttgacagcccactttaggggggatagatgcaaaacccttttagagaaacccaaactcttcttcattcaggcttgccgagggaccgagcttgatgatggcatccaggccgactcggggcccatcaatgacacagatgctaatcctcgatacaagatcccagtggaagctgacttcctcttcgcctattccacggttccaggctattactcgtggaggagcccaggaagaggctcctggtttgtgcaagccctctgctccatcctggaggagcacggaaaagacctggaaatcatgcagatcctcaccagggtgaatgacagagttgccaggcactttgagtctcagtctgatgacccacacttccatgagaagaagcagatcccctgtgtggtctccatgctcaccaaggaactctacttcagtcaatagccatatcaggggtacattctagctgagaagcaatgggtcactcattaatgaatcacatttttttatgctcttgaaatattcagaaattctccaggattttaatttcaggaaaatgtattgattcaacagggaagaaactttctggtgctgtcttttgttctctgaattttcagagactttttttataatgttattcatttggtgactgtgtaactttctcttaagattaattttctctttgtatgtctgttaccttgttaatagacttaatacatgcaacagaagtgacttctggagaaagctcatggctgtgtccactgcaattggtggtaacagtggtagagtcatgtttgcacttggcaaaaagaatcccaatgtttgacaaaacacagccaaggggatatttactgctctttattgcagaatgtgggtattgagtgtgatttgaatgatttttcattggcttagggcagattttcatgcaaaagttctcatatgagttagaggagaaaaagcttaatgattctgatatgtatccatcaggatccagtctggaaaacagaaaccattctaggtgtttcaacagagggagtttaatacaggaaattgacttacatagatgataaaagagaagccaaacagcaagaagctgttaccacacccagggctatgaggataatgggaagaggtttggtttcctgtgtccagtagtgggatcatccagaggagctggaaccatggtgggggctgcctagtgggagttaggaccaccaatggattgtggaaaatggagccatgacaagaacaaagccactgactgagatggagtgagctgagacagataagagaataccttggtctcacctatcctgccctcacatcttccaccagcaccttactgcccaggcctatctggaagccacctcaccaaggaccttggaagagcaagggacagtgaggcaggagaagaacaagaaatggatgtaagcctggcccataatgtgaacataagtaatcactaatgctcaacaatttatccattcaatcatttattcattgggttgtcagatagtctatgtatgtgtaaaacaatctgttttggctttatgtgcaaaatctgttatagctttaaaatatatctggaactttttagattattccaagccttattttgagtaaatatttgttacttttagttctataagtgaggaagagtttatggcaaagatttttggcactttgttttcaagatggtgttatcttttgaattcttgataaatgactgtttttttctgcctaatagtaactggttaaaaaacaaatgttcatatttattgattaaaaatgtggttgcttaattcctaa

SEQ ID NO: 63360 - DNA, 2248 bp, Homo sapiens
accaggaggctcacctgttgcgggcaggtggcactgttagcctcccctttgagtttgcttcagttcatttaaattgtggccttggaaggcattgtatatacttggagtgtttctgctgcagctggcaccagtacatttagcacccggcccactggcgcccgcatgtagtatacagccaggggatgctcacctgtggattcattgcttgattcccacaggtatgggcgttcgaaacggaacagacaaagatgccgaggcgctcttcaagtgcttccgaagcctgggttttgacgtgattgtctataatgactgctcttgtgccaagatgcaagatctgcttaaaaaagcttctgaagaggaccatacaaatgccgcctgcttcgcctgcatcctcttaagccatggagaagaaaatgtaatttatgggaaagatggtgtcacaccaataaaggatttgacagcccactttaggggggatagatgcaaaacccttttagagaaacccaaactcttcttcattcaggcttgccgagggaccgagcttgatgatggcatccaggccgactcggggcccatcaatgacacagatgctaatcctcgatacaagatcccagtggaagctgacttcctcttcgcctattccacggttccaggctattactcgtggaggagcccaggaagaggctcctggtttgtgcaagccctctgctccatcctggaggagcacggaaaagacctggaaatcatgcagatcctcaccagggtgaatgacagagttgccaggcactttgagtctcagtctgatgacccacacttccatgagaagaagcagatcccctgtgtggtctccatgctcaccaaggaactctacttcagtcaatagccatatcaggggtacattctagctgagaagcaatgggtcactcattaatgaatcacatttttttatgctcttgaaatattcagaaattctccaggattttaatttcaggaaaatgtattgattcaacagggaagaaactttctggtgctgtcttttgttctctgaattttcagagactttttttataatgttattcatttggtgactgtgtaactttctcttaagattaattttctctttgtatgtctgttaccttgttaatagacttaatacatgcaacagaagtgacttctggagaaagctcatggctgtgtccactgcaattggtggtaacagtggtagagtcatgtttgcacttggcaaaaagaatcccaatgtttgacaaaacacagccaaggggatatttactgctctttattgcagaatgtgggtattgagtgtgatttgaatgatttttcattggcttagggcagattttcatgcaaaagttctcatatgagttagaggagaaaaagcttaatgattctgatatgtatccatcaggatccagtctggaaaacagaaaccattctaggtgtttcaacagagggagtttaatacaggaaattgacttacatagatgataaaagagaagccaaacagcaagaagctgttaccacacccagggctatgaggataatgggaagaggtttggtttcctgtgtccagtagtgggatcatccagaggagctggaaccatggtgggggctgcctagtgggagttaggaccaccaatggattgtggaaaatggagccatgacaagaacaaagccactgactgagatggagtgagctgagacagataagagaataccttggtctcacctatcctgccctcacatcttccaccagcaccttactgcccaggcctatctggaagccacctcaccaaggaccttggaagagcaagggacagtgaggcaggagaagaacaagaaatggatgtaagcctggcccataatgtgaacataagtaatcactaatgctcaacaatttatccattcaatcatttattcattgggttgtcagatagtctatgtatgtgtaaaacaatctgttttggctttatgtgcaaaatctgttatagctttaaaatatatctggaactttttagattattccaagccttattttgagtaaatatttgttacttttagttctataagtgaggaagagtttatggcaaagatttttggcactttgttttcaagatggtgttatcttttgaattcttgataaatgactgtttttttctgcctaatagtaactggttaaaaaacaaatgttcatatttattgattaaaaatgtggttgcttaattcctaa

SEQ ID NO: 63361 - DNA, 2094 bp, Homo sapiens
cgcccgcgcgcgggctcaactttgtagagcgaggggccaacttggcagagcgcgcggccagctttgcagagagcgccctccagggactatgcgtgcggggacacgggtcgctttgggctcttccacccctgcggagcgcactatcccgagccaggggcggtgcaagccccgcccggccctacccagggcggctcctccctccgcagcgccgagacttttagtttcgctttcgctaaaggggccccagacccttgctgcggagcgacggagagagactgtgccagtcccagccgccctaccgccgtgggaacgatggcagatgatcagggctgtattgaagagcagggggttgaggattcagcaaatgaagattcagtggatgctaagccagaccggtcctcgtttgtaccgtccctcttcagtaagaagaagaaaaatgtcaccatgcgatccatcaagaccacccgggaccgagtgcctacatatcagtacaacatgaattttgaaaagctgggcaaatgcatcataataaacaacaagaactttgataaagtgacaggtatgggcgttcgaaacggaacagacaaagatgccgaggcgctcttcaagtgcttccgaagcctgggttttgacgtgattgtctataatgactgctcttgtgccaagatgcaagatctgcttaaaaaagcttctgaagaggaccatacaaatgccgcctgcttcgcctgcatcctcttaagccatggagaagaaaatgtaatttatgggaaagatggtgtcacaccaataaaggatttgacagcccactttaggggggatagatgcaaaacccttttagagaaacccaaactcttcttcattcaggcttgccgagggaccgagcttgatgatggcatccaggccgactcggggcccatcaatgacacagatgctaatcctcgatacaagatcccagtggaagctgacttcctcttcgcctattccacggttccaggctattactcgtggaggagcccaggaagaggctcctggtttgtgcaagccctctgctccatcctggaggagcacggaaaagacctggaaatcatgcagatcctcaccagggtgaatgacagagttgccaggcactttgagtctcagtctgatgacccacacttccatgagaagaagcagatcccctgtgtggtctccatgctcaccaaggaactctacttcagtcaatagccatatcaggggtacattctagctgagaagcaatgggtcactcattaatgaatcacatttttttatgctcttgaaatattcagaaattctccaggattttaatttcaggaaaatgtattgattcaacagggaagaaactttctggtgctgtcttttgttctctgaattttcagagactttttttataatgttattcatttggtgactgtgtaactttctcttaagattaattttctctttgtatgtctgttaccttgttaatagacttaatacatgcaacagaagtgacttctggagaaagctcatggctgtgtccactgcaattggtggtaacagtggtagagtcatgtttgcacttggcaaaaagaatcccaatgtttgacaaaacacagccaaggggatatttactgctctttattgcagaatgtgggtattgagtgtgatttgaatgatttttcattggcttagggcagattttcatgcaaaagttctcatatgagttagaggagaaaaagcttaatgattctgatatgtatccatcaggatccagtctggaaaacagaaaccattctaggtgtttcaacagagggagtttaatacaggaaattgacttacatagatgataaaagagaagccaaacagcaagaagctgttaccacacccagggctatgaggataatgggaagaggtttggtttcctgtgtccagtagtgggatcatccagaggagctggaaccatggtgggggctgcctagtgggagttaggaccaccaatggattgtggaaaatggagccatgacaagaacaaagccactgactgagatggagtgagctgagacaaaggtattctcttatctgtctcgtcagacc

SEQ ID NO: 63362 - DNA, 551 bp, Homo sapiens
gccatatactcattctcattggtgagtggagcagctgtcagaattagctgatttggtcgtctcctttctttcctgttgaaggctattactcgtggaggagcccaggaagaggctcctggtttgtgcaagccctctgctccatcctggaggagcacggaaaagacctggaaatcatgcagatcctcaccagggtgaatgacagagttgccaggcactttgagtctcagtctgatgacccacacttccatgagaagaagcagatcccctgtgtggtctccatgctcaccaaggaactctacttcagtcaatagccatatcaggggtacattctagctgagaagcaatgggtcactcattaatgaatcacatttttttatgctcttgaaatattcagaaattctccaggattttaatttcaggaaaatgtattgattcaacagggaagaaactttctggtgctgtcttttgttctctgaattttcagagactttttttataatgttattcatttggtgactgtgtaactttctcttaagattaattttctcttt

SEQ ID NO: 63363 - DNA, 2956 bp, Homo sapiens
  misc_feature (17)..(17): n is a, c, g, or t
gccgggggtgaatcggncgagggaagtacgctcaaagccgaagccacagctcctcctgccgcatttctttcctgcttgcgaattccaagctgttaaataagatgtgcaaagggcttgcaggtctgccggcttcttgcttgaggagtgcaaaagatatgaaacatcggctaggtttcctgctgcaaaaatctgattcctgtgaacacaattcttcccacaacaagaaggacaaagtggttatttgccagagagtgagccaagaggaagtcaagaaatgggctgaatcactggaaaacctgattagtcatgaatgtgggctggcagctttcaaagctttcttgaagtctgaatatagtgaggagaatattgacttctggatcagctgtgaagagtacaagaaaatcaaatcaccatctaaactaagtcccaaggccaaaaagatctataatgaattcatctcagtccaggcaaccaaagaggtgaacctggattcttgcaccagggaagagacaagccggaacatgctagagcctacaataacctgctttgatgaggcccagaagaagattttcaacctgatggagaaggattcctaccgccgcttcctcaagtctcgattctatcttgatttggtcaacccgtccagctgtggggcagaaaagcagaaaggagccaagagttcagcagactgtgcttccctggtccctcagtgtgcctaattctcacctgaaggcagagggatgaaatgccaagactctatgctctggaaaacctgaggccaaatattgatctgtattaagctccagtgctttatccacattgtagcctaatattcatgctgcctgccatgtgtgagtcacttctacgcataaactagatatagcttttggtgtttgagtgttcatcagggtgggaccccattccagtccaattttcctaagtttctttgagggttccatgggagcaaatatctaaataatggcctggtaggtctggattttcaaagattgttggcagtttcctcctcccaacagttttacctcgggatggttggttagtgcatgtcacatgacatccacatgcacatgtattctgttggccagcacgttctccagactctagatgtttagatgaggttgagctatgatatgtgcttgtgtgtatgtctatgtgtatatattatatatacattagacacacatatacattatttctgtatatagatgtctgtgtatacatatgtatgtgtgagtgtatgtatacacacacacacacacacacacacttttgcaagagtgatgggaaagaccctaggtgctcataactagagtatgtgtatgtacttacatgggtgttttgatctctgttctttcatactacatttgaacagggcaaaatgaactaactgccatgtaggctaagaaagaaatgctaacctgtggaaagttggttttgtaaaattccatggatcttgctggagaagcatccaaggaacttcatgcttgatttgaccactgacagcctccaccttgagcactattctaaggagcaaataccttagctcccttgagctggttttctctgatggcacttttgagctcctaagctgccagccttcccttcttttcctgggtgctcagggcatgcttattagcagctgggttggtatggagttggcagacaggatgttcaacttaatgaagaaatacagctaaggccttgccagcaacacctgccgtaagttactggctgagtgagggcatagaagttaaaggttactgtttttatcctctatccttttttcctttcctgatcaaggtgctcttctcattttttcctgagaaccttagccatcagatgaggctccttagtttattgtggttggttgttttttctttataatggctctgggctatatgcccatatttataaaccagcagcaggggaaagattatattttataagagggaacaaattttcacaatttgaaaagcccacataagttttctcttttaaggtagaatcttgttaatttcattccaaacatcggggctaacagagactggaggcatttctttttaggctctgagactaaatgagaggaaaagaaaagaaaaaaaaatgattgtctaaccaattgtgagaattactgtttgaaacttttcaaggcacattgaaatacttgaaaacttctcatttatgttatttatgatgttattttgtacgtgttattattattatattgttttataaatggaggtacaggatatcacctgaattattaatgaatgcccaggaagtaattttcttctcattcttctaaaactactgcctttcaaagtgcacacacacgcgtccacatacactgcattcgttgctccagtataaattacatgcatgagcacctttctggcttttaagccaatataatgggctgcaaaatgaagacaccagagtgtatgcatacaaatctcactgtattaaagatgcaggttttctaattgtacccttcttgtctctctggcaatcttgcccttaatatccctggagttcctcatcagtgtcattttctgttatacacagttccacaattttgtctctagttgacttcaaatgtgtaactttattggtcttgccctattataattgtcatgactttcagattgtatctgaactcacagactgctgtcttactaataggtctggaaggtcacgctgaatgagaagtaaattattttatgtaatacatttttgagtgtgtttttcagttgtatttccctgttatttcatcactatttccaatggtgagcttgcctgctcatgctccctggacagaatactccttccttttgcatgcctgtttctatcatgtgcttgataggcctcaaagctaatgcttccagtgaaacacacgcatcttaataataagggtaaataaacgctccatatgaaacta

SEQ ID NO: 63364 - DNA, 3101 bp, Homo sapiens
tcagtctgtttaaaattttaatatgccctagagctttgtgatatacaatgaaaagtttatgcaggaaccatgtggaaaaccatctctctcatcacaaggaaaaacggaagagagaaaaaaaatgataaatatcaataccttcttgcaaaatcaatctcagtttctctttcccaaattgaccttggtaattgatagctgcataggcatttcagaagcaaaatacttccttgaaagaggcttccaacttgagtaagaatcattaggtagaactgggaaccactggatatcaaacacagattagggttacctgactccaggtgacttgaaaaaagcaggggaaaaagggattgcttgaatccatgctttatcccccaagtacctcagctttatgtgaaatagcatatccaagaggccaaccagtgtgatgacaactgtggtcctttctcctgtatcataggtgggctggcagctttcaaagctttcttgaagtctgaatatagtgaggagaatattgacttctggatcagctgtgaagagtacaagaaaatcaaatcaccatctaaactaagtcccaaggccaaaaagatctataatgaattcatctcagtccaggcaaccaaagaggtgaacctggattcttgcaccagggaagagacaagccggaacatgctagagcctacaataacctgctttgatgaggcccagaagaagattttcaacctgatggagaaggattcctaccgccgcttcctcaagtctcgattctatcttgatttggtcaacccgtccagctgtggggcagaaaagcagaaaggagccaagagttcagcagactgtgcttccctggtccctcagtgtgcctaattctcacctgaaggcagagggatgaaatgccaagactctatgctctggaaaacctgaggccaaatattgatctgtattaagctccagtgctttatccacattgtagcctaatattcatgctgcctgccatgtgtgagtcacttctacgcataaactagatatagcttttggtgtttgagtgttcatcagggtgggaccccattccagtccaattttcctaagtttctttgagggttccatgggagcaaatatctaaataatggcctggtaggtctggattttcaaagattgttggcagtttcctcctcccaacagttttacctcgggatggttggttagtgcatgtcacatgacatccacatgcacatgtattctgttggccagcacgttctccagactctagatgtttagatgaggttgagctatgatatgtgcttgtgtgtatgtctatgtgtatatattatatatacattagacacacatatacattatttctgtatatagatgtctgtgtatacatatgtatgtgtgagtgtatgtatacacacacacacacacacacacacttttgcaagagtgatgggaaagaccctaggtgctcataactagagtatgtgtatgtacttacatgggtgttttgatctctgttctttcatactacatttgaacagggcaaaatgaactaactgccatgtaggctaagaaagaaatgctaacctgtggaaagttggttttgtaaaattccatggatcttgctggagaagcatccaaggaacttcatgcttgatttgaccactgacagcctccaccttgagcactattctaaggagcaaataccttagctcccttgagctggttttctctgatggcacttttgagctcctaagctgccagccttcccttcttttcctgggtgctcagggcatgcttattagcagctgggttggtatggagttggcagacaggatgttcaacttaatgaagaaatacagctaaggccttgccagcaacacctgccgtaagttactggctgagtgagggcatagaagttaaaggttactgtttttatcctctatccttttttcctttcctgatcaaggtgctcttctcattttttcctgagaaccttagccatcagatgaggctccttagtttattgtggttggttgttttttctttataatggctctgggctatatgcccatatttataaaccagcagcaggggaaagattatattttataagagggaacaaattttcacaatttgaaaagcccacataagttttctcttttaaggtagaatcttgttaatttcattccaaacatcggggctaacagagactggaggcatttctttttaggctctgagactaaatgagaggaaaagaaaagaaaaaaaaatgattgtctaaccaattgtgagaattactgtttgaaacttttcaaggcacattgaaatacttgaaaacttctcatttatgttatttatgatgttattttgtacgtgttattattattatattgttttataaatggaggtacaggatatcacctgaattattaatgaatgcccaggaagtaattttcttctcattcttctaaaactactgcctttcaaagtgcacacacacgcgtccacatacactgcattcgttgctccagtataaattacatgcatgagcacctttctggcttttaagccaatataatgggctgcaaaatgaagacaccagagtgtatgcatacaaatctcactgtattaaagatgcaggttttctaattgtacccttcttgtctctctggcaatcttgcccttaatatccctggagttcctcatcagtgtcattttctgttatacacagttccacaattttgtctctagttgacttcaaatgtgtaactttattggtcttgccctattataattgtcatgactttcagattgtatctgaactcacagactgctgtcttactaataggtctggaaggtcacgctgaatgagaagtaaattattttatgtaatacatttttgagtgtgtttttcagttgtatttccctgttatttcatcactatttccaatggtgagcttgcctgctcatgctccctggacagaatactccttccttttgcatgcctgtttctatcatgtgcttgataggcctcaaagctaatgcttccagtgaaacacacgcatcttaataataagggtaaataaacgctccatatgaaacta

SEQ ID NO: 63365 - DNA, 929 bp, Homo sapiens
agaggcagagggagacagaggagctggtactgcagagcggtcgtctgattggctggacggtcgtagctgggctataaaagagacccctacaggcttagcaggaagacgctcagaggattctgacaatatctttaccggagaagaggcaaagtacgctcaaagccgaagccacagctcctcctgccgcatttctttcctgcttgcgaattccaagctgttaaataagatgtgcaaagggcttgcaggtctgccggcttcttgcttgaggagtgcaaaagatatgaaacatcggctaggtttcctgctgcaaaaatctgattcctgtgaacacaattcttcccacaacaagaaggacaaagtggttatttgccagagagtgagccaagaggaagtcaagaaatgggctgaatcactggaaaacctgattagtcatgaatgtgggctggcagctttcaaagctttcttgaagtctgaatatagtgaggagaatattgacttctggatcagctgtgaagagtacaagaaaatcaaatcaccatctaaactaagtcccaaggccaaaaagatctataatgaattcatctcagtccaggcaaccaaagaggtgaacctggattcttgcaccagggaagagacaagccggaacatgctagagcctacaataacctgctttgatgaggcccagaagaagattttcaacctgatggagaaggattcctaccgccgcttcctcaagtctcgattctatcttgatttggtcaacccgtccagctgtggggcagaaaagcagaaaggagccaagagttcagcagactgtgcttccctggtccctcagtgtgcctaattctcacctgaaggcagagggatgaaatgccgaatctgagatatccatcacactggggggcgtcgagcatgatctagagggccta

SEQ ID NO: 63366 - DNA, 3081 bp, Homo sapiens
agaggcagagggagacagaggagctggtactgcagagcggtcgtctgattggctggacggtcgtagctgggctataaaagagacccctacaggcttagcaggaagacgctcagaggattctgacaatatctttaccggagaagaggcaaagtacgctcaaagccgaagccacagctcctcctgccgcatttctttcctgcttgcgaattccaagctgttaaataagatgtgcaaagggcttgcaggtctgccggcttcttgcttgaggagtgcaaaagatatgaaacatcggctaggtttcctgctgcaaaaatctgattcctgtgaacacaattcttcccacaacaagaaggacaaagtggttatttgccagagagtgagccaagaggaagtcaagaaatgggctgaatcactggaaaacctgattagtcatgaatgtgggctggcagctttcaaagctttcttgaagtctgaatatagtgaggagaatattgacttctggatcagctgtgaagagtacaagaaaatcaaatcaccatctaaactaagtcccaaggccaaaaagatctataatgaattcatctcagtccaggcaaccaaagaggtgaacctggattcttgcaccagggaagagacaagccggaacatgctagagcctacaataacctgctttgatgaggcccagaagaagattttcaacctgatggagaaggattcctaccgccgcttcctcaagtctcgattctatcttgatttggtcaacccgtccagctgtggggcagaaaagcagaaaggagccaagagttcagcagactgtgcttccctggtccctcagtgtgcctaattctcacctgaaggcagagggatgaaatgccaagactctatgctctggaaaacctgaggccaaatattgatctgtattaagctccagtgctttatccacattgtagcctaatattcatgctgcctgccatgtgtgagtcacttctacgcataaactagatatagcttttggtgtttgagtgttcatcagggtgggaccccattccagtccaattttcctaagtttctttgagggttccatgggagcaaatatctaaataatggcctggtaggtctggattttcaaagattgttggcagtttcctcctcccaacagttttacctcgggatggttggttagtgcatgtcacatgacatccacatgcacatgtattctgttggccagcacgttctccagactctagatgtttagatgaggttgagctatgatatgtgcttgtgtgtatgtctatgtgtatatattatatatacattagacacacatatacattatttctgtatatagatgtctgtgtatacatatgtatgtgtgagtgtatgtatacacacacacacacacacacacacttttgcaagagtgatgggaaagaccctaggtgctcataactagagtatgtgtatgtacttacatgggtgttttgatctctgttctttcatactacatttgaacagggcaaaatgaactaactgccatgtaggctaagaaagaaatgctaacctgtggaaagttggttttgtaaaattccatggatcttgctggagaagcatccaaggaacttcatgcttgatttgaccactgacagcctccaccttgagcactattctaaggagcaaataccttagctcccttgagctggttttctctgatggcacttttgagctcctaagctgccagccttcccttcttttcctgggtgctcagggcatgcttattagcagctgggttggtatggagttggcagacaggatgttcaacttaatgaagaaatacagctaaggccttgccagcaacacctgccgtaagttactggctgagtgagggcatagaagttaaaggttactgtttttatcctctatccttttttcctttcctgatcaaggtgctcttctcattttttcctgagaaccttagccatcagatgaggctccttagtttattgtggttggttgttttttctttataatggctctgggctatatgcccatatttataaaccagcagcaggggaaagattatattttataagagggaacaaattttcacaatttgaaaagcccacataagttttctcttttaaggtagaatcttgttaatttcattccaaacatcggggctaacagagactggaggcatttctttttaggctctgagactaaatgagaggaaaagaaaagaaaaaaaaatgattgtctaaccaattgtgagaattactgtttgaaacttttcaaggcacattgaaatacttgaaaacttctcatttatgttatttatgatgttattttgtacgtgttattattattatattgttttataaatggaggtacaggatatcacctgaattattaatgaatgcccaggaagtaattttcttctcattcttctaaaactactgcctttcaaagtgcacacacacgcgtccacatacactgcattcgttgctccagtataaattacatgcatgagcacctttctggcttttaagccaatataatgggctgcaaaatgaagacaccagagtgtatgcatacaaatctcactgtattaaagatgcaggttttctaattgtacccttcttgtctctctggcaatcttgcccttaatatccctggagttcctcatcagtgtcattttctgttatacacagttccacaattttgtctctagttgacttcaaatgtgtaactttattggtcttgccctattataattgtcatgactttcagattgtatctgaactcacagactgctgtcttactaataggtctggaaggtcacgctgaatgagaagtaaattattttatgtaatacatttttgagtgtgtttttcagttgtatttccctgttatttcatcactatttccaatggtgagcttgcctgctcatgctccctggacagaatactccttccttttgcatgcctgtttctatcatgtgcttgataggcctcaaagctaatgcttccagtgaaacacacgcatcttaataataagggtaaataaacgctccatatgaaacta

SEQ ID NO: 63367 - DNA, 1992 bp, Homo sapiens
agaggcagagggagacagaggagctggtactgcagagcggtcgtctgattggctggacggtcgtagctgggctataaaagagacccctacaggcttagcaggaagacgctcagaggattctgacaatatctttaccggagaagaggcaaagtacgctcaaagccgaagccacagctcctcctgccgcatttctttcctgcttgcgaattccaagctgttaaataagatgtgcaaagggcttgcaggtctgccggcttcttgcttgaggagtgcaaaagatatgaaacatcggctaggtttcctgctgcaaaaatctgattcctgtgaacacaattcttcccacaacaagaaggacaaagtggttatttgccagagagtgagccaagaggaagtcaagaaatgggctgaatcactggaaaacctgattagtcatgaatgtgggctggcagctttcaaagctttcttgaagtctgaatatagtgaggagaatattgacttctggatcagctgtgaagagtacaagaaaatcaaatcaccatctaaactaagtcccaaggccaaaaagatctataatgaattcatctcagtccaggcaaccaaagaggtgaacctggattcttgcaccagggaagagacaagccggaacatgctagagcctacaataacctgctttgatgaggcccagaagaagattttcaacctgatggagaaggattcctaccgccgcttcctcaagtctcgattctatcttgatttggtcaacccgtccagctgtggggcagaaaagcagaaaggagccaagagttcagcagactgtgcttccctggtccctcagtgtgcctaattctcacctgaaggcagagggatgaaatgccaagactctatgctctggaaaacctgaggccaaatattgatctgtattaagctccagtgctttatccacattgtagcctaatattcatgctgcctgccatgtgtgagtcacttctacgcataaactagatatagcttttggtgtttgagtgttcatcagggtgggaccccattccagtccaattttcctaagtttctttgagggttccatgggagcaaatatctaaataatggcctggtaggtctggattttcaaagattgttggcagtttcctcctcccaacagttttacctcgggatggttggttagtgcatgtcacatgacatccacatgcacatgtattctgttggccagcacgttctccagactctagatgtttagatgaggttgagctatgatatgtgcttgtgtgtatgtctatgtgtatatattatatatacattagacacacatatacattatttctgtatatagatgtctgtgtatacatatgtatgtgtgagtgtatgtatacacacacacacacacacacacacttttgcaagagtgatgggaaagaccctaggtgctcataactagagtatgtgtatgtacttacatgggtgttttgatctctgttctttcatactacatttgaacagggcaaaatgaactaactgccatgtaggctaagaaagaaatgctaacctgtggaaagttggttttgtaaaattccatggatcttgctggagaagcatccaaggaacttcatgcttgatttgaccactgacagcctccaccttgagcactattctaaggagcaaataccttagctcccttgagctggttttctctgatggcacttttgagctcctaagctgccagccttcccttcttttcctgggtgctcagggcatgcttattagcagctgggttggtatggagttggcagacaggatgttcaacttaatgaagaaatacagctaaggccttgccagcaacacctgccgtaagttactggctgagtgagggcatagaagttaaaggttactgtttttatcctctatccttttttcctttcctaaaagcactctgagtcaagatgagtgggaaaccatctcaataaacacattttggat

SEQ ID NO: 63368 - DNA, 3018 bp, Homo sapiens
agcggaatacgctcagagagatgcgtagacggatatctgtacccggaaaagaggtgaagctacgcctcaacaggcggacagcgagcacgtatcttcctgtcagaatccctgacgcgtgcttgcagattccgaagctgttccacataatcatcgtgcacacgggcatcttgctagagtcatggcaggccttctagccttgcaggtcagtgcaaaagatatgaaacatcggctaggtttcctgctgcaaaaatctgattcctgtgaacacaattcttcccacaacaagaaggacaaagtggttatttgccagagagtgagccaagaggaagtcaagaaatgggctgaatcactggaaaacctgattagtcatgaatgtgggctggcagctttcaaagctttcttgaagtctgaatatagtgaggagaatattgacttctggatcagctgtgaagagtacaagaaaatcaaatcaccatctaaactaagtcccaaggccaaaaagatctataatgaattcatctcagtccaggcaaccaaagaggtgaacctggattcttgcaccagggaagagacaagccggaacatgctagagcctacaataacctgctttgatgaggcccagaagaagattttcaacctgatggagaaggattcctaccgccgcttcctcaagtctcgattctatcttgatttggtcaacccgtccagctgtggggcagaaaagcagaaaggagccaagagttcagcagactgtgcttccctggtccctcagtgtgcctaattctcacctgaaggcagagggatgaaatgccaagactctatgctctggaaaacctgaggccaaatattgatctgtattaagctccagtgctttatccacattgtagcctaatattcatgctgcctgccatgtgtgagtcacttctacgcataaactagatatagcttttggtgtttgagtgttcatcagggtgggaccccattccagtccaattttcctaagtttctttgagggttccatgggagcaaatatctaaataatggcctggtaggtctggattttcaaagattgttggcagtttcctcctcccaacagttttacctcgggatggttggttagtgcatgtcacatgacatccacatgcacatgtattctgttggccagcacgttctccagactctagatgtttagatgaggttgagctatgatatgtgcttgtgtgtatgtctatgtgtatatattatatatacattagacacacatatacattatttctgtatatagatgtctgtgtatacatatgtatgtgtgagtgtatgtatacacacacacacacacacacacacttttgcaagagtgatgggaaagaccctaggtgctcataactagagtatgtgtatgtacttacatgggtgttttgatctctgttctttcatactacatttgaacagggcaaaatgaactaactgccatgtaggctaagaaagaaatgctaacctgtggaaagttggttttgtaaaattccatggatcttgctggagaagcatccaaggaacttcatgcttgatttgaccactgacagcctccaccttgagcactattctaaggagcaaataccttagctcccttgagctggttttctctgatggcacttttgagctcctaagctgccagccttcccttcttttcctgggtgctcagggcatgcttattagcagctgggttggtatggagttggcagacaggatgttcaacttaatgaagaaatacagctaaggccttgccagcaacacctgccgtaagttactggctgagtgagggcatagaagttaaaggttactgtttttatcctctatccttttttcctttcctgatcaaggtgctcttctcattttttcctgagaaccttagccatcagatgaggctccttagtttattgtggttggttgttttttctttataatggctctgggctatatgcccatatttataaaccagcagcaggggaaagattatattttataagagggaacaaattttcacaatttgaaaagcccacataagttttctcttttaaggtagaatcttgttaatttcattccaaacatcggggctaacagagactggaggcatttctttttaggctctgagactaaatgagaggaaaagaaaagaaaaaaaaatgattgtctaaccaattgtgagaattactgtttgaaacttttcaaggcacattgaaatacttgaaaacttctcatttatgttatttatgatgttattttgtacgtgttattattattatattgttttataaatggaggtacaggatatcacctgaattattaatgaatgcccaggaagtaattttcttctcattcttctaaaactactgcctttcaaagtgcacacacacgcgtccacatacactgcattcgttgctccagtataaattacatgcatgagcacctttctggcttttaagccaatataatgggctgcaaaatgaagacaccagagtgtatgcatacaaatctcactgtattaaagatgcaggttttctaattgtacccttcttgtctctctggcaatcttgcccttaatatccctggagttcctcatcagtgtcattttctgttatacacagttccacaattttgtctctagttgacttcaaatgtgtaactttattggtcttgccctattataattgtcatgactttcagattgtatctgaactcacagactgctgtcttactaataggtctggaaggtcacgctgaatgagaagtaaattattttatgtaatacatttttgagtgtgtttttcagttgtatttccctgttatttcatcactatttccaatggtgagcttgcctgctcatgctccctggacagaatactccttccttttgcatgcctgtttctatcatgtgcttgataggcctcaaagctaatgcttccagtgaaacacacgcatcttaataataagggtaaataaacgctccatatgaaacta

SEQ ID NO: 63369 - DNA, 235 bp, Homo sapiens
gatccctatggagagggttcgaatgaggagcgctgggcagggccaggagtgaggaaggaggtaatggcaccaactggctctgcttttatcttggggtattcacccaacctttctggaaaccatctgcaaaatgtctcccatttgtgtgaggactaggagctagaccaggctggggctgtggtctatggagactgagattcagggaggaatcattcagattcagtaaccagaattc

SEQ ID NO: 63370 - DNA, 766 bp, Homo sapiens
ggccagcagaccattaatgaagactcatggtgggctgctgtgttttacatgcaaagcatattttatttatctaacaaacacttctatgatacttaaaatgctccagatagtattctaagcgttttatttatctgaatttatttaatctatacaacaatgccaagaggtagatgctattattgtcataacagaatgaagcaactgagtatcagaaaagttaaggaaatagcgtgaagtcacacagcttttaaattgcagggatgaagtttgaggctagacattctgactgcatatagttcacgctccacttagagaatcatccacattctctgctgctctagaaaggaaatgctaaaaggacctcctcgaatctccctttgtcaatggtcaagtcttcctgctatcacttgtaacacatcatgacctggaaacttatctgcaatgcagatgctcagccccaccccagacctgaagaatcaggcttagcattttcgcaagatccccaagtgcttcccctggtaaaagtaaatgaaatttactgggagatgaacctaatcactccaatttcttatttcagctttgttttccagcagatacaccctaaaacttctgaagtgcacatggatgacctctttactgccttccctggtatggaggccagaatgaccaaaaatcagtgaaagaaagaagagccagtagaaacataagccatctgcgaatggaatcagaccaaaaaataaattgagaataaacttaacagcatttt

SEQ ID NO: 63371 - DNA, 1288 bp, Homo sapiens
aagccacccagcctatgcatccgctcctcaatcctctcctgttggcactgggcctcatggcgcttttgttgaccacggtcattgctctcacttgccttggcggctttgcctccccaggccctgtgcctccctctacagccctcagggagctcattgaggagctggtcaacatcacccagaaccagaaggctccgctctgcaatggcagcatggtatggagcatcaacctgacagctggcatgtactgtgcagccctggaatccctgatcaacgtgtcaggctgcagtgccatcgagaagacccagaggatgctgagcggattctgcccgcacaaggtctcagctgggcagttttccagcttgcatgtccgagacaccaaaatcgaggtggcccagtttgtaaaggacctgctcttacatttaaagaaactttttcgcgagggacggttcaactgaaacttcgaaagcatcattatttgcagagacaggacctgactattgaagttgcagattcatttttctttctgatgtcaaaaatgtcttgggtaggcgggaaggagggttagggaggggtaaaattccttagcttagacctcagcctgtgctgcccgtcttcagcctagccgacctcagccttccccttgcccagggctcagcctggtgggcctcctctgtccagggccctgagctcggtggacccagggatgacatgtccctacacccctcccctgccctagagcacactgtagcattacagtgggtgccccccttgccagacatgtggtgggacagggacccacttcacacacaggcaactgaggcagacagcagctcaggcacacttcttcttggtcttatttattattgtgtgttatttaaatgagtgtgtttgtcaccgttggggattggggaagactgtggctgctggcacttggagccaagggttcagagactcagggccccagcactaaagcagtggaccccaggagtccctggtaataagtactgtgtacagaattctgctacctcactggggtcctggggcctcggagcctcatccgaggcagggtcaggagaggggcagaacagccgctcctgtctgccagccagcagccagctctcagccaacgagtaatttattgtttttcctcgtatttaaatattaaatatgttagcaaagagttaatatatagaagggtaccttgaacactgggggaggggacattgaacaagttgtttcattgactatcaaactgaagccagaaataaagttggtgacagataggcct

SEQ ID NO: 63372 - DNA, 92 bp, Homo sapiens
ttcctaggttatggtgatgctgctgctctgggaaccacactttgagatgagaaccactcatatccaaactaagattatgttctctaataaag

SEQ ID NO: 63373 - DNA, 660 bp, Homo sapiens
tgcccaaaccccttataagtgatacctgtttagctcagttaattataacaacagtaggaggcatagctgtcactcattgagtacttcctgggggctagacatgctaagctctcttcttccgtcttctcaatcatcatgacagctctgatgttgagactgttattgagcccattttgttgatttgaccattgaggcactgagaggtggttgtagagctataaagtggctgagtggggattagaacaggttttccttgggctccagagcctggcttcttgatcacctcacgcctcggtctgaggaaggggctgtgagtctgcccacctgcgagctgctctctgtccaatgacttagtccctctgttctgactcaccctaaattgatgttcccgggagccctgtttcttttattcactgtttcacagggggcatctcattgtaaccctcacatgctcatagcagctaacagatggagaagcacagatgcaagctcaggaccacgctgcagttcaaattccagctcagtcattcactagctattgaccccggacatgtcacatagccactgtgtgcctcagtttactcattcataaaatggagatgatactttataagagtgctgtcacatgaggcaatgttttcaaaaatgcctagcccacca

SEQ ID NO: 63374 - DNA, 291 bp, Homo sapiens
attccaatggtaatactaacgaattgtgctatctaaatattggatagtaaaaacgtcaacatttagaaaatgtatatcacacagggaaccaatatttttcaaattatccacatctaatattaggcaaccacgcgcaagcaaaagacacgttcaaagtacaggagaaatggatggattttaatgtgagatagtacaagaagtttattgatatagtttcagattccatattgtaataaacctttaagaaactatcacttcttgagtttgggtatagaatccaaaaaaaaaaaa

SEQ ID NO: 63375 - DNA, 153 bp, Homo sapiens
tcgacagtgcatcgcctcggagactgcctcgctgcccatgatcgtcagcatcaaggagggaggcaggaccaggccccaggtggtcagcctgcccaacatgagggtgcagaagtgcagctgtgcctcggatggtgcgctcgtgccaaggaggct

SEQ ID NO: 63376 - DNA, 406 bp, Homo sapiens
agcccacttttgacaaatcaacatgtgcaaagtccacattttgaaccacgaggcaaaaattagtatgagatcgtggttatttccttcctgggagtggaagttctgagagagcgaagagagaaaggaatactgatatttctgagagtctgccaggagaaagcctgcctggccagtttagtggcggagctgagtctgaataagggtttcactcttattgcccaggctggagtccaatggtgcgatcttggctcactgcaacctctgcctcctggcttcaagtgattctcatgcctcagcctcccgagcagctgggattacagggagcatcaagacactggcatttggaaatctagaagcaattcaactgaagatgactcatcttttcattaaaaggaagatccattca

SEQ ID NO: 63377 - DNA, 465 bp, Homo sapiens
accctagcagtagtatattgcaagtacccacttaattattttcttgtttcatgaaacataaacttgaaaagctgttattctggtttctttttcttgactttttagtggaatacatacttagtttgcaaatatatgacatgagccaaggtgtcaagctttcacaaagaaggagtaatgaatttgcatactttaaatgatagattcattatgtttgtctcttgattaaagtaatatgaaaactagtacatgcagaacatgaggaatggcaaaatggagccctcagtgtcattcttttcttaagtagtctgcttggtatatgccaacataaacactcgaagtgaactttaatttctttcttcttgttttactgaagctataatcttaaatttgatgtttgcaaattggctgccagtaaataggctttcgggtaaagacgaggtactggaaatcttggaaaggctgaaa

SEQ ID NO: 63378 - DNA, 983 bp, Homo sapiens
  misc_feature (961)..(961): n is a, c, g, or t
agcgggtttgggggcgcgcgtcttcgcgaccctcggctgggcccgccgcccgcttcccgcccctggcgcctcacagctgcagccacttcccgccttgcctccttccgggcctctcgggccccggggagcgcggcgggccggggcaggggccagggcagggaccggggaggccgggcctcccaggctcagcgctgaagcccgagaggactgcggctggaaagcggccgagcacatggacgagctccaggcgcgcctgctgcaggggctggggtctcaggccggggccgcgggcgtcctcggagcctcggcgggacgtgggggctcgggtgtactggccgggccgatgcaggaaagcgggagcgcgtaattcttcggcctgtggtggacacagatgtgtgcaggacttcattgacttaactagagagaccagaccaaggacaaaagatcgcagtggactgtatgtgattgacctgacaagagctgagggagaaaatagacctattgccactcttgacttaactttagaacctgtcactccttcccagaaggagccaaccagtcttcagacatgtgccagcctctctggcaaagcggtgatggaagggcacgtggacagaagctctcagcctacagcacggagaatcattaacagtgatcctgtagatttggacctagtggaagaaaacacctttgtaggtcccccacccgctacatccatcagtggaggctctgtttatccaacagagcctaattgtagctcagccacattcacaggtaacctcagcttcttggcaagtctacagctgtcttcagatgttagctccctctccccaacaagcaataatagtaggagcagcagcagcagcagcaatcaaaaagcacccttgccatgcccacagcaagatgtatctcgcccaccacaggccttgccgtgccccctgcgacctttgccatgcccacngagagctcaccatgtccaccac

SEQ ID NO: 63379 - DNA, 873 bp, Homo sapiens
  misc_feature (851)..(851): n is a, c, g, or t
ttaacagatgctgaagaagcatttgacaaaatgtaatagctcttcccaatttaaactctgagtaaactaggaaaagaagagaacttccttaaaggcatctgtgaaaaccccacagctagaattatacttaatgatggaaatctgaaattctttcttttaagttcaagaacaagcagggaaggcagagcaagatggctgaatagaaccctccagcatttgtcccccaagcaagaacaccaacttgaacaactatccacacaagaaagcactttcagaagaactaaaactcaggacttcattgacttaactagagagaccagaccaaggacaaaagatcgcagtggactgtatgtgattgacctgacaagagctgagggagaaaatagacctattgccactcttgacttaactttagaacctgtcactccttcccagaaggagccaaccagtcttcagacatgtgccagcctctctggcaaagcggtgatggaagggcacgtggacagaagctctcagcctacagcacggagaatcattaacagtgatcctgtagatttggacctagtggaagaaaacacctttgtaggtcccccacccgctacatccatcagtggaggctctgtttatccaacagagcctaattgtagctcagccacattcacaggtaacctcagcttcttggcaagtctacagctgtcttcagatgttagctccctctccccaacaagcaataatagtaggagcagcagcagcagcagcaatcaaaaagcacccttgccatgcccacagcaagatgtatctcgcccaccacaggccttgccgtgccccctgcgacctttgccatgcccacngagagctcaccatgtccaccac

SEQ ID NO: 63380 - DNA, 303 bp, Homo sapiens
gacacacccaggaacaatactttacatccttcaatccaatcaagttgacactcaatattaccatcacacctgataactctctgatttgttcaaatagattttttttattttattgagtttgtttttatttttcttacctggaggcttgtctgacccaccattgctgagagcaaaaattcacatacggttttaaatttttttcacagacactaatgtattttcctgatttaaaaagtcagcctatttgagcaagcagggtgaaaagcagtatactcactatgcaaatatgaaaacagaattagt

SEQ ID NO: 63381 - DNA, 436 bp, Homo sapiens
aattttcttaagggattgatttactcttattaaattataagagattttaatttttttaacccaaagttcaactgtttactcgctgttttctctccccttcaactcgtttgcagctcatataagttattttccttaaattctatttgttatggtctgatgctaacaatgttttctaaaagtctaaagaaaatgttttcttccaaagtaatattctgtgcagtgtagaaggtcttttcttttgcctttgggtaattgacctaacagattttatggcttattgaaacaatgttatgctgttattattaatttttgatttgctcaggaaaaagtatctgagataattttttaaaattaaggttattacatccatgtatatttctgtaggtgctttgaaagtacctgtgacattaagttacaggcctttgactcctgggtc

SEQ ID NO: 63382 - DNA, 148 bp, Homo sapiens
tagtcttgtttcgcttttatttttatttttagaggagtaagaaaactggataaactctatgaactactataaattatagctggcagacgagaaagagcaagaaaaagaactaagaagcataactaagaacttcagtagtacaatttta

SEQ ID NO: 63383 - DNA, 866 bp, Homo sapiens
cttggaaccctctggctcagaggcaggcactgaaggcttctggaggcagaacctgtgcatagctcccacacagccctggccttgctcagctgttgatttgtgggtagctgctgccctctgctggacagagtgaaacgtgctctccttccatttcctaggactcttgtctccctatcacaagttccatttccttcctaggactcttgtctccctatcaccagttccatttccttcctaggactcctgtctccctatcacaagttcacaaactcacagagcagaaaagggccagaaggtcggcaggcccagccccattattcagaggcggatactgaggccagagaggggaaaggccttgtttaaggtcacacagatagttagagtaggagctgggactagaaatgggtggccctccctcagcagggtctggaggtgtggggtcctggaggagaaagagaaggcaccttactcctagtagagacaccagaaggctggtgggcagtgtaaccaggaccaccaggtcagcccacccacgtaggaaaatcccctatcaggctgtgtgagtgatcccagctttgcctaactccacaatcctaaaaagtcacctataaacagaatctttgtcagtcagattattttcccctctaccaccttctgtgtcccagatgcagtttttgtggctgttaccaatttcatcatacaaggcccagggagagtatagtagggcaagcgcattgctctaacaaatagaccccaaatgtataataactcaaagaaaagggaagtttactttttgctcgttaatagttcagtgagcctagcagaaaagggaggggaatggccgggcgccgtagctaaagcctgta

SEQ ID NO: 63384 - DNA, 804 bp, Homo sapiens
cttccatggcctctgccgcgctggagctgctgcggggctgtcctgccagcttgtgctcccgccccgaagcgtcctcctccactggcgacacacgcactgaagcccgagtcttcccgctgggtagttgttttggtcttgcacccaaggagggatttcttgcgcctcttgttccctcagttatttcataaaccaggaccgcaactatactgtcgtgtagcgcggccaccccacagcggtccctgacgttaacccttgccgtgactgctagaagacactggtggagtgtgaattgatgaccaaggcatggcagagcctctctcatctttataatcagttcagcggcggcctccactacagggaactcccagccagtcccgaggcctagggacatccagggagaaacgtggcggtggtaaagggcttgcgcagctcctgaagataaataagactttgggttgctgttgtttttgagacaagggtctcactatgttgtccaggcagcactcgagctcctggcctcaagccatcttttctggcttcagccttctgagtagctgggactacaggaccatgccaccgaatcaggctttaagactttttaatgaccctttcaaatttctgagtcactcccagcattttaggaagccaagtgagaaggatagcttgaggccaggagttcgagaccaacctgggcaacagattcctgagtcaccattgacaagaaactttgaatgaagttgatgatacaaaatattaacatctttttttttacaaccattaaaaatttaccacaggtgaaactaa

SEQ ID NO: 63385 - DNA, 280 bp, Homo sapiens
tctatgcccgggacctcctaactcttctccactttgcatccgaagcaagcatttaaaagcacatacttaaatacatgacttccctccgtggcaggctcctttggttgctgagccagcccctatttcaactcttctctttgcttcctccacctggaagagctaaatgctcattgtctcctgcatggtcaagtgtgcctatgggactaagtgttgacccatgagatgggtggtttcttaggaagactgtttttccctgattaaagggacatattcagctgtc

SEQ ID NO: 63386 - DNA, 792 bp, Homo sapiens
  misc_feature (379)..(379): n is a, c, g, or t
tcttcttttgcgtcgccagccgagccacatcgctcagacaccatggggaaggtgaaggtcggagtcaacggatttggtcgtattgggcgcctggtcaccagggctgcttttaactctggtaaagtggatattgttgccatcaatgaccccttcattgacctcaactacatggtttacatgttccaatatgattccacccatggcaaattccatggcaccgtcaaggctgagaacgggaagcttgtcatcaatggaaatcccatcaccatcttccaggagcgagatccctccaaaatcaagtggggcgatgctggcgctgagtacgtcatggagtccactggcgtcttcaccaaccccccaattggggcaaagaaaggcntttggggggggggcggggggggctcatttgcaggggggagccaaaaaaggggttccaaatttcccaaatttcatcatctctgccccctctgctgatgcccccatgttcgtcatgggtgtgaaccatgagaagtatgacaacaacctcaagatcatcagcaatgcctcctgcaccaccaactgcttagcacccctggccaaggtcatccatgacaactttggtatcgtggaaggactcatgaccacagtccatgccatcactgccacccagaagactgtggatggcccctccgggaaactgtggcgtgatggccgacggggctctccagaacatcatccctgcctctactggcactgcgaaggctatgggcaaggtcatccctgagctgaacgggaagctcactggcatggcct

SEQ ID NO: 63387 - DNA, 507 bp, Homo sapiens
tcttcttttgcgtcgccagccgagccacatcgctcagacaccatggggaaggtgaaggtcggagtcaacggatttggtcgtattgggcgcctggtcaccagggctgcttttaactctggtaaagtggatattgttgccatcaatgaccccttcattgaccctcaacgaccactttgtcaagctcatttcctggtatgacaacgaatttggctacagcaacagggtggtggacctcatggcccacatggcctccaaggagtaagacccctggaccaccagccccagcaagagcatcctgggctacactgagcaccaggtggtctcctctgacttcaacagcgacacccactcctccacctttgacgctggggctggcattgccctcaacgaccacactgaatctcccctcctcacagtttccatgtagaccccttgaagaggggaggggcctagggagccgcaccttgtcatgtaccatcaataaagtaccctgtgctcaaccaaaaa

SEQ ID NO: 63388 - DNA, 740 bp, Homo sapiens
tcttcttttgcgtcgccagccgagccacatcgctcagacaccatggggaaggtgaaggtcggagtcaacggatttggtcgtattgggcgcctggtcaccagggctgcttttaactctggtaaagtggatattgttgccatcaatgaccccttcattgacctcaactacatggtttacatgttccaatatgattccacccatggcaaattccatggcaccgtcaaggctgagaacgggaagcttgtcatcaatggaaatcccatcaccatcttccaggagcgagatccctccaaaatcaagtggggcgatgctggcgctgagtacgtcatggagtccactggcgtcttcaccaccatggagaaggctgggcctcatttgcaggggggagccaaaagggtcatcatctctgccccctctgctgatgcccccatgttcgtcatgggtgtgaaccatgagaagtatgacaacaacctcaagatcatcagcaatgcctcctgcaccaccaactgcttagcacccctggccaaggtcatccatgacaactttggtatcgtggaaggactcatgaccacagtccatgccatcactgccacccagaagactgtggatggcccctccgggaaactgtggcgtgatggccgacggggctctccagaacatcatccctgcctctactggcactgcgaaggctatgggcaaggtcatccctgagctgaacgggaagctcactggcatggcct

SEQ ID NO: 63389 - DNA, 783 bp, Homo sapiens
tcttcttttgcgtcgccagccgagccacatcgctcagacaccatggggaaggtgaaggtcggagtcaacggatttggtcgtattgggcgcctggtcaccagggctgcttttaactctggtaaagtggatattgttgccatcaatgaccccttcattgacctcaactacatggtttacatgttccaatatgattccacccatggcaaattccatggcaccgtcaaggctgagaacgggaagcttgtcatcaatggaaatcccatcaccatcttccagggaagcgggaagaatcccttccaaatctcaatgtgggcgcaagtgcgtgggcgcgtagatatagctgtcaggagagatgctcacatgtggatgtcatatcacaccacacgagtggacgagaggctgggaggcatcacatctgcgaggggagagacgccaagagaagatcatctctgccccctctgctgatgcccccatgttcgtcatgggtgtgaaccatgagaagtatgacaacaacctcaagatcatcagcaatgcctcctgcaccaccaactgcttagcacccctggccaaggtcatccatgacaactttggtatcgtggaaggactcatgaccacagtccatgccatcactgccacccagaagactgtggatggcccctccgggaaactgtggcgtgatggccgacggggctctccagaacatcatccctgcctctactggcactgcgaaggctatgggcaaggtcatccctgagctgaacgggaagctcactggcatggcct

SEQ ID NO: 63390 - DNA, 467 bp, Homo sapiens
tcttcttttgcgtcgccagccgagccacatcgctcagacaccatggggaaggtgaaggtcggagtcaacggatttggtcgtattgggcgcctggtcaccagggctgcttttaactctggtaaagtggatattgttgccatcaatgaccccttcattgaccctcaacgaccactttgtcaagctcatttcctggtatgacaacgaatttggctacagcaacagggtggtggacctcatggcccacatggcctccaaggagtaagacccctggaccaccagccccagcaagagcacaagaggaagagagagaccctcactgctggggagtccctgccacactcagtcccccaccacactgaatctcccctcctcacagtttccatgtagaccccttgaagaggggaggggcctagggagccgcaccttgtcatgtaccatcaataaagtaccctgtgctcaaccaaaaa

SEQ ID NO: 63391 - DNA, 2548 bp, Homo sapiens
gggaggagaagcctgggtgccccccactgataagcaggctccacccagaggccagtcctgtgtgtctggggacaaggcgaaagagcagcagaagtgccccttctccaggatcaaggaactggggcggggggtgtttcctggaccccagtcctccgaatcagctcctagagtggaaccaggaaggattctggagccacagaagatagacagatggaaggtggggaccaaagtgaggaagagccgagggaacgcagccaggcaggtggaatgggaactctctggagccaagagagcactccagaagagaggctgcccgtggaagggagcaggccatgggcagtggccaggcgggtgctgacagctatcctgattttgggcctgctcctttgtttttctgtgcttttgttctacaacttccagaactgtggccctcgcccctgtgagacatctgtgtgtttggatctccgggatcattacctggcctctgggaacacaagtgtggccccctgcaccgacttcttcagctttgcctgtggaagggccaaagagaccaataattcttttcaggagcttgccacaaagaacaaaaaccgacttcggagaatactggaggtccagaattcctggcacccaggctctggggaggagaaagccttccagttctacaactcctgcatggatacacttgccattgaagctgcagggactggtcccctcagacaagttattgaggagcttggaggctggcgcatctctggtaaatggacttccttaaactttaaccgaacgctgagacttctgatgagtcagtatggccatttccctttcttcagagcctacctaggacctcatcctgcctctccacacacaccagtcatccagatagaccagccagagtttgatgttcccctcaagcaagatcaagaacagaagatctatgcccagatctttcgggaatacctgacttacctgaatcagctgggaaccttgctgggaggagacccaagcaaggtgcaagaacactcttccttgtcaatctccatcacttcacggctgttccagtttctgaggcccctggagcagcggcgggcacagggcaagctcttccagatggtcactatcgaccagctcaaggaaatggcccccgccatcgactggttgtcctgcttgcaagcgacattcacaccgatgtccctgagcccttctcagtccctcgtggtccatgacgtggaatatttgaaaaacatgtcacaactggtggaggagatgctgctaaagcagagggactttctgcagagccacatgatcttagggctggtggtgaccctttctccagccctggacagtcaattccaggaggcacgcagaaagctcagccagaaactgcgggaactgacagagcaaccacccatgcctgcccgcccacgatggatgaagtgcgtggaggagacaggcacgttcttcgagcccacgctggcggctttgtttgttcgtgaggcctttggcccgagcacccgaagtgctgccatgaaattattcactgcgatccgggatgccctcatcactcgcctcagaaaccttccctggatgaatgaggagacccagaacatggcccaggacaaggttgctcaactgcaggtggagatgggggcttcagaatgggccctgaagccagagctggcccgacaagaatacaacgatatacagcttggatcgagcttcctgcagtctgtcctgagctgtgtccggtccctccgagctagaattgtccagagcttcttgcagcctcacccccaacacaggtggaaggtgtccccttgggacgtcaatgcttactattcggtatctgaccatgtggtagtctttccagctggactcctccaacccccattcttccaccctggctatcccagagccgtgaactttggcgctgctggcagcatcatggcccacgagctgttgcacatcttctaccagctcttactgcctgggggctgcctcgcctgtgacaaccatgccctccaggaagctcacctgtgcctgaagcgccattatgctgcctttccattacctagcagaacctccttcaatgactccctcacattcttagagaatgctgcagacgttggggggctagccatcgcgctgcaggcatacagcaagaggctgttacggcaccatggggagactgtcctgcccagcctggacctcagcccccagcagatcttctttcgaagctatgcccaggtgatgtgtaggaagcccagcccccaggactctcacgacactcacagccctccacacctccgagtccacgggcccctcagcagcaccccagcctttgccaggtatttccgctgtgcacgtggtgctctcttgaacccctccagccgctgccagctctggtaacttggttaccaaagatgccacagcacagaaatatcgaccaacacctccctggtcacatccatggaatcagagcaagatttcctttctgcttctgttccaaaaataaaagctggcacttggcttccgcttgtctcttaat

SEQ ID NO: 63392 - DNA, 941 bp, Homo sapiens
  misc_feature (925)..(925): n is a, c, g, or t
gggaggagaagcctgggtgccccccactgataagcaggctccacccagaggccagtcctgtgtgtctggggacaaggcgaaagagcagcagaagtgccccttctccaggatcaaggaactggggcggggggtgtttcctggaccccagtcctccgaatcagctcctagagtggaaccaggaaggattctggagccacagaagatagacagatggaaggtggggaccaaagtgaggaagagccgagggaacgcagccaggcaggtggaatgggaactctctggagccaagagagcactccagaagagaggctgcccgtggaagggagcaggccatgggcagtggccaggcgggtgctgacagctatcctgattttgggcctgctcctttgtttttctgtgcttttgttctacaacttccagaactgtggccctcgcccctgtgagacatctgtgtgtttggatctccgggatcattacctggcctctgggaacacaagtgtggccccctgcaccgacttcttcagctttgcctgtggaagggccaaagagaccaataattcttttcaggagcttgccacaaagaacaaaaaccgacttcggagaatactggaggtccagaattcctggcacccaggctctggggaggagaaagccttccagttctacaactcctgcatggatacacttgccattgaagctgcagggactggtcccctcagacaagttattgaggagcttggaggctggcgcatctctggtaaatggacttccttaaactttaaccgaacgctgagacttctgatgagtcagtatggccatttccctttcttcagagcctacctaggacctcatcctgcctctccacacacaccagtcatccagatagacagcaagttgtgtcctaacagatagacgagtttgcaanttcgatctgctactat

SEQ ID NO: 63393 - DNA, 433 bp, Homo sapiens
  misc_feature (17)..(17): n is a, c, g, or t
  misc_feature (26)..(26): n is a, c, g, or t
aaaagctcccatgttgnccttggggnaatttgaatccccctggttcccctctttgtctgctgtccctgatcaccccttgtcaccgggtcagctttgtcctgtggaccctcccccttcaatgacctctcccaggtgatgtgtaggaagcccagcccccaggactctcacgacactcacagccctccacacctccgagtccacgggcccctcagcagcaccccagcctttgccaggtatttccgctgtgcacgtggtgctctcttgaacccctccagccgctgccagctctggtaacttggttaccaaagatgccacagcacagaaatatcgaccaacacctccctggtcacatccatggaatcagagcaagatttcctttctgcttctgttccaaaaataaaagctggcacttggcttccgcttgtctcttaat

SEQ ID NO: 63394 - DNA, 1731 bp, Homo sapiens
catccgccatgctccctgcttctctccagtctctcttgtgcccagatagaccagccagagtttgatgttcccctcaagcaagatcaagaacagaagatctatgcccagatctttcgggaatacctgacttacctgaatcagctgggaaccttgctgggaggagacccaagcaaggtgcaagaacactcttccttgtcaatctccatcacttcacggctgttccagtttctgaggcccctggagcagcggcgggcacagggcaagctcttccagatggtcactatcgaccagctcaagctttgtgtccctcctctaaggaaatggcccccgccatcgactggttgtcctgcttgcaagcgacattcacaccgatgtccctgagcccttctcagtccctcgtggtccatgacgtggaatatttgaaaaacatgtcacaactggtggaggagatgctgctaaagcagagggactttctgcagagccacatgatcttagggctggtggtgaccctttctccagccctggacagtcaattccaggaggcacgcagaaagctcagccagaaactgcgggaactgacagagcaaccacccatgcctgcccgcccacgatggatgaagtgcgtggaggagacaggcacgttcttcgagcccacgctggcggctttgtttgttcgtgaggcctttggcccgagcacccgaagtgctgccatgaaattattcactgcgatccgggatgccctcatcactcgcctcagaaaccttccctggatgaatgaggagacccagaacatggcccaggacaaggttgctcaactgcaggtggagatgggggcttcagaatgggccctgaagccagagctggcccgacaagaatacaacgatatacagcttggatcgagcttcctgcagtctgtcctgagctgtgtccggtccctccgagctagaattgtccagagcttcttgcagcctcacccccaacacaggtggaaggtgtccccttgggacgtcaatgcttactattcggtatctgaccatgtggtagtctttccagctggactcctccaacccccattcttccaccctggctatcccagagccgtgaactttggcgctgctggcagcatcatggcccacgagctgttgcacatcttctaccagctcttactgcctgggggctgcctcgcctgtgacaaccatgccctccaggaagctcacctgtgcctgaagcgccattatgctgcctttccattacctagcagaacctccttcaatgactccctcacattcttagagaatgctgcagacgttggggggctagccatcgcgctgcaggcatacagcaagaggctgttacggcaccatggggagactgtcctgcccagcctggacctcagcccccagcagatcttctttcgaagctatgcccaggtgatgtgtaggaagcccagcccccaggactctcacgacactcacagccctccacacctccgagtccacgggcccctcagcagcaccccagcctttgccaggtatttccgctgtgcacgtggtgctctcttgaacccctccagccgctgccagctctggtaacttggttaccaaagatgccacagcacagaaatatcgaccaacacctccctggtcacatccatggaatcagagcaagatttcctttctgcttctgttccaaaaataaaagctggcacttggcttccgcttgtctcttaat

SEQ ID NO: 63395 - DNA, 1497 bp, Homo sapiens
tctttttctcacacccaaggggaagccctttccccttccttctcttttccttttccccctcagctttgtgtccctcctctaaggaaatggcccccgccatcgactggttgtcctgcttgcaagcgacattcacaccgatgtccctgagcccttctcagtccctcgtggtccatgacgtggaatatttgaaaaacatgtcacaactggtggaggagatgctgctaaagcagagggactttctgcagagccacatgatcttagggctggtggtgaccctttctccagccctggacagtcaattccaggaggcacgcagaaagctcagccagaaactgcgggaactgacagagcaaccacccatgcctgcccgcccacgatggatgaagtgcgtggaggagacaggcacgttcttcgagcccacgctggcggctttgtttgttcgtgaggcctttggcccgagcacccgaagtgctgccatgaaattattcactgcgatccgggatgccctcatcactcgcctcagaaaccttccctggatgaatgaggagacccagaacatggcccaggacaaggttgctcaactgcaggtggagatgggggcttcagaatgggccctgaagccagagctggcccgacaagaatacaacgatatacagcttggatcgagcttcctgcagtctgtcctgagctgtgtccggtccctccgagctagaattgtccagagcttcttgcagcctcacccccaacacaggtggaaggtgtccccttgggacgtcaatgcttactattcggtatctgaccatgtggtagtctttccagctggactcctccaacccccattcttccaccctggctatcccagagccgtgaactttggcgctgctggcagcatcatggcccacgagctgttgcacatcttctaccagctcttactgcctgggggctgcctcgcctgtgacaaccatgccctccaggaagctcacctgtgcctgaagcgccattatgctgcctttccattacctagcagaacctccttcaatgactccctcacattcttagagaatgctgcagacgttggggggctagccatcgcgctgcaggcatacagcaagaggctgttacggcaccatggggagactgtcctgcccagcctggacctcagcccccagcagatcttctttcgaagctatgcccaggtgatgtgtaggaagcccagcccccaggactctcacgacactcacagccctccacacctccgagtccacgggcccctcagcagcaccccagcctttgccaggtatttccgctgtgcacgtggtgctctcttgaacccctccagccgctgccagctctggtaacttggttaccaaagatgccacagcacagaaatatcgaccaacacctccctggtcacatccatggaatcagagcaagatttcctttctgcttctgttccaaaaataaaagctggcacttggcttccgcttgtctcttaat

SEQ ID NO: 63396 - DNA, 1201 bp, Homo sapiens
ccttcctttctccacagatcctttagttgctttagttgagctgctcctctagcagcagctccagcccaggcagctccttggggccaagcccttttccaagggtcagaagctgtgggcagggccaggctgaggcctctcctgatcctgtccccctgtccctggacctcactcccacaggccatgaaattattcactgcgatccgggatgccctcatcactcgcctcagaaaccttccctggatgaatgaggagacccagaacatggcccaggacaaggttgctcaactgcaggtggagatgggggcttcagaatgggccctgaagccagagctggcccgacaagaatacaacgatatacagcttggatcgagcttcctgcagtctgtcctgagctgtgtccggtccctccgagctagaattgtccagagcttcttgcagcctcacccccaacacaggtggaaggtgtccccttgggacgtcaatgcttactattcggtatctgaccatgtggtagtctttccagctggactcctccaacccccattcttccaccctggctatcccagagccgtgaactttggcgctgctggcagcatcatggcccacgagctgttgcacatcttctaccagctcttactgcctgggggctgcctcgcctgtgacaaccatgccctccaggaagctcacctgtgcctgaagcgccattatgctgcctttccattacctagcagaacctccttcaatgactccctcacattcttagagaatgctgcagacgttggggggctagccatcgcgctgcaggcatacagcaagaggctgttacggcaccatggggagactgtcctgcccagcctggacctcagcccccagcagatcttctttcgaagctatgcccaggtgatgtgtaggaagcccagcccccaggactctcacgacactcacagccctccacacctccgagtccacgggcccctcagcagcaccccagcctttgccaggtatttccgctgtgcacgtggtgctctcttgaacccctccagccgctgccagctctggtaacttggttaccaaagatgccacagcacagaaatatcgaccaacacctccctggtcacatccatggaatcagagcaagatttcctttctgcttctgttccaaaaataaaagctggcacttggcttccgcttgtctcttaat

SEQ ID NO: 63397 - DNA, 677 bp, Homo sapiens
tgccatgctcctgggagctgattcagtctgtggtaccacccacatcctcacctaggcagcaccaaccctatgttctcttgctgtatgttctcttgtcccattttcaacagtactgcctgggggctgcctcgcctgtgacaaccatgccctccaggaagctcacctgtgcctgaagcgccattatgctgcctttccattacctagcagaacctccttcaatgactccctcacattcttagagaatgctgcagacgttggggggctagccatcgcgctgcaggcatacagcaagaggctgttacggcaccatggggagactgtcctgcccagcctggacctcagcccccagcagatcttctttcgaagctatgcccaggtgatgtgtaggaagcccagcccccaggactctcacgacactcacagccctccacacctccgagtccacgggcccctcagcagcaccccagcctttgccaggtatttccgctgtgcacgtggtgctctcttgaacccctccagccgctgccagctctggtaacttggttaccaaagatgccacagcacagaaatatcgaccaacacctccctggtcacatccatggaatcagagcaagatttcctttctgcttctgttccaaaaataaaagctggcacttggcttccgcttgtctcttaat

SEQ ID NO: 63398 - DNA, 2450 bp, Homo sapiens
gggaggagaagcctgggtgccccccactgataagcaggctccacccagaggccagtcctgtgtgtctggggacaaggcgaaagagcagcagaagtgccccttctccaggatcaaggaactggggcggggggtgtttcctggaccccagtcctccgaatcagctcctagagtggaaccaggaaggattctggagccacagaagatagacagatggaaggtggggaccaaagtgaggaagagccgagggaacgcagccaggcaggtggaatgggaactctctggagccaagagagcactccagaagagaggctgcccgtggaagggagcaggccatgggcagtggccaggcgggtgctgacagctatcctgattttgggcctgctcctttgtttttctgtgcttttgttctacaacttccagaactgtggccctcgcccctgtgagacatctgtgtgtttggatctccgggatcattacctggcctctgggaacacaagtgtggccccctgcaccgacttcttcagctttgcctgtggaagggccaaagagaccaataattcttttcaggagcttgccacaaagaacaaaaaccgacttcggagaatactggaggtccagaattcctggcacccaggctctggggaggagaaagccttccagttctacaactcctgcatggatacacttgccattgaagctgcagggactggtcccctcagacaagttattgaggagcttggaggctggcgcatctctggtaaatggacttccttaaactttaaccgaacgctgagacttctgatgagtcagtatggccatttccctttcttcagagcctacctaggacctcatcctgcctctccacacacaccagtcatccagatagaccagccagagtttgatgttcccctcaagcaagatcaagaacagaagatctatgcccagatctttcgggaatacctgacttacctgaatcagctgggaaccttgctgggaggagacccaagcaaggtgcaagaacactcttccttgtcaatctccatcacttcacggctgttccagtttctgaggcccctggagcagcggcgggcacagggcaagctcttccagatggtcactatcgaccagctcaaggaaatggcccccgccatcgactggttgtcctgcttgcaagcgacattcacaccgatgtccctgagcccttctcagtccctcgtggtccatgacgtggaatatttgaaaaacatgtcacaactggtggaggagatgctgctaaagcagagggactttctgcagagccacatgatcttagggctggtggtgaccctttctccagccctggacagtcaattccaggaggcacgcagaaagctcagccagaaactgcgggaactgacagagcaaccacccatgcctgcccgcccacgatggatgaagtgcgtggaggagacaggcacgttcttcgagcccacgctggcggctttgtttgttcgtgaggcctttggcccgagcacccgaagtgctgccatgaaattattcactgcgatccgggatgccctcatcactcgcctcagaaaccttccctggatgaatgaggagacccagaacatggcccaggacaaggttgctcaactgcaggtggagatgggggcttcagaatgggccctgaagccagagctggcccgacaagaatacaacgatatacagcttggatcgagcttcctgcagtctgtcctgagctgtgtccggtccctccgagctagaattgtccagagcttcttgcagcctcacccccaacacaggtggaaggtgtccccttgggacgtcaatgcttactattcggtatctgaccatgtggtagtctttccagctggactcctccaacccccattcttccaccctggctatcccagaacctccttcaatgactccctcacattcttagagaatgctgcagacgttggggggctagccatcgcgctgcaggcatacagcaagaggctgttacggcaccatggggagactgtcctgcccagcctggacctcagcccccagcagatcttctttcgaagctatgcaggtaggcagcggccacctcccgccacagcttgctttatgtcagttgaacgccttattactgaagctcatggaagtcccctcttcagacactccgtcaaataccccaaaccctcttctgcagatgtcctcactgttatcttttctcttccctccctaccccttggaatcacccctcagatgactacaggttcttctacctaattcagcacccccacaactcaaaaggtagaaaaaactctattcccaagttcctccaggagaggaggagaccaacttttttttcctctcatacccccaaaatacagatgccttaaaaatgagcctgtggttgggcacagtggctcacacctgtaatcctggcactctaggag

SEQ ID NO: 63399 - DNA, 2383 bp, Homo sapiens
gggaggagaagcctgggtgccccccactgataagcaggctccacccagaggccagtcctgtgtgtctggggacaaggcgaaagagcagcagaagtgccccttctccaggatcaaggaactggggcggggggtgtttcctggaccccagtcctccgaatcagctcctagagtggaaccaggaaggattctggagccacagaagatagacagatggaaggtggggaccaaagtgaggaagagccgagggaacgcagccaggcaggtggaatgggaactctctggagccaagagagcactccagaagagaggctgcccgtggaagggagcaggccatgggcagtggccaggcgggtgctgacagctatcctgattttgggcctgctcctttgtttttctgtgcttttgttctacaacttccagaactgtggccctcgcccctgtgagacatctgtgtgtttggatctccgggatcattacctggcctctgggaacacaagtgtggccccctgcaccgacttcttcagctttgcctgtggaagggccaaagagaccaataattcttttcaggagcttgccacaaagaacaaaaaccgacttcggagaatactggaggtccagaattcctggcacccaggctctggggaggagaaagccttccagttctacaactcctgcatggatacacttgccattgaagctgcagggactggtcccctcagacaagttattgaggagcttggaggctggcgcatctctggtaaatggacttccttaaactttaaccgaacgctgagacttctgatgagtcagtatggccatttccctttcttcagagcctacctaggacctcatcctgcctctccacacacaccagtcatccagatagaccagccagagtttgatgttcccctcaagcaagatcaagaacagaagatctatgcccagatctttcgggaatacctgacttacctgaatcagctgggaaccttgctgggaggagacccaagcaaggtgcaagaacactcttccttgtcaatctccatcacttcacggctgttccagtttctgaggcccctggagcagcggcgggcacagggcaagctcttccagatggtcactatcgaccagctcaaggaaatggcccccgccatcgactggttgtcctgcttgcaagcgacattcacaccgatgtccctgagcccttctcagtccctcgtggtccatgacgtggaatatttgaaaaacatgtcacaactggtggaggagatgctgctaaagcagagggactttctgcagagccacatgatcttagggctggtggtgaccctttctccagccctggacagtcaattccaggaggcacgcagaaagctcagccagaaactgcgggaactgacagagcaaccacccatgcctgcccgcccacgatggatgaagtgcgtggaggagacaggcacgttcttcgagcccacgctggcggctttgtttgttcgtgaggcctttggcccgagcacccgaagtgctgccatgaaattattcactgcgatccgggatgccctcatcactcgcctcagaaaccttccctggatgaatgaggagacccagaacatggcccaggacaaggttgctcaactgcaggtggagatgggggcttcagaatgggccctgaagccagagctggcccgacaagaatacaacgatatacagcttggatcgagcttcctgcagtctgtcctgagctgtgtccggtccctccgagctagaattgtccagagcttcttgcagcctcacccccaacacaggtggaaggtgtccccttgggacgtcaatgcttactattcggtatctgaccatgtggtagtctttccagctggactcctccaacccccattcttccaccctggctatcccagaacctccttcaatgactccctcacattcttagagaatgctgcagacgttggggggctagccatcgcgctgcaggcatacagcaagaggctgttacggcaccatggggagactgtcctgcccagcctggacctcagcccccagcagatcttctttcgaagctatgcccaggtgatgtgtaggaagcccagcccccaggactctcacgacactcacagccctccacacctccgagtccacgggcccctcagcagcaccccagcctttgccaggtatttccgctgtgcacgtggtgctctcttgaacccctccagccgctgccagctctggtaacttggttaccaaagatgccacagcacagaaatatcgaccaacacctccctggtcacatccatggaatcagagcaagatttcctttctgcttctgttccaaaaataaaagctggcacttggcttccgcttgtctcttaat

SEQ ID NO: 63400 - DNA, 458 bp, Homo sapiens
cctggggtatatgtgtgggtctcttttgtctccatagggactttctgcagagccacatgatcttagggctggtggtgaccctttctccagccctggacagtcaattccaggaggcacgcagaaagctcagccagaaactgcgggaactgacagagcaaccacccatggtgaggagaggagcgggtgtatttgcccagatactcgaaaggagtatctactcttttgaggggtaaatgtcggcatctctctctcagggagggggccgtgatggtagatgcccctccatgtcttggctttccatagaagcaggcaagttggacagacaaagtttaacttgaaaaccaagatgccacgtgccagaccttcaggcacacatctcccagcctgactacctctctggcttcttgctgggtgtttgagctcaaatataaaactctgatattatcaaaactgccctt

SEQ ID NO: 63401 - DNA, 419 bp, Homo sapiens
ggtaaaaagtttaagacacatactatctagaatgattggattccagaaatcccagagcaagctttcataagagatctgcctactcaaagccccagggatgcctaactcaataatcttctttgtctttgggaaaggtcctgtgctgttatgttctgtgttctcacttcactgtggaagctgctctcaaagtataagaatagaccagccatgaaaagtgaaatagttcagctatacttgagcatcctgaaacacttagaaatctattcttaaccagcagcatctgttccaaggcagcaggtctagcattgccaatgccctactgagcagccttgagctttggtttttagaagactagggaatgtatttgccacacctcagacttgggaaatgaagatagtactagtgagccacatcctccc

SEQ ID NO: 63402 - DNA, 280 bp, Homo sapiens
tgacctgaaaacaggaccagtaaccccagatcaaccgccagccacaccctgggcaccatctcccccagaagtcctttggtgccccagggccagcacctgctaaggttctccagcccctcagtgctccctggggaatagcagctcatcaggggtgccgtccaatccccaatggggtttcctgtgcggctctggagggctctggttccctcggtctccagagaaacatgtgaggacagcgatggttttgcagtttctggcgccgcccgcaacacaactccag

SEQ ID NO: 63403 - DNA, 173 bp, Homo sapiens
cagcatgaaactgcttttcagtgggataatttcacaatctccttgcagttttaaaattctaccatctgttagctaagcactgatactgtgtttgatttttctactctagttaaacagctcagcttagtgttccttaaatataccttatatttttccaacttcatccagtttct

SEQ ID NO: 63404 - DNA, 685 bp, Homo sapiens
attaggttgattaggggtaaggggtgtaacagaatatacttgcattttttttttctgaattgaggataaataatttagtttctcaactctaattataagggttgctgtaggatttgaatagatgttctttatcaagttgaaagtattaacttctattcctaccttgcagagaatgtttattatgaatgggattttgtcaaatgctttttctgcctcaattaaaatgttcgtgtgaatttcttttttagcgtattgatatgctagattacatttatttgtaaagaataaatgtttagacagatttttcccaagagatctttctgtatgttaagacattgcattagtggaatagagcttacttggctgtagtgtgtagtactttctatgcagtttgtttgtatttatttcgctaagtagatctcagctttaattttctgtattttcctgtccctgcagatttcagtggcagtttaccctgcaacctcagttcttagatgggtccaagaaaagttgttgaattttacagctttttcttgttataaagatgtaactaccaaacactttatatgttggagttaaaatcagaagccccctgctaccccatccagttaaaaaaacaaaaacaaaaacaaaacaaagctagtatcttagtcctcatgaaataatagtgataccctcctgcaaa

SEQ ID NO: 63405 - DNA, 93 bp, Homo sapiens
  misc_feature (49)..(49): n is a, c, g, or t
gagaccaccaagctcatcctgcagttcctggccaccatcagtggccagnattcgtggattgagcagcaggtcctggaagccaaccccatcctg

SEQ ID NO: 63406 - DNA, 441 bp, Homo sapiens
gggagtcagccagacccccatcctgacaaggcttgtggaactgctgactcaggatgtcggggttcaggctgggtgaccacgtgtggctggagcctccttccacccacaagaccagcgtggccatcgggggcatcatcaaagaggcaaagccaggcaaagtcttggttgaagatgacgagggcaaggaacactggatccgagcagaggactttggtgtcctcagtcccatgcaccccaactcagtccagggtgtggacgacatgatccgcctgggggacctgaacgaggcaggcatggtgcacaacctcctgatccgctaccagcagcacaagatctatacatacacaggctccatcctggtggccgtcaacccgttccaggtgctgccgctctacaccctggagcaggtacagctctacccacacacctgaccatatgggc

SEQ ID NO: 63407 - DNA, 571 bp, Homo sapiens
ctaaagacatgaggcttctgggggcagagataaaggactttattattttcagcacagcaggcagcatgaacttaacattcctattaattccctttgctcccaagtgccaagaagatgacatgaaacagtccagtgcagtgaattcttataattctgcatacaagctggactttctcatacaaaaagcagggctcattcacccgacacagtttccagttctatacctcaatgtggttgatccagatatctgccttatataaattcctcctggtaaccacctccctatgggccatctacatatggcctacctgactgaccccccaaccctcataccgcacatggactacacagacatgccacagtgactatctctcagtcactgtgtgacctcctcaatgcatgcctgcttgctttaaacccaccaactaaaactctgtttggataatgccctggacccaataaaggcgttggcccatgggtccctttctctctcttcctgacctccctgtgtggtgttcaggtatgctgtgtacccctaggacttgtaagtaataaaatttttatttccatc

SEQ ID NO: 63408 - DNA, 1490 bp, Homo sapiens
tttacaaagggctcagtcccttcggggaggcttctggtgaaggaggatcgctagaaccaagctgtcctcttaagctagttgcagcagcccctcctcccagccacctccgccaatctctcactcacctttggctcctgcccttagggttacctgggttgccaagccttgtctgagatgatccagttttacctggaggaggtgatgccccaagctgagaaccaagacccagacatcaaggcgcatgtgaactccctgggggagaacctgaagaccctcaggctgaggctacggcgctgtcatcgatttcttccctgtgaaaacaagagcaaggccgtggagcaggtgaagaatgcctttaataagctccaagagaaaggcatctacaaagccatgagtgagtttgacatcttcatcaactacatagaagcctacatgacaatgaagatacgaaactgagacatcagggtggcgactctatagactctaggacataaattagaggtctccaaaatcggatctggggctctgggatagctgacccagccccttgagaaaccttattgtacctctcttatagaatatttattacctctgatacctcaacccccatttctatttatttactgagcttctctgtgaacgatttagaaagaagcccaatattataatttttttcaatatttattattttcacctgtttttaagctgtttccatagggtgacacactatggtatttgagtgttttaagataaattataagttacataagggaggaaaaaaaatgttctttggggagccaacagaagcttccattccaagcctgaccacgctttctagctgttgagctgttttccctgacctccctctaatttatcttgtctctgggcttggggcttcctaactgctacaaatactcttaggaagagaaaccagggagcccctttgatgattaattcaccttccagtgtctcggagggattcccctaacctcattccccaaccacttcattcttgaaagctgtggccagcttgttatttataacaacctaaatttggttctaggccgggcgcggtggctcacgcctgtaatcccagcactttgggaggctgaggcgggtggatcacttgaggtcaggagttcctaaccagcctggtcaacatggtgaaaccccgtctctactaaaaatacaaaaattagccgggcatggtggcgcgcacctgtaatcccagctacttgggaggctgaggcaagagaattgcttgaacccaggagatggaagttgcagtgagctgatatcatgcccctgtactccagcctgggtgacagagcaagactctgtctcaaaaaaataaaaataaaaataaatttggttctaatagaactcagttttaactagaatttattcaattcctctgggaatgttacattgtttgtctgtcttcatagcagattttaattttgaataaataaatgtatcttattcacatc

SEQ ID NO: 63409 - DNA, 724 bp, Homo sapiens
acatcattcacctcttttaatctcaatgttttgaaagcaaagctctaagaagggcccaattgactgacaggatttcccctggcattttagaagggacaagggggctattcatccccaggctagtgtctatgagtaattcctccaggtaatttatttctccaactgaaatgatgccctcactactaatggtttcccctgttctgtcaccaatattggaaaatcagttggtgtctatttgtaggacaaggctatgtgaagggtttggtcccagtagcttccctcctcagatgcttagaagtgttcctcggtggctgtgactgacggggaggaacaggagagagaggcagaaaaggacaggctgaagaatgcctcgctcagcactgcaggagatactgtagagttctgggggaggaaggaatcccaagacctgggttgtcatccaagccttgcaaacatcttggagtgagtcctggagaaatacatttaactcccagggccatggaagcagggctcagttctctctgggagctgtgaggcaaggcatttggataaatctggcctcctcatgatgccaccagcttgtcccctaagtgtgatggacatggagctggaagccaggatcaccaacactttctcttttcttccacagcatcagggctgttggcaggtggccttggttcttcttcacagggcttcttgagtgtcctcgcaacatggcagctgt

SEQ ID NO: 63410 - DNA, 1632 bp, Homo sapiens
ctacacatcaggggcttgctcttgcaaaaccaaaccacaagacagacttgcaaaagaaggcatgcacagctcagcactgctctgttgcctggtcctcctgactggggtgagggccagcccaggccagggcacccagtctgagaacagctgcacccacttcccaggcaacctgcctaacatgcttcgagatctccgagatgccttcagcagagtgaagactttctttcaaatgaaggatcagctggacaacttgttgttaaaggagtccttgctggaggactttaagggttacctgggttgccaagccttgtctgagatgatccagttttacctggaggaggtgatgccccaagctgagaaccaagacccagacatcaaggcgcatgtgaactccctgggggagaacctgaagaccctcaggctgaggctacggcgctgtcatcgatttcttccctgtgaaaacaagagcaaggccgtggagcaggtgaagaatgcctttaataagctccaagagaaaggcatctacaaagccatgagtgagtttgacatcttcatcaactacatagaagcctacatgacaatgaagatacgaaactgagacatcagggtggcgactctatagactctaggacataaattagaggtctccaaaatcggatctggggctctgggatagctgacccagccccttgagaaaccttattgtacctctcttatagaatatttattacctctgatacctcaacccccatttctatttatttactgagcttctctgtgaacgatttagaaagaagcccaatattataatttttttcaatatttattattttcacctgtttttaagctgtttccatagggtgacacactatggtatttgagtgttttaagataaattataagttacataagggaggaaaaaaaatgttctttggggagccaacagaagcttccattccaagcctgaccacgctttctagctgttgagctgttttccctgacctccctctaatttatcttgtctctgggcttggggcttcctaactgctacaaatactcttaggaagagaaaccagggagcccctttgatgattaattcaccttccagtgtctcggagggattcccctaacctcattccccaaccacttcattcttgaaagctgtggccagcttgttatttataacaacctaaatttggttctaggccgggcgcggtggctcacgcctgtaatcccagcactttgggaggctgaggcgggtggatcacttgaggtcaggagttcctaaccagcctggtcaacatggtgaaaccccgtctctactaaaaatacaaaaattagccgggcatggtggcgcgcacctgtaatcccagctacttgggaggctgaggcaagagaattgcttgaacccaggagatggaagttgcagtgagctgatatcatgcccctgtactccagcctgggtgacagagcaagactctgtctcaaaaaaataaaaataaaaataaatttggttctaatagaactcagttttaactagaatttattcaattcctctgggaatgttacattgtttgtctgtcttcatagcagattttaattttgaataaataaatgtatcttattcacatc

SEQ ID NO: 63411 - DNA, 655 bp, Homo sapiens
agacgagtcgttttaaaaggtagctttgaaaaacaaaaaaggatttaaaattcaaagactttgggaaaattcaacttaaccaataacatgagtaacgactattactatttcctgagtccttaccatatgccaaataccgttgtacattgtacctgcttcacataaattatttcatctcattctcacaacattctgtgaagcgcgggtactttattatctatccctgtttgccagataaggaagctgagacttcatacagtgacttacaagttcggacagcctccagcaaacacaggaaacagaattcgaacccatgcagtctgcctcagagccaaagcccttggccatttttctatcctgccttccacagatcatttctgcctacagcagaggtcagaaactgacaaccagctggccttacctagccttaggtaacagtaatggctattgaacacttactatgtgtcaggattattttacacacattcatgtgttccttcatttaatcttcaaagcaactccatgaggtaggtggcagttattatccccattttacagatgagaaaactgagaccaagaggaagtaacacttcccaaatgttagcagaactaacatccaaatccagactgtctcattccagaatcccctcctctt

SEQ ID NO: 63412 - DNA, 475 bp, Homo sapiens
ggaatttaggatgactgagatttttgccatggcaactgggtagatggtgccatttagcaatataagaatattcatacagtgacttacaagttcggacagcctccagcaaacacaggaaacagaattcgaacccatgcagtctgcctcagagccaaagcccttggccatttttctatcctgccttccacagatcatttctgcctacagcagaggtcagaaactgacaaccagctggccttacctagccttaggtaacagtaatggctattgaacacttactatgtgtcaggattattttacacacattcatgtgttccttcatttaatcttcaaagcaactccatgaggtaggtggcagttattatccccattttacagatgagaaaactgagaccaagaggaagtaacacttcccaaatgttagcagaactaacatccaaatccagactgtctcattccagaatcccctcctctt

SEQ ID NO: 63413 - DNA, 448 bp, Homo sapiens
ataaattttgtagaataaaaggtgaatttgcattaaaggttcactttaatgaaggtgaaagatgagaaacacatgtttgccaagacagtactctgtactcacctaaaattcatccaccttcccattcttcctattatagtacaggaaaggtccttcctgtcaaaggcaaaatcacttatgattgtgtccccatctctcttgccttttcaaggactttgagcctatgctgccactgcttcattgtttttttttgtatgtttgttttgtcttgtttttgttttaacagcagctttattgagatataattcaagttctgccctttggagaaatactgagcaagtctttcattctctgtgtgacagccctctgaatatttgaagttgtttgttgtaacttaaggttataacagcccttagttcatttactctgcatttgttcaataaatatt

SEQ ID NO: 63414 - DNA, 691 bp, Homo sapiens
gtccataaagcgtttcacttatattcttcaaacatgatgctaatttaaattaattacttcctatgatatgttattattcctatgattttgccactgttattagttctctcaaaaatacatctagggaagaggattattttaagtaatttgattatctttctatctcttttatttatttctcatttacttaagaaattcgttccattggttggcattgatacagtaaatttgtaaatgaggagacaatataaaaaatctaaattacttgtgcttaatgactgtagcagaatgccttttctctaaatcagattgtctttcttgcagtttagtttgatagatttgcaagctatgctgcttccatgaagttagctgcgctggtaggaacgcaggcttctttgtctctggttgtagcttgcatgatcgccccattaggcagacaacgtagccggagatcacaaatcaggcccttggctgtagttgctagtgtgtggaggtgcagagcaggttggcagaaactgacctcactgggcaagggtggccatggacctgattctttaatgcactctatgtgttcaggaagccacaggccatttttgactctgggaaagaaaacaagaggaaaaaccccaccaaagtattaaccaacccctttaaggatacatctattttaaagtgaaattaatttttcagt

SEQ ID NO: 63415 - DNA, 3695 bp, Homo sapiens
caggctccaccaagaagctaggtggtttccaggcccctgccctccccttcctcccatccttgtccttctctccctcagaagcctcaggacccaacaggtggcaggcagtggacagggtgcccgccccacagtgctttccccagcaccccagagccagtcgggacaccccccgcagcccgtcctggtggctgtggaactgcactgggtggcgggcagatggtggaaggcagcttaggagacctcaccaaagagaagatggaccggctcttgctcccagctcctattaggcccggggtgggaccagaggtcataggtgcccaacggcagccaaaccaaagacactggtgtgcatggggcagcatggttgtgcacgtgggaccctggggcggacccaggagccaaactcttgaagcaccccctgggtcaggcccagcagcggagtggccagccccagtttcccattgctcctctctgcggccagggccaggtgggttcatatttacagatatgcccagccagtcctggtcggccacaccagtgtcccaaagaggagagcgcagcagagccaggggtctgttctgtagcagccacccccctgcccccactccagggcagccatgatgtgcttgggcccaccagggccttccgggctgctctcttccctgagcccggaaccggcgacgcacatgtgtcttttgttggtgtgtttgtttttttccagggaggtctaattccgaagcagtattccaggttttctctttgttttatcagtgccaagatgacctgttgtgtcatataatttaagcagagcttagcatttattttattctttagaaaacttaagtatttacttttttaaagctatttttcaaggaacctttttttgcagtattattgaatttattttctaaatcaggattgaaacaggaacttttccaggtggtgttaataagccattcaagtgccttacacagctttgaagaaactaggactgcagtgggctcggataggcccattgaggtttttagaaaagcaggatttgttttgttagggaggcatgattttggtgagatctttctggaagagttttccgcctctttgtgatgctgaacacccccaaggttctcccctccccccgctgcccaggtgactggcaggagctgcgactgccacgtagtggtgcctgggcccgacagcggggctctgggcatcccgggtgaccttggcccatctgcctgcattcccacccccttgggcctggctggatcccaggcagagggaccttgctgctgtgtgattggaacattcccaaatatcttgtgaatttgtaatcaaattggtctcattgggaaagactcttaattaagaggctcaggcaagcacagaggcagcccgtgggtctctgtctcagtctggaggcagcagggatgctgctgggagtccatggcacaggccacagcccctcaccttgccgcggtggctggcagcacgcctgccttgctctgccccatgccctgaacaggcatgagagctccacgtcccctagtgcaccctgagagggggctcacaagtgaccgatcctgggtgcctcagggagctcactgagggcgtgcaaagttgaaagtggcaaggctgggggagggtgtcgggtagagggaagagggcagggggctaggggaggactcagaggccatctgcagggccaagccacaggaagggctgagctggaggtgggcagggctgctccaggcaggtcagagcagtgcagggggaggagaggagaaagggaggaagctgggctgtgtggtccccatgaaggcattcagagtccacctgcagacagcgagagccccaggaaggtttgcacagctgtgccccaagcaccttggcctcctctcagctcgccgaggaggcacgctagagccgccttcccggtgggagccctctgtcccacagggagcggggagccagctttgctggggccctacctgcatgcccagccttacccctcattctcacagcacagatgaggttgagaccatgcagtcaatgcattgcttaaggtctcttatttacaaaaaaaaaccttaaacatagtcgctgtcattcagacattcagagaatggttggccacaaacaatgaccaagtattgcttggcttaacttgaaggcctgctgtctccttctgggggtcagggacgcagctccaccctcaccactagcccaccctgcccgtgggcataaaccttgacgaagagagagaatgattggcatctgcttttctcttttctttgctaataattctgttcctggctgccgagagtgaagtttcaccatgtggaggtttggctcctatcacctggtggtctgattcataccctagcctgaggctccactggaagatctcgcagcctcagtgtatgggaaaccctttccccaggcttgtcccagcactgccgctccccacccctgagccaggaccccagaggatgggccatgccccgtgcctggcagaggtctggtgccagcactgggagctgctccgcccttgccttggggccgagggagccctcgtccacccctgcacagcagctgggcacagaggagcgctcttccatcttgaccaggactgcaccaagaagcaccaggtgtcttcagcctccaacctccggggcgaccttctcttccagccacagtcccatgagggcccctagccagggacactggtctgtaaattgtaatcctttctccagcccagctctccacttgttccttgtgtgagctgagcaggcagtgcacctctgagtgtcccttttgtaaggcccaggggttgcactgagtctgcagaggccgcgacctcctagaacgctgtgggtgcaggtgagccggcgtgtcctggggagatgctgccagcacacaggggccctcctgctgccagcaggttggggtggttaagtcttattagtgtctattcttaaaattaagtgggctggagaagaatggagctccacatgccagcaccgtatatggaatacaaaagctggggaagcagggcctgccttacaggtgtggctgactctgagcccaggcctgcaggggtggagggcagtccctcagaatcccagaggcagtcccagcctcagaacccaggataggaaatgggtgtgtttagtggggaaagggacggggtgcagacggcagggccagtatggggccccctccctctcctctcctctcctatggtgagcccagcgtgggcaccgggccgtctcagccgtgttcccagggctgggaggacagctctggcccttcttaggcctagcctcgtcccaagctaaatgtaagccagttgggctgtgttaaaggaagcagtgtttttggttcgattctgcctctgtagctcaaggggggcagcccccagagtcctgtgcattctgccaaggctccatagctttgccaaatgcacggagctctgccattccggtgcagtgcaggccttgcgaagggtttatctgcgttcgtctcggtgggcttctcctgcatgggagttgtgttcctgtgcaagggggagctttgctccaggacaggatgactgtcttccctattcttagggacaagtcccaagatgccagaaaggcagtctcccaaggacccaccatgcagaagtgtcaataaaccacaagttctgaactctg

SEQ ID NO: 63416 - DNA, 2908 bp, Homo sapiens
caggctccaccaagaagctaggtggtttccaggcccctgccctccccttcctcccatccttgtccttctctccctcagaagcctcaggacccaacaggtggcaggcagtggacagggtgcccgccccacagtgctttccccagcaccccagagccagtcgggacaccccccgcagcccgtcctggtggctgtggaactgcactgggtggcgggcagatggtggaaggcagcttaggagacctcaccaaagagaagatggaccggctcttgctcccagctcctattaggcccggggtgggaccagaggtcataggtgcccaacggcagccaaaccaaagacactggtgtgcatggggcagcatggttgtgcacgtgggaccctggggcggacccaggagccaaactcttgaagcaccccctgggtcaggcccagcagcggagtggccagccccagtttcccattgctcctctctgcggccagggccaggtgggttcatatttacagatatgcccagccagtcctggtcggccacaccagtgtcccaaagaggagagcgcagcagagccaggggtctgttctgtagcagccacccccctgcccccactccagggcagccatgatgtgcttgggcccaccagggccttccgggctgctctcttccctgagcccggaaccggcgacgcacatgtgtcttttgttggtgtgtttgtttttttccagggaggtctaattccgaagcagtattccaggttttctctttgttttatcagtgccaagatgacctgttgtgtcatataatttaagcagagcttagcatttattttattctttagaaaacttaagtatttacttttttaaagctatttttcaaggaacctttttttgcagtattattgaatttattttctaaatcaggattgaaacaggaacttttccaggtggtgttaataagccattcaagtgccttacacagctttgaagaaactaggactgcagtgggctcggataggcccattgaggtttttagaaaagcaggatttgttttgttagggaggcatgattttggtgagatctttctggaagagttttccgcctctttgtgatgctgaacacccccaaggttctcccctccccccgctgcccaggtgactggcaggagctgcgactgccacgtagtggtgcctgggcccgacagcggggctctgggcatcccgggtgaccttggcccatctgcctgcattcccacccccttgggcctggctggatcccaggcagagggaccttgctgctgtgtgattggaacattcccaaatatcttgtgaatttgtaatcaaattggtctcattgggaaagactcttaattaagaggctcaggcaagcacagaggcagcccgtgggtctctgtctcagtctggaggcagcagggatgctgctgggagtccatggcacaggccacagcccctcaccttgccgcggtggctggcagcacgcctgccttgctctgccccatgccctgaacaggcatgagagctccacgtcccctagtgcaccctgagagggggctcacaagtgaccgatcctgggtgcctcagggagctcactgagggcgtgcaaagttgaaagtggcaaggctgggggagggtgtcgggtagagggaagagggcagggggctaggggaggactcagaggccatctgcagggccaagccacaggaagggctgagctggaggtgggcagggctgctccaggcaggtcagagcagtgcagggggaggagaggagaaagggaggaagctgggctgtgtggtccccatgaaggcattcagagtccacctgcagacagcgagagccccaggaaggtttgcacagctgtgccccaagcaccttggcctcctctcagctcgccgaggaggcacgctagagccgccttcccggtgggagccctctgtcccacagggagcggggagccagctttgctggggccctacctgcatgcccagccttacccctcattctcacagcacagatgaggttgagaccatgcagtcaatgcattgcttaaggtctcttatttacaaaaaaaaaccttaaacatagtcgctgtcattcagacattcagagaatggttggccacaaacaatgaccaagtattgcttggcttaacttgaaggcctgctgtctccttctgggggtcagggacgcagctccaccctcaccactagcccaccctgcccgtgggcataaaccttgacgaagagagagaatgattggcatctgcttttctcttttctttgctaataattctgttcctggctgccgagagtgaagtttcaccatgtggaggtttggctcctatcacctggtggtctgattcataccctagcctgaggctccactggaagatctcgcagcctcagtgtatgggaaaccctttccccaggcttgtcccagcactgccgctccccacccctgagccaggaccccagaggatgggccatgccccgtgcctggcagaggtctggtgccagcactgggagctgctccgcccttgccttggggccgagggagccctcgtccacccctgcacagcagctgggcacagaggagcgctcttccatcttgaccaggactgcaccaagaagcaccaggtgtcttcagcctccaacctccggggcgaccttctcttccagccacagtcccatgagggcccctagccagggacactggtctgtaaattgtaatcctttctcctgcatgggagttgtgttcctgtgcaagggggagctttgctccaggacaggatgactgtcttccctattcttagggacaagtcccaagatgccagaaaggcagtctcccaaggacccaccatgcagaagtgtcaataaaccacaagttctgaactctg

SEQ ID NO: 63417 - DNA, 2935 bp, Homo sapiens
caggctccaccaagaagctaggtggtttccaggcccctgccctccccttcctcccatccttgtccttctctccctcagaagcctcaggacccaacaggtggcaggcagtggacagggtgcccgccccacagtgctttccccagcaccccagagccagtcgggacaccccccgcagcccgtcctggtggctgtggaactgcactgggtggcgggcagatggtggaaggcagcttaggagacctcaccaaagagaagatggaccggctcttgctcccagctcctattaggcccggggtgggaccagaggtcataggtgcccaacggcagccaaaccaaagacactggtgtgcatggggcagcatggttgtgcacgtgggaccctggggcggacccaggagccaaactcttgaagcaccccctgggtcaggcccagcagcggagtggccagccccagtttcccattgctcctctctgcggccagggccaggtgggttcatatttacagatatgcccagccagtcctggtcggccacaccagtgtcccaaagaggagagcgcagcagagccaggggtctgttctgtagcagccacccccctgcccccactccagggcagccatgatgtgcttgggcccaccagggccttccgggctgctctcttccctgagcccggaaccggcgacgcacatgtgtcttttgttggtgtgtttgtttttttccagggaggtctaattccgaagcagtattccaggttttctctttgttttatcagtgccaagatgacctgttgtgtcatataatttaagcagagcttagcatttattttattctttagaaaacttaagtatttacttttttaaagctatttttcaaggaacctttttttgcagtattattgaatttattttctaaatcaggattgaaacaggaacttttccaggtggtgttaataagccattcaagtgccttacacagctttgaagaaactaggactgcagtgggctcggataggcccattgaggtttttagaaaagcaggatttgttttgttagggaggcatgattttggtgagatctttctggaagagttttccgcctctttgtgatgctgaacacccccaaggttctcccctccccccgctgcccaggtgactggcaggagctgcgactgccacgtagtggtgcctgggcccgacagcggggctctgggcatcccgggtgaccttggcccatctgcctgcattcccacccccttgggcctggctggatcccaggcagagggaccttgctgctgtgtgattggaacattcccaaatatcttgtgaatttgtaatcaaattggtctcattgggaaagactcttaattaagaggctcaggcaagcacagaggcagcccgtgggtctctgtctcagtctggaggcagcagggatgctgctgggagtccatggcacaggccacagcccctcaccttgccgcggtggctggcagcacgcctgccttgctctgccccatgccctgaacaggcatgagagctccacgtcccctagtgcaccctgagagggggctcacaagtgaccgatcctgggtgcctcagggagctcactgagggcgtgcaaagttgaaagtggcaaggctgggggagggtgtcgggtagagggaagagggcagggggctaggggaggactcagaggccatctgcagggccaagccacaggaagggctgagctggaggtgggcagggctgctccaggcaggtcagagcagtgcagggggaggagaggagaaagggaggaagctgggctgtgtggtccccatgaaggcattcagagtccacctgcagacagcgagagccccaggaaggtttgcacagctgtgccccaagcaccttggcctcctctcagctcgccgaggaggcacgctagagccgccttcccggtgggagccctctgtcccacagggagcggggagccagctttgctggggccctacctgcatgcccagccttacccctcattctcacagcacagatgaggttgagaccatgcagtcaatgcattgcttaaggtctcttatttacaaaaaaaaaccttaaacatagtcgctgtcattcagacattcagagaatggttggccacaaacaatgaccaagtattgcttggcttaacttgaaggcctgctgtctccttctgggggtcagggacgcagctccaccctcaccactagcccaccctgcccgtgggcataaaccttgacgaagagagagaatgattggcatctgcttttctcttttctttgctaataattctgttcctggctgccgagagtgaagtttcaccatgtggaggtttggctcctatcacctggtggtctgattcataccctagcctgaggctccactggaagatctcgcagcctcagtgtatgggaaaccctttccccaggcttgtcccagcactgccgctccccacccctgagccaggaccccagaggatgggccatgccccgtgcctggcagaggtctggtgccagcactgggagctgctccgccccttcttaggcctagcctcgtcccaagctaaatgtaagccagttgggctgtgttaaaggaagcagtgtttttggttcgattctgcctctgtagctcaaggggggcagcccccagagtcctgtgcattctgccaaggctccatagctttgccaaatgcacggagctctgccattccggtgcagtgcaggccttgcgaagggtttatctgcgttcgtctcggtgggcttctcctgcatgggagttgtgttcctgtgcaagggggagctttgctccaggacaggatgactgtcttccctattcttagggacaagtcccaagatgccagaaaggcagtctcccaaggacccaccatgcagaagtgtcaataaaccacaagttctgaactctg

SEQ ID NO: 63418 - DNA, 675 bp, Homo sapiens
tccgtctttattaacgaaagtgtttactgcctaagccagacactgagagccaccatgtattcctctctctctctcacctattcccatgtttaatccattatttggattggtccattttatctccattttctcaaatacaggaaaagacagatcatcatcaaccagcaattgtgactatctacatattcacataaggatttcccaacttggggtatttttgtcaagttgagaccaggcatcttggagttagttccatcaggttactgtgactgtcatcgatagcctccaagggaaaacaactcacaagagtcagcctgggacatatgagaaagagatgccggtctcctacctcttgtttcctcacttgaagtgcaacccatttccaaccatcttttctttccaactactcagggtcctgctttgatttttctatgcacacagctgacatatgctgggcctaagaaagggaggctgcaggactggacatgctggtttgctagggaaccagtgaatcctctgtgaagcttgtccagtgaagacccaaatatttacaaattatcaggaaagaactcattctctttctctctgtatattctgtctgtattggctttccattgcttcagtaataaactaccgcaaatttagcagcatacaataaaactttattatcttata

SEQ ID NO: 63419 - DNA, 565 bp, Homo sapiens
aaaaaaaaaagtgcgtaaaatgccttgcttcatgagttcccagctttacagggaatgagtaaaaattgtcactttctggcaggttcaagaaccttattataagcaaaatccaaaggctgctttggtttggtttcctagcctcaagaggttctaaaatctaagatctcctacatcatcaacgggagagaaaaattatgcttctaaggaaagcaaagttacacctgtttttagattttaaccctgtacattgtcttcaagtccttgttatctgcctgtggactgaactagatcctgaattctcctaagttcctccaatattaggttataacagtcctgatggagtcccccaaccctcttgcctcgatcctgactagggatgctccagggacattcaggtgacttccccttcttaaaaatctgaccagctagggacattagataccagaattgggaacaaactagatccataagatactatggtcagtaatgagatcttattggtcagtgacttttttttttttttaaatggagtctcactctgtcacccagagtggagtgcagtggc

SEQ ID NO: 63420 - DNA, 455 bp, Homo sapiens
ttttaagctttgtggaccacatggcctctgatgcagctactcaactttgtaagtttgtgtgatgtaggggagggaagactttccctctagcctcaagttcagtaattcagtagaacttatgattgttcagaacttgagtctataaaataagctgacaagaggcagattttatcagtccattcttacattgctataaatatctgagactgggtaatttaaaacctaggtgatttaaacctgttttaaagaaaacaataacacagggacacagagaggggaacatcacacactggggcctgtcgggggttcgggggctagggaagggatagcattaggagaaatacctaatgtagattacgggttcatgggtgcagcaaaccaccatggcacatatatacctatgtaacaaacctgcatgttctgcacatgtatccaagaacttaatgtatcattta

SEQ ID NO: 63421 - DNA, 121 bp, Homo sapiens
agaagtagaagaaaacagctttattgaagcagcggtgttgcagctttgtgactgtccctgcagagcagggctaccctggaggctgagagcagcagctcagggcaggcctgcagccatgttt

SEQ ID NO: 63422 - DNA, 389 bp, Homo sapiens
gtttggtgaatttggtctgtgataaaattggagttcaagaaacaaacaggaaactacaagtgccccttcgcccccaggtcacccgagtggcagggcagtgaccgctgctctcaggctgcccagtgtggacctgcctgtcggaatgctcctcctccacgtcccctcgctcctgtgtcccagccacatgcaccttccctctacctctgggatccctgcaccaggtctgcccctgtcttctcagggctgctcctcttggcccacaggacctcagctggaatgttgcctcctccaagaggccttcctgactattagctcacagtggccacccagccacactctgccatgtgcttggggattgtctgttactgcaacatactgcagcccatact

SEQ ID NO: 63423 - DNA, 1552 bp, Homo sapiens
tcatcacactaactgcaaaatcaaaccaaataatgccttatcaatgatgcagctcagaggaagtagtgtgtcccccacacccagacagtgccgcgcagctccagggaacgaggtgccgtgtctcgcttccattttgcagtacagggaattttttttttttttttttttttttttgctgcctaatgtaatacatcacaaagtaaaggcaagagtgggcttggccctccgatgccaaccacagggccccttttgtaactgaataatcctccaagtagccagtgctcctactgtttacagtgtccctcgtgcccaagtctctgtcactttcatcctgttccctccaagttcccagtcccatcccagtagccagctttatgagattttggtatttcttccctacagattaaaaacatacacaactcatcattatgctaaactaccagttgtatctcagaggtctccccttctgcccttgcttcgagtgtggacttccatggaaaatatgacatgaaaaagtgtagaacgaaacatcgtgtgaaatacctgccacaaatacctagtgcctcactgcccccatcttaggatccttggagccacccgtcaggcaaaacctagctcccttctgagctaaaggagaaccttgcctgacaactccacattcattcccttgtggtgggcacctgtctgtggggagatgtgtgcaagctcagccactctgaatatggaaaaggtcaggccgggctggtcctgctcttcactccctcttcttgatcctgtagggagtggaaatgtgtttttgcttgctgcctgacccctgatgttccccatctttggtcggggaagactgtgacagaggaaggagaaaaaatagaaggaaacagactgatccctgggctgtgctcaaaatagctgccctttaaaggaaatcaggcagggaggggagggaaaccagcgaaaaagaaatttgctttgcaacaacccacgcacacattcacccctgaagtatatcatgaacagaccaagccatccagaaaggcagccggtcaggagggtgtgggcaaacatgactgcatctgcctcactgttgtctggagtaacgactcaggtggtgtcctgcagcagtgctgtgctttctcattccagatggaagcaagtgagccagggtcaaattcccttctccaggggaatgaatcaagcccaaactgtaacagctaaataagtagaagtttttgcaggtcatcagctctgggcataactaatttgttttattggttctggaagatttccaaaaagccagaatttattattataacagtgtccactccactgccctcacagttgtgtaaaataattatagaagttttaatgatcctgattaagaagaccctagacaaaggcaattccaccttcagagtagactgcctgccctaatgaggtgtttagacattcgtgtctcctatggctgggatggaaattaaaataacactatttaaggacagagcgggccaggagcagtggctcatgcaggtaatcccagcatgggaggctgagg

SEQ ID NO: 63424 - DNA, 1226 bp, Homo sapiens
ctcgtgccgaattcggcacgagtgacagcatttaacaaagcttagagaaacctccaggagactgctaccatggcagagaagcccaagctccactactccaatatacggggcagaatggagtccatccggtggctcctggctgcagctggagtagagtttgaagagaaatttataaaatctgcagaagatttggacaagttaagaaatgatggatatttgatgttccagcaagtgccaatggttgagattgatgggatgaagctggtgcagaccagagccattctcaactacattgccagcaaatacaacctctatgggaaagacataaaggagaaagccctgattgatatgtatatagaaggtatagcagatttgggtgaaatgatccttcttctgccctttagtcaacctgaggaacaagatgccaagcttgccttgatccaagagaaaacaaaaaatcgctacttccctgcctttgaaaaagtcttaaagagccacggacaagactaccttgttggcaacaagctgagccgggctgacattcacctggtggaacttctctactacgtggaagagcttgactctagccttatttccagcttccctctgctgaaggccctgaaaaccagaatcagtaacctgcccacagtgaagaagtttctacagcctggcagcccaaggaagcctcccatggatgagaaatctttagaagaatcaaggaagattttcaggttttaataaaccagccatagaggtcaagaacatgcaagaccagtattctaaagttttgcaacaattaagtgctttacctaagtgttgattgtgcctgttgtgaagctaatgaactctttcaaattatatgctaattaaataatacaactcctattcacccacttagttaaaattgatttcttctcattaggatctgatgtgaattcagttttccaatctcctcctagccaacaattttcttggaattacaaattcagtaaaaatggaaactataaattatgtggtttgtttgacttttccaagaattgccctgtaacatacaatttgtcatacaatctattaaaatgccaatgtaaaaatgcacctctgacattttcaggtatgcacaggagaagagttaccatcctggataatggcataaagacattttcttcttttcctgaacagtcattttatttctgataaaagcattctttctaatgcatttgcaaaac

SEQ ID NO: 63425 - DNA, 964 bp, Homo sapiens
ctcgtgccgaattcggcacgagtgacagcatttaacaaagcttagagaaacctccaggagactgctaccatggcagagaagcccaagctccactactccaatatacggggcagaatggagtccatccggtggctcctggctgcagctggagtagagtttgaagagaaatttataaaatctgcagaagatttggacaagttaagaaatgatggatatttgatgttccagcaagtgccaatggttgagattgatgggatgaagctggtgcagaccagagccattctcaactacattgccagcaaatacaacctctatgggaaagacataaaggagaaagccctgattgatatgtatatagaaggtatagcagatttgggtgaaatgatccttcttctgccctttagtcaacctgaggaacaagatgccaagcttgccttgatccaagagaaaacaaaaaatcgctacttccctgcctttgaaaaagtcttaaagagccacggacaagactaccttgttggcaacaagctgagccgggctgacattcacctggtggaacttctctactacgtggaagagcttgactctagccttatttccagcttccctctgctgaaggccctgaaaaccagaatcagtaacctgcccacagtgaagaagtttctacagcctggcagcccaaggaagcctcccatggatgagaaatctttagaagaatcaaggaagattttcaggttttaataaaccagccatagaggtcaagaacatgcaagaccagtattctaaagttttgcaacaattaagtgctttacctaagtgttgattgtgcctgttgtgaagctaatgaactctttcaaattatatgctaattaaataatacaactcctattcacccacttagttaaaattgatttcttctcattaggatctgatgtgattcgcgaatgggtaccgcagctcggtcgta

SEQ ID NO: 63426 - DNA, 1261 bp, Homo sapiens
gtgctttttccctaacttgacccttctttcagtgggagggaactattgagaggaacaaagagcttataaatacattaggacctggaattcggttgtccagccacaaaggtgacagcatttaacaaagcttagagaaacctccaggagactgctaccatggcagagaagcccaagctccactactccaatatacggggcagaatggagtccatccggtggctcctggctgcagctggagtagagatggatatttgatgttccagcaagtgccaatggttgagattgatgggatgaagctggtgcagaccagagccattctcaactacattgccagcaaatacaacctctatgggaaagacataaaggagaaagccctgattgatatgtatatagaaggtatagcagatttgggtgaaatgatccttcttctgccctttagtcaacctgaggaacaagatgccaagcttgccttgatccaagagaaaacaaaaaatcgctacttccctgcctttgaaaaagtcttaaagagccacggacaagactaccttgttggcaacaagctgagccgggctgacattcacctggtggaacttctctactacgtggaagagcttgactctagccttatttccagcttccctctgctgaaggccctgaaaaccagaatcagtaacctgcccacagtgaagaagtttctacagcctggcagcccaaggaagcctcccatggatgagaaatctttagaagaatcaaggaagattttcaggttttaataaaccagccatagaggtcaagaacatgcaagaccagtattctaaagttttgcaacaattaagtgctttacctaagtgttgattgtgcctgttgtgaagctaatgaactctttcaaattatatgctaattaaataatacaactcctattcacccacttagttaaaattgatttcttctcattaggatctgatgtgaattcagttttccaatctcctcctagccaacaattttcttggaattacaaattcagtaaaaatggaaactataaattatgtggtttgtttgacttttccaagaattgccctgtaacatacaatttgtcatacaatctattaaaatgccaatgtaaaaatgcacctctgacattttcaggtatgcacaggagaagagttaccatcctggataatggcataaagacattttcttcttttcctgaacagtcattttatttctgataaaagcattctttctaatgcatttgcaaaac

SEQ ID NO: 63427 - DNA, 975 bp, Homo sapiens
gtgctttttccctaacttgacccttctttcagtgggagggaactattgagaggaacaaagagcttataaatacattaggacctggaattcggttgtccagccacaaaggtgacagcatttaacaaagcttagagaaacctccaggagactgctaccatggcagagaagcccaagctccactactccaatatacggggcagaatggagtccatccggtggctcctggctgcagctggagtagagtttgaagagaaatttataaaatctgcagaagatttggacaagttaagaaatgatggatatttgatgttccagcaagtgccaatggttgagattgatgggatgaagctggtgcagaccagagccattctcaactacattgccagcaaatacaacctctatgggaaagacataaaggagaaagccctgattgatatgtatatagaaggtatagcagatttgggtgaaatgatccttcttctgccctttagtcaacctgaggaacaagatgccaagcttgccttgatccaagagaaaacaaaaaatcgctacttccctgcctttgaaaaagtcttaaagagccacggacaagactaccttgttggcaacaagctgagccgggctgacattcacctggtggaacttctctactacgtggaagagcttgactctagccttatttccagcttccctctgctgaaggccctgaaaaccagaatcagtaacctgcccacagtgaagaagtttctacagcctggcagcccaaggaagcctcccatggatgagaaatctttagaagaatcaaggaagattttcaggttttaataaaccagccatagaggtcaagaacatgcaagaccagtattctaaagttttgcaacaattaagtgctttacctaagtgttgattgtgcctgttgtgaagctaatgaactctttcaaattatatgctaattaaataatacaactcctattc

SEQ ID NO: 63428 - DNA, 1313 bp, Homo sapiens
gtgctttttccctaacttgacccttctttcagtgggagggaactattgagaggaacaaagagcttataaatacattaggacctggaattcggttgtccagccacaaaggtgacagcatttaacaaagcttagagaaacctccaggagactgctaccatggcagagaagcccaagctccactactccaatatacggggcagaatggagtccatccggtggctcctggctgcagctggagtagagtttgaagagaaatttataaaatctgcagaagatttggacaagttaagaaatgatggatatttgatgttccagcaagtgccaatggttgagattgatgggatgaagctggtgcagaccagagccattctcaactacattgccagcaaatacaacctctatgggaaagacataaaggagaaagccctgattgatatgtatatagaaggtatagcagatttgggtgaaatgatccttcttctgccctttagtcaacctgaggaacaagatgccaagcttgccttgatccaagagaaaacaaaaaatcgctacttccctgcctttgaaaaagtcttaaagagccacggacaagactaccttgttggcaacaagctgagccgggctgacattcacctggtggaacttctctactacgtggaagagcttgactctagccttatttccagcttccctctgctgaaggccctgaaaaccagaatcagtaacctgcccacagtgaagaagtttctacagcctggcagcccaaggaagcctcccatggatgagaaatctttagaagaatcaaggaagattttcaggttttaataaaccagccatagaggtcaagaacatgcaagaccagtattctaaagttttgcaacaattaagtgctttacctaagtgttgattgtgcctgttgtgaagctaatgaactctttcaaattatatgctaattaaataatacaactcctattcacccacttagttaaaattgatttcttctcattaggatctgatgtgaattcagttttccaatctcctcctagccaacaattttcttggaattacaaattcagtaaaaatggaaactataaattatgtggtttgtttgacttttccaagaattgccctgtaacatacaatttgtcatacaatctattaaaatgccaatgtaaaaatgcacctctgacattttcaggtatgcacaggagaagagttaccatcctggataatggcataaagacattttcttcttttcctgaacagtcattttatttctgataaaagcattctttctaatgcatttgcaaaac

SEQ ID NO: 63429 - DNA, 1367 bp, Homo sapiens
gtgctttttccctaacttgacccttctttcagtgggagggaactattgagaggaacaaagagcttataaatacattaggacctggaattcggttgtccagccacaaaggtgacagcatttaacaaagcttagagaaacctccaggagactgctaccatggcagagaagcccaagctccactactccaatatacggggcagaatggagtccatccggtggctcctggctgcagctggagtagagtttgaagagaaatttataaaatctgcagaagatttggacaagttaagaaatgatggatatttgatgttccagcaagtgccaatggttgagattgatgggatgaagctggtgcagaccagagccattctcaactacattgccagcaaatacaacctctatgggaaagacataaaggagaaagccctgattgatatgtatatagaaggtatagcagatttgggtgaaatgatccttcttctgccctttagtcaacctgaggaacaagatgccaagcttgccttgatccaagagaaaacaaaaaatcgctacttccctgcctttgaaaaagtcttaaagagccacggacaagactaccttgttggcaacaagctgagccgggctgacattcacctggtggaacttctctactacgtggaagagcttgactctagccttatttccagcttccctctgctgaaggtgacccatttcacagtcttcagagaggcagacccacatctcccatcttgggatcttgtatctgggccctgggactgagcatgttttgaccccagccttctccaggcctttggtgccccaaggtctccaaaatgagcttccaggctccaattttgaggagtattttgccttttattatggaaaggacccagggcccagcatgtctccccatccctctatttcagtgtggtttctgttcctgagttctctgtgatgtcctttatcccatatgtgcccacattgagtcagtctgagcagagccctttccatctggtttcctccctgggctccggctcctgctgtcagacattttgttcctctctgcccagctctccagcactctgcccccgacaatgtatctctcactgagaaaaggtggtcccatggtttgtctttactattttctataacattttcctttccaactcattttcccatattttcacttctgcttagagactgatctgtgctgatatcaaacaagcacattagtttttcttgtcttatacaagagtcactaatctataggattaatatgtaagaagaaagatagggatgactgaactgattaaaatttcaagacatctttggggaaaataaagtgagctacatgttcttcctcttat

SEQ ID NO: 63430 - DNA, 2547 bp, Homo sapiens
tgcaatgggaagtcatctgtaactaaaggtggtccacaaattgcttatgaacgcggctttaggtggaagcttgctcacttccgttatttgtgccagtctaatgcactacctagtcatgtaaagatcaatgtgtcccggcagacattgtttgaagattccttccaacagattatggcattaaaaccctatgacttgaggaggcgcttatatgtaatatttagaggagaagaaggacttgattatggtggcctagcgagagaatggtttttcttgctttcacatgaagttttgaacccaatgtattgcttatttgagtatgcgggcaagaacaactattgtctgcagataaatccagcatcaaccattaatccagaccatctttcatacttctgtttcattggtcgttttattgccatggcactatttcatggaaagtttatcgatactggtttctctttaccattctacaagcgtatgttaagtaaaaaacttactattaaggatttggaatctattgatactgaattttataactcccttatctggataagagataacaacattgaagaatgtggcttagaaatgtacttttctgttgacatggagattttgggaaaagttacttcacatgacctgaagttgggaggttccaatattctggtgactgaggagaacaaagatgaatatattggtttaatgacagaatggcgtttttctcgaggagtacaagaacagaccaaagctttccttgatggttttaatgaagttgttcctcttcagtggctacagtacttcgatgaaaaagaattagaggttatgttgtgtggcatgcaggaggttgacttggcagattggcagagaaatactgtttatcgacattatacaagaaacagcaagcaaatcatttggttttggcagtttgtgaaagagacagacaatgaagtaagaatgcgactattgcagttcgtcactggaacctgccgtttacctctaggaggatttgctgagctcatgggaagtaatgggcctcaaaagttttgcattgaaaaagttggcaaagacacttggttaccaagaagccatacatgttttaatcgcttggatctaccaccatataagagttatgaacaactaaaggaaaaacttctttttgcaatagaagagacagagggatttggacaagaatgaatgtggcttcttattttggaggagctcttgcatttaaataccccagccaagaaaaattgcacagatagtgtatataagctgttcattctgtacagtgaattttccgaacctctcaaagtatgttttccgttcttccacagaaatatgcaaaacagttcatccttttctactttatttattgttcccttgaaatgactgaccaggaaaaagatcatccttaaattttgaagcaagtgagagactttattaaaaatacatatatatctatataaacatatatgatagtggctctagttttatagagctccaagtgtattaaacatgacagccattcattcataaagatctggatttgctttaccttgttaatattatctaggggaaaaagtgcaaattgctccatgttcttctctcccttatgtaacatctcctgagggtgtttagttgcatggctgttcagaaaggtattaagggcttaggccaaatcttactttgagtatgttaaaaaaaaaaaaatgctgctggcttttctgaagacaggtgcttgaacttgtcagtttgttttaaataaatacaatagttgaaaatttttctctgttacatcagtaatattgttaaagtaatggatagaaccataacttacacatgaaagtcatatactagatccaatactatttagtttattatcgaaattggaaggattcattgagcagcatagaagtttgtttacatgttactttgagatgctaggtatttgtggaattaaaaagaatcaggctcttttgtactttgtttttaaatctgtgatgcttttcaaatttaattcataataaattgatgcaatttcatacttaggaacatacaaaaggtaatgtaaactctgccacttttttgtgttcaaaattttggtttttatgaagccagatggattgaagagttacataagcatttgaatgctctaatataaggctaatgattttctgttagtgtttgaatatcttcattcctctcaaattcataacagttctatttaactgaattaaataaccatatgaaaaatcttttgggtctccccctttttacacagataattatttttgtcataacactttttaattgtttttcatcataggggcctttgctgaactacaaaaatgtgtaacaaattaaaatctgatgtgaatgatattaatgctacttttagcaaactgggcttcctaatacaaaattttaaatttccatttgtatcatgcttttaatatgcactgtaaatttcattaacttaaacattttttaatagccatggaactgacttcttaaaatctgttgcctataaatatttcactgctaagtacatac

SEQ ID NO: 63431 - DNA, 2561 bp, Homo sapiens
gacatacccaagcaaaagtgtggcatacaaataagcatgttatatctatatgaggatcagtgaatttgtagtttggccacatcgaaactagcaggtaacttaaatggagagccagatcatagaagaacttggatagagggccaaagaattgggcagtggagttcttaaagactgttgagcagaggtatgatgtatatatgaatatatttaagatctgtttttaaattcacatattaatgctaaaaaataaccttgacttattttcttatagagaatggtttttcttgctttcacatgaagttttgaacccaatgtattgcttatttgagtatgcgggcaagaacaactattgtctgcagataaatccagcatcaaccattaatccagaccatctttcatacttctgtttcattggtcgttttattgccatggcactatttcatggaaagtttatcgatactggtttctctttaccattctacaagcgtatgttaagtaaaaaacttactattaaggatttggaatctattgatactgaattttataactcccttatctggataagagataacaacattgaagaatgtggcttagaaatgtacttttctgttgacatggagattttgggaaaagttacttcacatgacctgaagttgggaggttccaatattctggtgactgaggagaacaaagatgaatatattggtttaatgacagaatggcgtttttctcgaggagtacaagaacagaccaaagctttccttgatggttttaatgaagttgttcctcttcagtggctacagtacttcgatgaaaaagaattagaggttatgttgtgtggcatgcaggaggttgacttggcagattggcagagaaatactgtttatcgacattatacaagaaacagcaagcaaatcatttggttttggcagtttgtgaaagagacagacaatgaagtaagaatgcgactattgcagttcgtcactggaacctgccgtttacctctaggaggatttgctgagctcatgggaagtaatgggcctcaaaagttttgcattgaaaaagttggcaaagacacttggttaccaagaagccatacatgttttaatcgcttggatctaccaccatataagagttatgaacaactaaaggaaaaacttctttttgcaatagaagagacagagggatttggacaagaatgaatgtggcttcttattttggaggagctcttgcatttaaataccccagccaagaaaaattgcacagatagtgtatataagctgttcattctgtacagtgaattttccgaacctctcaaagtatgttttccgttcttccacagaaatatgcaaaacagttcatccttttctactttatttattgttcccttgaaatgactgaccaggaaaaagatcatccttaaattttgaagcaagtgagagactttattaaaaatacatatatatctatataaacatatatgatagtggctctagttttatagagctccaagtgtattaaacatgacagccattcattcataaagatctggatttgctttaccttgttaatattatctaggggaaaaagtgcaaattgctccatgttcttctctcccttatgtaacatctcctgagggtgtttagttgcatggctgttcagaaaggtattaagggcttaggccaaatcttactttgagtatgttaaaaaaaaaaaaatgctgctggcttttctgaagacaggtgcttgaacttgtcagtttgttttaaataaatacaatagttgaaaatttttctctgttacatcagtaatattgttaaagtaatggatagaaccataacttacacatgaaagtcatatactagatccaatactatttagtttattatcgaaattggaaggattcattgagcagcatagaagtttgtttacatgttactttgagatgctaggtatttgtggaattaaaaagaatcaggctcttttgtactttgtttttaaatctgtgatgcttttcaaatttaattcataataaattgatgcaatttcatacttaggaacatacaaaaggtaatgtaaactctgccacttttttgtgttcaaaattttggtttttatgaagccagatggattgaagagttacataagcatttgaatgctctaatataaggctaatgattttctgttagtgtttgaatatcttcattcctctcaaattcataacagttctatttaactgaattaaataaccatatgaaaaatcttttgggtctccccctttttacacagataattatttttgtcataacactttttaattgtttttcatcataggggcctttgctgaactacaaaaatgtgtaacaaattaaaatctgatgtgaatgatattaatgctacttttagcaaactgggcttcctaatacaaaattttaaatttccatttgtatcatgcttttaatatgcactgtaaatttcattaacttaaacattttttaatagccatggaactgacttcttaaaatctgttgcctataaatatttcactgctaagtacatac

SEQ ID NO: 63432 - DNA, 2234 bp, Homo sapiens
atttgtgccaggtactatagtgtctaatgcactacctagtcatgtaaagatcaatgtgtcccggcagacattgtttgaagattccttccaacagattatggcattaaaaccctatgacttgaggaggcgcttatatgtaatatttagaggagaagaaggacttgattatggtggcctagcgagagaatggtttttcttgctttcacatgaagttttgaacccaatgtattgcttatttgagtatgcgggcaagaacaactattgtctgcagataaatccagcatcaaccattaatccagaccatctttcatacttctgtttcattggtcgttttattgccatggcactatttcatggaaagtttatcgatactggtttctctttaccattctacaagcgtatgttaagtaaaaaacttactattaaggatttggaatctattgatactgaattttataactcccttatctggataagagataacaacattgaagaatgtggcttagaaatgtacttttctgttgacatggagattttgggaaaagttacttcacatgacctgaagttgggaggttccaatattctggtgactgaggagaacaaagatgaatatattggtttaatgacagaatggcgtttttctcgaggagtacaagaacagaccaaagctttccttgatggttttaatgaagttgttcctcttcagtggctacagtacttcgatgaaaaagaattagaggttatgttgtgtggcatgcaggaggttgacttggcagattggcagagaaatactgtttatcgacattatacaagaaacagcaagcaaatcatttggttttggcagtttgtgaaagagacagacaatgaagtaagaatgcgactattgcagttcgtcactggaacctgccgtttacctctaggaggatttgctgagctcatgggaagtaatgggcctcaaaagttttgcattgaaaaagttggcaaagacacttggttaccaagaagccatacatagaaatatgcaaaacagttcatccttttctactttatttattgttcccttgaaatgactgaccaggaaaaagatcatccttaaattttgaagcaagtgagagactttattaaaaatacatatatatctatataaacatatatgatagtggctctagttttatagagctccaagtgtattaaacatgacagccattcattcataaagatctggatttgctttaccttgttaatattatctaggggaaaaagtgcaaattgctccatgttcttctctcccttatgtaacatctcctgagggtgtttagttgcatggctgttcagaaaggtattaagggcttaggccaaatcttactttgagtatgttaaaaaaaaaaaaatgctgctggcttttctgaagacaggtgcttgaacttgtcagtttgttttaaataaatacaatagttgaaaatttttctctgttacatcagtaatattgttaaagtaatggatagaaccataacttacacatgaaagtcatatactagatccaatactatttagtttattatcgaaattggaaggattcattgagcagcatagaagtttgtttacatgttactttgagatgctaggtatttgtggaattaaaaagaatcaggctcttttgtactttgtttttaaatctgtgatgcttttcaaatttaattcataataaattgatgcaatttcatacttaggaacatacaaaaggtaatgtaaactctgccacttttttgtgttcaaaattttggtttttatgaagccagatggattgaagagttacataagcatttgaatgctctaatataaggctaatgattttctgttagtgtttgaatatcttcattcctctcaaattcataacagttctatttaactgaattaaataaccatatgaaaaatcttttgggtctccccctttttacacagataattatttttgtcataacactttttaattgtttttcatcataggggcctttgctgaactacaaaaatgtgtaacaaattaaaatctgatgtgaatgatattaatgctacttttagcaaactgggcttcctaatacaaaattttaaatttccatttgtatcatgcttttaatatgcactgtaaatttcattaacttaaacattttttaatagccatggaactgacttcttaaaatctgttgcctataaatatttcactgctaagtacatac

SEQ ID NO: 63433 - DNA, 2473 bp, Homo sapiens
atttgtgccaggtactatagtgtctaatgcactacctagtcatgtaaagatcaatgtgtcccggcagacattgtttgaagattccttccaacagattatggcattaaaaccctatgacttgaggaggcgcttatatgtaatatttagaggagaagaaggacttgattatggtggcctagcgagagaatggtttttcttgctttcacatgaagttttgaacccaatgtattgcttatttgagtatgcgggcaagaacaactattgtctgcagataaatccagcatcaaccattaatccagaccatctttcatacttctgtttcattggtcgttttattgccatggcactatttcatggaaagtttatcgatactggtttctctttaccattctacaagcgtatgttaagtaaaaaacttactattaaggatttggaatctattgatactgaattttataactcccttatctggataagagataacaacattgaagaatgtggcttagaaatgtacttttctgttgacatggagattttgggaaaagttacttcacatgacctgaagttgggaggttccaatattctggtgactgaggagaacaaagatgaatatattggtttaatgacagaatggcgtttttctcgaggagtacaagaacagaccaaagctttccttgatggttttaatgaagttgttcctcttcagtggctacagtacttcgatgaaaaagaattagaggttatgttgtgtggcatgcaggaggttgacttggcagattggcagagaaatactgtttatcgacattatacaagaaacagcaagcaaatcatttggttttggcagtttgtgaaagagacagacaatgaagtaagaatgcgactattgcagttcgtcactggaacctgccgtttacctctaggaggatttgctgagctcatgggaagtaatgggcctcaaaagttttgcattgaaaaagttggcaaagacacttggttaccaagaagccatacatgttttaatcgcttggatctaccaccatataagagttatgaacaactaaaggaaaaacttctttttgcaatagaagagacagagggatttggacaagaatgaatgtggcttcttattttggaggagctcttgcatttaaataccccagccaagaaaaattgcacagatagtgtatataagctgttcattctgtacagtgaattttccgaacctctcaaagtatgttttccgttcttccacagaaatatgcaaaacagttcatccttttctactttatttattgttcccttgaaatgactgaccaggaaaaagatcatccttaaattttgaagcaagtgagagactttattaaaaatacatatatatctatataaacatatatgatagtggctctagttttatagagctccaagtgtattaaacatgacagccattcattcataaagatctggatttgctttaccttgttaatattatctaggggaaaaagtgcaaattgctccatgttcttctctcccttatgtaacatctcctgagggtgtttagttgcatggctgttcagaaaggtattaagggcttaggccaaatcttactttgagtatgttaaaaaaaaaaaaatgctgctggcttttctgaagacaggtgcttgaacttgtcagtttgttttaaataaatacaatagttgaaaatttttctctgttacatcagtaatattgttaaagtaatggatagaaccataacttacacatgaaagtcatatactagatccaatactatttagtttattatcgaaattggaaggattcattgagcagcatagaagtttgtttacatgttactttgagatgctaggtatttgtggaattaaaaagaatcaggctcttttgtactttgtttttaaatctgtgatgcttttcaaatttaattcataataaattgatgcaatttcatacttaggaacatacaaaaggtaatgtaaactctgccacttttttgtgttcaaaattttggtttttatgaagccagatggattgaagagttacataagcatttgaatgctctaatataaggctaatgattttctgttagtgtttgaatatcttcattcctctcaaattcataacagttctatttaactgaattaaataaccatatgaaaaatcttttgggtctccccctttttacacagataattatttttgtcataacactttttaattgtttttcatcataggggcctttgctgaactacaaaaatgtgtaacaaattaaaatctgatgtgaatgatattaatgctacttttagcaaactgggcttcctaatacaaaattttaaatttccatttgtatcatgcttttaatatgcactgtaaatttcattaacttaaacattttttaatagccatggaactgacttcttaaaatctgttgcctataaatatttcactgctaagtacatac

SEQ ID NO: 63434 - DNA, 1739 bp, Homo sapiens
atttgtgccaggtactatagtgtctaatgcactacctagtcatgtaaagatcaatgtgtcccggcagacattgtttgaagattccttccaacagattatggcattaaaaccctatgacttgaggaggcgcttatatgtaatatttagaggagaagaaggacttgattatggtggcctagcgagagaatggtttttcttgctttcacatgaagttttgaacccaatgtattgcttatttgagtatgcgggcaagaacaactattgtctgcagataaatccagcatcaaccattaatccagaccatctttcatacttctgtttcattggtcgttttattgccatggcactatttcatggaaagtttatcgatactggtttctctttaccattctacaagcgtatgttaagtaaaaaacttactattaaggatttggaatctattgatactgaattttataactcccttatctggataagagataacaacattgaagaatgtggcttagaaatgtacttttctgttgacatggagattttgggaaaagttacttcacatgacctgaagttgggaggttccaatattctggtgactgaggagaacaaagatgaatatattggtttaatgacagaatggcgtttttctcgaggagtacaagaacagaccaaagctttccttgatggttttaatgaagttgttcctcttcagtggctacagtacttcgatgaaaaagaattagaggttatgttgtgtggcatgcaggaggttgacttggcagattggcagagaaatactgtttatcgacattatacaagaaacagcaagcaaatcatttggttttggcagtttgtgaaagagacagacaatgaagtaagaatgcgactattgcagttcgtcactggaacctgccgtttacctctaggaggatttgctgagctcatgggaagtaatgggcctcaaaagttttgcattgaaaaagttggcaaagacacttggttaccaagaagccatacatgttttaatcgcttggatctaccaccatataagagttatgaacaactaaaggaaaaacttctttttgcaatagaagagacagagggatttggacaagaatgaatgtggcttcttattttggaggagctcttgcatttaaataccccagccaagaaaaattgcacagatagtgtatataagctgttcattctgtacagtgaattttccgaacctctcaaagtatgttttccgttcttccacagaaatatgcaaaacagttcatccttttctactttatttattgttcccttgaaatgactgaccaggaaaaagatcatccttaaattttgaagcaagtgagagactttattaaaaatacatatatatctatataaacatatatgatagtggctctagttttatagagctccaagtgtattaaacatgacagccattcattcataaagatctggatttgctttaccttgttaatattatctaggggaaaaagtgcaaattgctccatgttcttctctcccttatgtaacatctcctgagggtgtttagttgcatggctgttcagaaaggtattaagggcttaggccaaatcttactttgagtatgttaaaaaaaaaaaaaaaaattggggcgcgggctggaaaagttaaccatgttgggggccaggaatgaaggtaatggccagaactgaggtgggtccaaaagcgggcgggggaaacgggggtgggca

SEQ ID NO: 63435 - DNA, 705 bp, Homo sapiens
atttgtgccaggtactatagtgtctaatgcactacctagtcatgtaaagatcaatgtgtcccggcagacattgtttgaagattccttccaacagattatggcattaaaaccctatgacttgaggaggcgcttatatgtaatatttagaggagaagaaggacttgattatggtggcctagcgagagaatggtttttcttgctttcacatgaagttttgaacccaatgtattgcttatttgagtatgcgggcaagaacaactattgtctgcagataaatccagcatcaaccattaatccagaccatctttcatacttctgtttcattggtcgttttattgccatggcactatttcatggaaagtttatcgatactggtttctctttaccattctacaagcgtatgttaagtaaaaaacttactattaaggatttggaatctattgatactgaattttataactcccttatctggataagagataacaacattgaagaatgtggcttagaaatgtacttttctgttgacatggagattttgggaaaagttacttcacatgacctgaagttgggaggttccaatattctggtgactgaggagaacaaagatgaatatattggtttaatgacagaatggcgtttttctcgaggagtacaagaacagaccaaagctttccttgatgctggacgacgggatcctctgaacag

SEQ ID NO: 63436 - DNA, 424 bp, Homo sapiens
gcattggcagaagtgccacagtgtgatttctgaggctgggtcaccacaggtgatgcttggagccctgagccactgtgtcaggttcatacctgaggaggccatactgggaggaagcccaagccacacagagatcagaagtccaaccacctgaagacgccatactgggaggaagcccaagctgcacagagaggccaagtgtaggtgttccggccagtcctagctagatctggacttcaaattgtcccgacccagacatcatacatgtgaagaggcctccaggatggtcccagttcccatccatttgagtcttcccagctgaaattccagatgtcatggaagagacaagccatcctgctgtgtcctgtccaagctccttgtaacagaaccagcgagctcaataaaatggtggttgccacgtgaaact

SEQ ID NO: 63437 - DNA, 198 bp, Homo sapiens
ctatcacttcagggaaacaaacaactaacagccatcaattcagagggaagtgattttacagtagagtgaacgaaacttgggaaggaaaacatccaagaggcgtctgtttgacgtgggtaacgtggggaacgcatactgtctggcaagaattctactaggaccacgggaaacaaagcagattaaaacactctctactct

SEQ ID NO: 63438 - DNA, 361 bp, Homo sapiens
ctactttctgtgtctaatgtagccttatgagtctggcctcttttactcaggatgatgcatttgagattcatccatgttgttgtgtatgacattattttgtttccttttattgctgagtagtataccattgcatggctatatcacatttttggtatcatatgtgtcagttgaaggacatttgttctattttcttttcagtttatagtgattatgaataaagctaccataaacattttgtttgaaagattcgggtgaacttaagttttcatttctcctgggtaaatgactaggattaagactgctgggttatatggtctatgtatgctgaactttataacccaaactgtgttccaaagtggct

SEQ ID NO: 63439 - DNA, 362 bp, Homo sapiens
tcaagtaagatgatgtcttatgtagctcaaggacaggatttgttttgcttgttctgtttgtttgcatttacagaaatcacacacacacacacacacacacacacacactcataaatgttgctattggcttctaaataattgcaactttaaatatctaactttctgcaagaagctgatgacagtcactcataatacataaagtgctttaaaatttttgagatatatttagacacattaaattaggctgaaatgaacattatggacagttctttatcagctaaaaggccagaaatgagaagcttaaggaggatatgtagaaaggaggccatcttttgtggaaataatttttgtttgacaatcca

SEQ ID NO: 63440 - DNA, 1794 bp, Homo sapiens
tcgagcccgctttccagggaccctacctgagggcccacaggtgaggcagcctggcctagcaggccccacgccaccgcctctgcctccaggccgcccgctgctgcggggccaccatgctcctgcccaggcctggagactgacccgaccccggcactacctcgaggctccgcccccacctgctggaccccagggtcccaccctggcccaggaggtcagccagggaatcattaacaagaggcagtgacatggcgcagaaggagggtggccggactgtgccatgctgctccagacccaaggtggcagctctcactgcggggaccctgctacttctgacagccatcggggcggcatcctgggccattgtggctgttctcctcaggagtgaccaggagccgctgtacccagtgcaggtcagctctgcggacgctcggctcatggtctttgacaagacggaagggacgtggcggctgctgtgctcctcgcgctccaacgccagggtagccggactcagctgcgaggagatgggcttcctcagggcactgacccactccgagctggacgtgcgaacggcgggcgccaatggcacgtcgggcttcttctgtgtggacgaggggaggctgccccacacccagaggctgctggaggtcatctccgtgtgtgattgccccagaggccgtttcttggccgccatctgccaagactgtggccgcaggaagctgcccgtggaccgcatcgtgggaggccgggacaccagcttgggccggtggccgtggcaagtcagccttcgctatgatggagcacacctctgtgggggatccctgctctccggggactgggtgctgacagccgcccactgcttcccggagcggaaccgggtcctgtcccgatggcgagtgtttgccggtgccgtggcccaggcctctccccacggtctgcagctgggggtgcaggctgtggtctaccacgggggctatcttccctttcgggaccccaacagcgaggagaacagcaacgatattgccctggtccacctctccagtcccctgcccctcacagaatacatccagcctgtgtgcctcccagctgccggccaggccctggtggatggcaagatctgtaccgtgacgggctggggcaacacgcagtactatggccaacaggccggggtactccaggaggctcgagtccccataatcagcaatgatgtctgcaatggcgctgacttctatggaaaccagatcaagcccaagatgttctgtgctggctaccccgagggtggcattgatgcctgccagggcgacagcggtggtccctttgtgtgtgaggacagcatctctcggacgccacgttggcggctgtgtggcattgtgagttggggcactggctgtgccctggcccagaagccaggcgtctacaccaaagtcagtgacttccgggagtggatcttccaggccataaagactcactccgaagccagcggcatggtgacccagctctgaccggtggcttctcgctgcgcagcctccagggcccgaggtgatcccggtggtgggatccacgctgggccgaggatgggacgtttttcttcttgggcccggtccacaggtccaaggacaccctccctccagggtcctctcttccacagtggcgggcccactcagccccgagaccacccaacctcaccctcctgacccccatgtaaatattgttctgctgtctgggactcctgtctaggtgcccctgatgatgggatgctctttaaataataaagatggttttgattaaaaaaaaaac

SEQ ID NO: 63441 - DNA, 421 bp, Homo sapiens
gagaaaggattccaatggtggttcatagaagcctttgaaaccacaagaagccacatatgtcattccacagaatcattgaaaaaacatactcactccgaagccagcggcatggtgacccagctctgaccggtggcttctcgctgcgcagcctccagggcccgaggtgatcccggtggtgggatccacgctgggccgaggatgggacgtttttcttcttgggcccggtccacaggtccaaggacaccctccctccagggtcctctcttccacagtggcgggcccactcagccccgagaccacccaacctcaccctcctgacccccatgtaaatattgttctgctgtctgggactcctgtctaggtgcccctgatgatgggatgctctttaaataataaagatggttttgattaaaaaaaaaac

SEQ ID NO: 63442 - DNA, 1781 bp, Homo sapiens
atggtactgcgtcggaagtcgtgtgatgtgaggcagcctggcctagcaggccccacgccaccgcctctgcctccaggccgcccgctgctgcggggccaccatgctcctgcccaggcctggagactgacccgaccccggcactacctcgaggctccgcccccacctgctggaccccagggtcccaccctggcccaggaggtcagccagggaatcattaacaagaggcagtgacatggcgcagaaggagggtggccggactgtgccatgctgctccagacccaaggtggcagctctcactgcggggaccctgctacttctgacagccatcggggcggcatcctgggccattgtggctgttctcctcaggagtgaccaggagccgctgtacccagtgcaggtcagctctgcggacgctcggctcatggtctttgacaagacggaagggacgtggcggctgctgtgctcctcgcgctccaacgccagggtagccggactcagctgcgaggagatgggcttcctcagggcactgacccactccgagctggacgtgcgaacggcgggcgccaatggcacgtcgggcttcttctgtgtggacgaggggaggctgccccacacccagaggctgctggaggtcatctccgtgtgtgattgccccagaggccgtttcttggccgccatctgccaagactgtggccgcaggaagctgcccgtggaccgcatcgtgggaggccgggacaccagcttgggccggtggccgtggcaagtcagccttcgctatgatggagcacacctctgtgggggatccctgctctccggggactgggtgctgacagccgcccactgcttcccggagcggaaccgggtcctgtcccgatggcgagtgtttgccggtgccgtggcccaggcctctccccacggtctgcagctgggggtgcaggctgtggtctaccacgggggctatcttccctttcgggaccccaacagcgaggagaacagcaacgatattgccctggtccacctctccagtcccctgcccctcacagaatacatccagcctgtgtgcctcccagctgccggccaggccctggtggatggcaagatctgtaccgtgacgggctggggcaacacgcagtactatggccaacaggccggggtactccaggaggctcgagtccccataatcagcaatgatgtctgcaatggcgctgacttctatggaaaccagatcaagcccaagatgttctgtgctggctaccccgagggtggcattgatgcctgccagggcgacagcggtggtccctttgtgtgtgaggacagcatctctcggacgccacgttggcggctgtgtggcattgtgagttggggcactggctgtgccctggcccagaagccaggcgtctacaccaaagtcagtgacttccgggagtggatcttccaggccataaagactcactccgaagccagcggcatggtgacccagctctgaccggtggcttctcgctgcgcagcctccagggcccgaggtgatcccggtggtgggatccacgctgggccgaggatgggacgtttttcttcttgggcccggtccacaggtccaaggacaccctccctccagggtcctctcttccacagtggcgggcccactcagccccgagaccacccaacctcaccctcctgacccccatgtaaatattgttctgctgtctgggactcctgtctaggtgcccctgatgatgggatgctctttaaataataaagatggttttgattaaaaaaaaaac

SEQ ID NO: 63443 - DNA, 1780 bp, Homo sapiens
gctgtacggtccggagttctttggatgtgaggcagcctggcctagcaggccccacgccaccgcctctgcctccaggccgcccgctgctgcggggccaccatgctcctgcccaggcctggagactgacccgaccccggcactacctcgaggctccgcccccacctgctggaccccagggtcccaccctggcccaggaggtcagccagggaatcattaacaagaggcagtgacatggcgcagaaggagggtggccggactgtgccatgctgctccagacccaaggtggcagctctcactgcggggaccctgctacttctgacagccatcggggcggcatcctgggccattgtggctgttctcctcaggagtgaccaggagccgctgtacccagtgcaggtcagctctgcggacgctcggctcatggtctttgacaagacggaagggacgtggcggctgctgtgctcctcgcgctccaacgccagggtagccggactcagctgcgaggagatgggcttcctcagggcactgacccactccgagctggacgtgcgaacggcgggcgccaatggcacgtcgggcttcttctgtgtggacgaggggaggctgccccacacccagaggctgctggaggtcatctccgtgtgtgattgccccagaggccgtttcttggccgccatctgccaagactgtggccgcaggaagctgcccgtggaccgcatcgtgggaggccgggacaccagcttgggccggtggccgtggcaagtcagccttcgctatgatggagcacacctctgtgggggatccctgctctccggggactgggtgctgacagccgcccactgcttcccggagcggaaccgggtcctgtcccgatggcgagtgtttgccggtgccgtggcccaggcctctccccacggtctgcagctgggggtgcaggctgtggtctaccacgggggctatcttccctttcgggaccccaacagcgaggagaacagcaacgatattgccctggtccacctctccagtcccctgcccctcacagaatacatccagcctgtgtgcctcccagctgccggccaggccctggtggatggcaagatctgtaccgtgacgggctggggcaacacgcagtactatggccaacaggccggggtactccaggaggctcgagtccccataatcagcaatgatgtctgcaatggcgctgacttctatggaaaccagatcaagcccaagatgttctgtgctggctaccccgagggtggcattgatgcctgccagggcgacagcggtggtccctttgtgtgtgaggacagcatctctcggacgccacgttggcggctgtgtggcattgtgagttggggcactggctgtgccctggcccagaagccaggcgtctacaccaaagtcagtgacttccgggagtggatcttccaggccataaagactcactccgaagccagcggcatggtgacccagctctgaccggtggcttctcgctgcgcagcctccagggcccgaggtgatcccggtggtgggatccacgctgggccgaggatgggacgtttttcttcttgggcccggtccacaggtccaaggacaccctccctccagggtcctctcttccacagtggcgggcccactcagccccgagaccacccaacctcaccctcctgacccccatgtaaatattgttctgctgtctgggactcctgtctaggtgcccctgatgatgggatgctctttaaataataaagatggttttgattaaaaaaaaaac

SEQ ID NO: 63444 - DNA, 1707 bp, Homo sapiens
gctgtacggtccggagttctttggatgtgaggcagcctggcctagcaggccccacgccaccgcctctgcctccaggccgcccgctgctgcggggccaccatgctcctgcccaggcctggagactgacccgaccccggcactacctcgaggctccgcccccacctgctggaccccagggtcccaccctggcccaggaggtcagccagggaatcattaacaagaggcagtgacatggcgcagaaggaggtgcaggtcagctctgcggacgctcggctcatggtctttgacaagacggaagggacgtggcggctgctgtgctcctcgcgctccaacgccagggtagccggactcagctgcgaggagatgggcttcctcaggtactgggggccctcggaggggtgggagccgggaggggctggggagcaggcctaacccctgccccgcccagggcactgacccactccgagctggacgtgcgaacggcgggcgccaatggcacgtcgggcttcttctgtgtggacgaggggaggctgccccacacccagaggctgctggaggtcatctccgtgtgtgattgccccagaggccgtttcttggccgccatctgccaagactgtggccgcaggaagctgcccgtggaccgcatcgtgggaggccgggacaccagcttgggccggtggccgtggcaagtcagccttcgctatgatggagcacacctctgtgggggatccctgctctccggggactgggtgctgacagccgcccactgcttcccggagcggaaccgggtcctgtcccgatggcgagtgtttgccggtgccgtggcccaggcctctccccacggtctgcagctgggggtgcaggctgtggtctaccacgggggctatcttccctttcgggaccccaacagcgaggagaacagcaacgatattgccctggtccacctctccagtcccctgcccctcacagaatacatccagcctgtgtgcctcccagctgccggccaggccctggtggatggcaagatctgtaccgtgacgggctggggcaacacgcagtactatggccaacaggccggggtactccaggaggctcgagtccccataatcagcaatgatgtctgcaatggcgctgacttctatggaaaccagatcaagcccaagatgttctgtgctggctaccccgagggtggcattgatgcctgccagggcgacagcggtggtccctttgtgtgtgaggacagcatctctcggacgccacgttggcggctgtgtggcattgtgagttggggcactggctgtgccctggcccagaagccaggcgtctacaccaaagtcagtgacttccgggagtggatcttccaggccataaagactcactccgaagccagcggcatggtgacccagctctgaccggtggcttctcgctgcgcagcctccagggcccgaggtgatcccggtggtgggatccacgctgggccgaggatgggacgtttttcttcttgggcccggtccacaggtccaaggacaccctccctccagggtcctctcttccacagtggcgggcccactcagccccgagaccacccaacctcaccctcctgacccccatgtaaatattgttctgctgtctgggactcctgtctaggtgcccctgatgatgggatgctctttaaataataaagatggttttgattaaaaaaaaaac

SEQ ID NO: 63445 - DNA, 1817 bp, Homo sapiens
atggtactgcgtcggaagtcgtgtgatgtgaggcagcctggcctagcaggccccacgccaccgcctctgcctccaggccgcccgctgctgcggggccaccatgctcctgcccaggcctggagactgacccgaccccggcactacctcgaggctccgcccccacctgctggaccccagggtcccaccctggcccaggaggtcagccagggaatcattaacaagaggcagtgacatggcgcagaaggagggtggccggactgtgccatgctgctccagacccaaggtggcagctctcactgcggggaccctgctacttctgacagccatcggggcggcatcctgggccattgtggctgttctcctcaggagtgaccaggagccgctgtacccagtgcaggtcagctctgcggacgctcggctcatggtctttgacaagacggaagggacgtggcggctgctgtgctcctcgcgctccaacgccagggtagccggactcagctgcgaggagatgggcttcctcagggcactgacccactccgagctggacgtgcgaacggcgggcgccaatggcacgtcgggcttcttctgtgtggacgaggggaggctgccccacacccagaggctgctggaggtcatctccgtgtgtgattgccccagaggccgtttcttggccgccatctgccaagactgtggccgcaggaagctgcccgtggaccgcatcgtgggaggccgggacaccagcttgggccggtggccgtggcaagtcagccttcgctatgatggagcacacctctgtgggggatccctgctctccggggactgggtgctgacagccgcccactgcttcccggagcggaaccgggtcctgtcccgatggcgagtgtttgccggtgccgtggcccaggcctctccccacggtctgcagctgggggtgcaggctgtggtctaccacgggggctatcttccctttcgggaccccaacagcgaggagaacagcaacgatattgccctggtccacctctccagtcccctgcccctcacagaatacatccagcctgtgtgcctcccagctgccggccaggccctggtggatggcaagatctgtaccgtgacgggctggggcaacacgcagtactatggccaacaggccggggtactccaggaggctcgagtccccataatcagcaatgatgtctgcaatggcgctgacttctatggaaaccagatcaagcccaagatgttctgtgctggctaccccgagggtggcattgatgcctgccagggcgacagcggtggtccctttgtgtgtgaggacagcatctctcggacgccacgttggcggctgtgtggcattgtgagttggggcactggctgtgccctggcccagaagccaggcgtctacaccaaagtcagtgacttccgggagtggatcttccaggccataaagacctcgggagcccccagctgtctttccccagactcaactcactccgaagccagcggcatggtgacccagctctgaccggtggcttctcgctgcgcagcctccagggcccgaggtgatcccggtggtgggatccacgctgggccgaggatgggacgtttttcttcttgggcccggtccacaggtccaaggacaccctccctccagggtcctctcttccacagtggcgggcccactcagccccgagaccacccaacctcaccctcctgacccccatgtaaatattgttctgctgtctgggactcctgtctaggtgcccctgatgatgggatgctctttaaataataaagatggttttgattaaaaaaaaaac

SEQ ID NO: 63446 - DNA, 2566 bp, Homo sapiens
gctgtacggtccggagttctttggatgtgaggcagcctggcctagcaggccccacgccaccgcctctgcctccaggccgcccgctgctgcggggccaccatgctcctgcccaggcctggagactgacccgaccccggcactacctcgaggctccgcccccacctgctggaccccagggtaaggacaagggcccccagactcacagttccagccctgaggacaggggttccctcatccccccacccagcctaatgcccacctcctaatagaggggttcctggggacctgaagagggggcactatgacgtccccccaagcacctaggtgttctgtcctgctcttccttcagactcagccgttggaccccagtcctttcctccccagacccaggagttccagccctcaggcccctcctccctcatactagggagtcctggcccccaaattcctcctttcccaagacttatgatttcaggtcctcagctgtctcctccctcaaaccgggatcctcagtcccctgctccaccaggctcaggcatgggggtccccatccctgcaaatccaggcgtccccccgctgctggtcagacactgaccccatccttgaacccagcccaatctgcgtccgtgatcacggcgtgctctggccaaggcccagtccctacagcctgcctggatggacgcctgggactgggggcgccaggactgggctgggctgggctcccccaggccctgcctccccgtccatctcctcacaggtcgtcccaccctggcccaggaggtcagccagggaatcattaacaagaggcagtgacatggcgcagaaggagggtggccggactgtgccatgctgctccagacccaaggtggcagctctcactgcggggaccctgctacttctgacagccatcggggcggcatcctgggccattgtggctgttctcctcaggagtgaccaggagccgctgtacccagtgcaggtcagctctgcggacgctcggctcatggtctttgacaagacggaagggacgtggcggctgctgtgctcctcgcgctccaacgccagggtagccggactcagctgcgaggagatgggcttcctcaggtactgggggccctcggaggggtgggagccgggaggggctggggagcaggcctaacccctgccccgcccagggcactgacccactccgagctggacgtgcgaacggcgggcgccaatggcacgtcgggcttcttctgtgtggacgaggggaggctgccccacacccagaggctgctggaggtcatctccgtgtggtgaggagggcagcgggcaggtggggcaacacctcagacccccaaggcactccctctccccgttttccttccacctgtcttaactggtctctatttcctttctttctgtgtctccaatcccatctctcccagtgattgccccagaggccgtttcttggccgccatctgccaagactgtggccgcaggaagctgcccgtggaccgcatcgtgggaggccgggacaccagcttgggccggtggccgtggcaagtcagccttcgctatgatggagcacacctctgtgggggatccctgctctccggggactgggtgctgacagccgcccactgcttcccggagcggaaccgggtcctgtcccgatggcgagtgtttgccggtgccgtggcccaggcctctccccacggtctgcagctgggggtgcaggctgtggtctaccacgggggctatcttccctttcgggaccccaacagcgaggagaacagcaacgatattgccctggtccacctctccagtcccctgcccctcacagaatacatccagcctgtgtgcctcccagctgccggccaggccctggtggatggcaagatctgtaccgtgacgggctggggcaacacgcagtactatggccaacaggccggggtactccaggaggctcgagtccccataatcagcaatgatgtctgcaatggcgctgacttctatggaaaccagatcaagcccaagatgttctgtgctggctaccccgagggtggcattgatgcctgccagggcgacagcggtggtccctttgtgtgtgaggacagcatctctcggacgccacgttggcggctgtgtggcattgtgagttggggcactggctgtgccctggcccagaagccaggcgtctacaccaaagtcagtgacttccgggagtggatcttccaggccataaagactcactccgaagccagcggcatggtgacccagctctgaccggtggcttctcgctgcgcagcctccagggcccgaggtgatcccggtggtgggatccacgctgggccgaggatgggacgtttttcttcttgggcccggtccacaggtccaaggacaccctccctccagggtcctctcttccacagtggcgggcccactcagccccgagaccacccaacctcaccctcctgacccccatgtaaatattgttctgctgtctgggactcctgtctaggtgcccctgatgatgggatgctctttaaataataaagatggttttgattaaaaaaaaaac

SEQ ID NO: 63447 - DNA, 686 bp, Homo sapiens
cagcttgggccggtggccgtggcaagtcagccttcgctatgatggagcacacctctgtgggggatccctgctctccggggactgggtgctgacagccgcccactgcttcccggagtgagtgccccccaatggcgctgatgatggggaggcagaggagcggagagacagtggggaggagggcggattgtgcccaggcaggtggccaccctccacccctttccctggtaggcggaaccgggtcctgtcccgatggcgagtgtttgccggtgccgtggcccaggcctctccccacggtctgcagctgggggtgcaggctgtggtctaccacgggggctatcttccctttcgggaccccaacagcgaggagaacagcaacgatattgccctggtccacctctccagtcccctgcccctcacaggtaagtctaagggctgagccatggggcttgaggacccgaggccaggaggacagaggaggggaccaggggcacaaggcaatcaacttatggctcaggcatccttggcaataaggggaatgatctcgagggagcacaaagtgggccttaactatcaatgatcagtgcagccaatttggaaaatttgccagcatttccccaagaagtatacataaagttaccattggacccaacacttccactcccaggacaggaggtatatacctaaga

SEQ ID NO: 63448 - DNA, 2377 bp, Homo sapiens
tcgagcccgctttccagggaccctacctgagggcccacaggtgaggcagcctggcctagcaggccccacgccaccgcctctgcctccaggccgcccgctgctgcggggccaccatgctcctgcccaggcctggagactgacccgaccccggcactacctcgaggctccgcccccacctgctggaccccagggtaaggacaagggcccccagactcacagttccagccctgaggacaggggttccctcatccccccacccagcctaatgcccacctcctaatagaggggttcctggggacctgaagagggggcactatgacgtccccccaagcacctaggtgttctgtcctgctcttccttcagactcagccgttggaccccagtcctttcctccccagacccaggagttccagccctcaggcccctcctccctcatactagggagtcctggcccccaaattcctcctttcccaagacttatgatttcaggtcctcagctgtctcctccctcaaaccgggatcctcagtcccctgctccaccaggctcaggcatgggggtccccatccctgcaaatccaggcgtccccccgctgctggtcagacactgaccccatccttgaacccagcccaatctgcgtccgtgatcacggcgtgctctggccaaggcccagtccctacagcctgcctggatggacgcctgggactgggggcgccaggactgggctgggctgggctcccccaggccctgcctccccgtccatctcctcacaggtcgtcccaccctggcccaggaggtcagccagggaatcattaacaagaggcagtgacatggcgcagaaggagggtggccggactgtgccatgctgctccagacccaaggtggcagctctcactgcggggaccctgctacttctgacagccatcggggcggcatcctgggccattgtggctgttctcctcaggagtgaccaggagccgctgtacccagtgcaggtcagctctgcggacgctcggctcatggtctttgacaagacggaagggacgtggcggctgctgtgctcctcgcgctccaacgccagggtagccggactcagctgcgaggagatgggcttcctcagggcactgacccactccgagctggacgtgcgaacggcgggcgccaatggcacgtcgggcttcttctgtgtggacgaggggaggctgccccacacccagaggctgctggaggtcatctccgtgtgtgattgccccagaggccgtttcttggccgccatctgccaagactgtggccgcaggaagctgcccgtggaccgcatcgtgggaggccgggacaccagcttgggccggtggccgtggcaagtcagccttcgctatgatggagcacacctctgtgggggatccctgctctccggggactgggtgctgacagccgcccactgcttcccggagcggaaccgggtcctgtcccgatggcgagtgtttgccggtgccgtggcccaggcctctccccacggtctgcagctgggggtgcaggctgtggtctaccacgggggctatcttccctttcgggaccccaacagcgaggagaacagcaacgatattgccctggtccacctctccagtcccctgcccctcacagaatacatccagcctgtgtgcctcccagctgccggccaggccctggtggatggcaagatctgtaccgtgacgggctggggcaacacgcagtactatggccaacaggccggggtactccaggaggctcgagtccccataatcagcaatgatgtctgcaatggcgctgacttctatggaaaccagatcaagcccaagatgttctgtgctggctaccccgagggtggcattgatgcctgccagggcgacagcggtggtccctttgtgtgtgaggacagcatctctcggacgccacgttggcggctgtgtggcattgtgagttggggcactggctgtgccctggcccagaagccaggcgtctacaccaaagtcagtgacttccgggagtggatcttccaggccataaagactcactccgaagccagcggcatggtgacccagctctgaccggtggcttctcgctgcgcagcctccagggcccgaggtgatcccggtggtgggatccacgctgggccgaggatgggacgtttttcttcttgggcccggtccacaggtccaaggacaccctccctccagggtcctctcttccacagtggcgggcccactcagccccgagaccacccaacctcaccctcctgacccccatgtaaatattgttctgctgtctgggactcctgtctaggtgcccctgatgatgggatgctctttaaataataaagatggttttgattaaaaaaaaaac

SEQ ID NO: 63449 - DNA, 1853 bp, Homo sapiens
  misc_feature (405)..(405): n is a, c, g, or t
gcacgacagctcagctgttgaggggccaacatgctcgtgtacagggctggcatagtgaaccgaggccgcgcattatgtctaggcttctacccctagcgtgactggaccgctcagtggttcaccaaccgctcggtgcacatgggagagatacacgtcgcataggcaattgcagtatatctaatgatgagacaggaagaccattggctgtcatgatagggtaggtgatcggtacagtgagcgtagctgacaccatagccttgacctacgcagaattccaaaaggcttgcgtaagggtcatacagtattacagagaggtacccatggctgatatacttggatgtcacaatctaggcgtggatattgtgggcctcgcttgttaggacgtgtttcgtcttacacgtgagntgatgccatgtgagtgacaacatgtatattactagcatgacggagtcatacttcatgtatgcaggtcagctctgcggacgctcggctcatggtctttgacaagacggaagggacgtggcggctgctgtgctcctcgcgctccaacgccagggtagccggactcagctgcgaggagatgggcttcctcagggcactgacccactccgagctggacgtgcgaacggcgggcgccaatggcacgtcgggcttcttctgtgtggacgaggggaggctgccccacacccagaggctgctggaggtcatctccgtgtgtgattgccccagaggccgtttcttggccgccatctgccaagactgtggccgcaggaagctgcccgtggaccgcatcgtgggaggccgggacaccagcttgggccggtggccgtggcaagtcagccttcgctatgatggagcacacctctgtgggggatccctgctctccggggactgggtgctgacagccgcccactgcttcccggagcggaaccgggtcctgtcccgatggcgagtgtttgccggtgccgtggcccaggcctctccccacggtctgcagctgggggtgcaggctgtggtctaccacgggggctatcttccctttcgggaccccaacagcgaggagaacagcaacgatattgccctggtccacctctccagtcccctgcccctcacagaatacatccagcctgtgtgcctcccagctgccggccaggccctggtggatggcaagatctgtaccgtgacgggctggggcaacacgcagtactatggccaacaggccggggtactccaggaggctcgagtccccataatcagcaatgatgtctgcaatggcgctgacttctatggaaaccagatcaagcccaagatgttctgtgctggctaccccgagggtggcattgatgcctgccagggcgacagcggtggtccctttgtgtgtgaggacagcatctctcggacgccacgttggcggctgtgtggcattgtgagttggggcactggctgtgccctggcccagaagccaggcgtctacaccaaagtcagtgacttccgggagtggatcttccaggccataaagactcactccgaagccagcggcatggtgacccagctctgaccggtggcttctcgctgcgcagcctccagggcccgaggtgatcccggtggtgggatccacgctgggccgaggatgggacgtttttcttcttgggcccggtccacaggtccaaggacaccctccctccagggtcctctcttccacagtggcgggcccactcagccccgagaccacccaacctcaccctcctgacccccatgtaaatattgttctgctgtctgggactcctgtctaggtgcccctgatgatgggatgctctttaaataataaagatggttttgattaaaaaaaaaac

SEQ ID NO: 63450 - DNA, 2002 bp, Homo sapiens
atggtactgcgtcggaagtcgtgtgatgtgaggcagcctggcctagcaggccccacgccaccgcctctgcctccaggccgcccgctgctgcggggccaccatgctcctgcccaggcctggagactgacccgaccccggcactacctcgaggctccgcccccacctgctggaccccagggtcccaccctggcccaggaggtcagccagggaatcattaacaagaggcagtgacatggcgcagaaggagggtggccggactgtgccatgctgctccagacccaaggtggcagctctcactgcggggaccctgctacttctgacagccatcggggcggcatcctgggccattgtggctgttctcctcaggagtgaccaggagccgctgtacccagtgcaggtcagctctgcggacgctcggctcatggtctttgacaagacggaagggacgtggcggctgctgtgctcctcgcgctccaacgccagggtagccggactcagctgcgaggagatgggcttcctcagggcactgacccactccgagctggacgtgcgaacggcgggcgccaatggcacgtcgggcttcttctgtgtggacgaggggaggctgccccacacccagaggctgctggaggtcatctccgtgtgtgattgccccagaggccgtttcttggccgccatctgccaagactgtggccgcaggaagctgcccgtggaccgcatcgtgggaggccgggacaccagcttgggccggtggccgtggcaagtcagccttcgctatgatggagcacacctctgtgggggatccctgctctccggggactgggtgctgacagccgcccactgcttcccggagcggaaccgggtcctgtcccgatggcgagtgtttgccggtgccgtggcccaggcctctccccacggtctgcagctgggggtgcaggctgtggtctaccacgggggctatcttccctttcgggaccccaacagcgaggagaacagcaacgatattgccctggtccacctctccagtcccctgcccctcacagaatacatccagcctgtgtgcctcccagctgccggccaggccctggtggatggcaagatctgtaccgtgacgggctggggcaacacgcagtactatggccaacaggccggggtactccaggaggctcgagtccccataatcagcaatgatgtctgcaatggcgctgacttctatggaaaccagatcaagcccaagatgttctgtgctggctaccccgagggtggcattgatgcctgccagggcgacagcggtggtccctttgtgtgtgaggacagcatctctcggacgccacgttggcggctgtgtggcattgtgagttggggcactggctgtgccctggcccagaagccaggcgtctacaccaaagtcagtgacttccgggagtggatcttccaggccataaaggtgaaagttgggtccagatgggagccagggtggggacgtttgggtgtctaatgggggaagggaggcagagatttgttttaggaaacctacgctcaggcctagaagagggccccccttgggaacagatggactttgaagggttcctggggaagggaagccagtggtgggacgtggaagcctctcagacctcgggagcccccagctgtctttccccagactcaactcactccgaagccagcggcatggtgacccagctctgaccggtggcttctcgctgcgcagcctccagggcccgaggtgatcccggtggtgggatccacgctgggccgaggatgggacgtttttcttcttgggcccggtccacaggtccaaggacaccctccctccagggtcctctcttccacagtggcgggcccactcagccccgagaccacccaacctcaccctcctgacccccatgtaaatattgttctgctgtctgggactcctgtctaggtgcccctgatgatgggatgctctttaaataataaagatggttttgattaaaaaaaaaac

SEQ ID NO: 63451 - DNA, 416 bp, Homo sapiens
tggccccagcatggtgtctgttgcaggtggccggactgtgccatgctgctccagacccaaggtggcagctctcactgcggggaccctgctacttctgacagccatcggggcggcatcctgggccattggtgagagcggttcctgtgcctctgacctcccctggcccctgcagcctccagcctgcctgccctcacccctcccttctctgcagtggctgttctcctcaggagtgaccaggagccgctgtacccaggtgagtggagcaggctgggaccctctgggggagccctggaggacacgtgtatctggcgggagctcaacaagcgtatttgttgaataaatgcacaaatgcatgcagaaatgctaatcataatagtgcatttgtattgagtgcctgctatgtaccaggcactatt

SEQ ID NO: 63452 - DNA, 355 bp, Homo sapiens
cttagtggcctagagagcagaagcctagggcccattttctgtcccaactttgcccagatcccccctctactgaaccttgtccaggtctgaccccacactgaaatacctcacagaactgcttagagaagatcagagtttggagtagctattcctactgcctctccagagctggtgctcccaatttcctgaaacacaaaagctgataaatggagaaaggcaatgtactttgaatttaatgtacttaaattattttatgtaaaattaaaaccagtatttctagagacatcccatccagcaacctgttctccatctttgcagtttcagtggatttttcacaagtctcaaagtaactata

SEQ ID NO: 63453 - DNA, 258 bp, Homo sapiens
aatcttgtattatgttaatattaaaatctaataaaaatactgtgaagtattttcatttttgtgtataggcacaaatatatcatttaaatattagtaatagaattgaacaattaactataaaatattatatcataataaactgttgttttatcccaagggtagagggactctaagtaaaactgtaacagaatcaaaaggttactgaaagttagaatgggttgagaactattttaacttgggaactttaaagagtaatct

SEQ ID NO: 63454 - DNA, 253 bp, Homo sapiens
gtggtgcctctggaacatctttgcaggtcttgattcaaaagctgccattatttacaatatagattctaaactctatttgaagtccaacagaaccaagtactaagtagctagcatgtattgaacacatacaggatgccaagacctgttgtaagccttttatgtattaggtcattaaatccctattacaatcttagaatatgtactattattacagcaacccattttacaggcaatgaaactggacaagattatc

SEQ ID NO: 63455 - DNA, 978 bp, Homo sapiens
gctgggttgagcagagctgggctgggctgggctgagttgagccaggctgacctgggctgagccaagctgggttgagccaaactgggctgggctgggctgagccaggctggattgagctgggctgggctgggctaagctgagccgagcaaggttgagcgatggcctgggctgggatgaactggattgagctggcctgggctgggatgaactggaggacatggcactgggccaatcttcatgatcttgttggacatagatggatagcctcagctgagtctacactgcgttccccatcacacccaccctccctatactcactcccaggcctgggttgtctgcctggggagacttcagggtagctggagtgtgactgagctgggggcagcagaagctgggctggagggactctattggctgcctgcggggtgtgtggctccaggcttcacattcaggtatgcaacctgggccctccagctgcatgtgctgggagctgagtgtgtgcagcacctacgtgctgatgcctcgggggaaagcaggcctggtccacccaaacctgagccctcagccattctgagcagggagccaggggcagtcaggcctcagagtgcagcagggcagccagctgaatggtggcagggatggctcagcctgctccaggagaccccaggtctgtccaggtgttcagtgctgggccctgcagcaggatgggctgaggcctgcagccccagcagccttggacaaagacctgaggcctcaccacggccccgccacccctgatagccatgacagtctgggctttggaggcctgcaggtgggctcggccttggtggggcagccacagcgggacgcaagtagtgagggcactcagaacgccactcagccctgacaggcagggcacgaggaggcagctcctcaccctccctttctcttttgtcctgcgggtcctcagggagtgcatccgccccaacccttttcccc

SEQ ID NO: 63456 - DNA, 242 bp, Homo sapiens
agataacggctcccatcccatgctagagactccatctctaatttccccaagtctgtcaatgagaggcagggactgaaatcccaagttctgtctcaccggatattttccaggaatgcctctcttccaaatcatcagcgacatttaacatgaccctgagcagcaaacttctgccccagaggaaagcagaaaaccaatttatgtaaaattaaaagcgatttgcttgatccatcacttgcttccac

SEQ ID NO: 63457 - DNA, 305 bp, Homo sapiens
agaaatctctgaggtattgaagaattagatatccagttagtgcaacatggtatttaaaatttctagctctcaacaaacaattacaaaacatacaaaaaaagaggaaaacatggtccattcacagaaaaaaagaagtttacagaaatcttttctaagaaagaccagacattggaattattagtcaatggcattaagtcaactgccttaaatatgtttaatgagataaggaaaaccataaaccaagaactaaaaggaatcagtagaattatatatgaacaaagaaagaatatcaattaataaataga

SEQ ID NO: 63458 - DNA, 339 bp, Homo sapiens
gacggagtctcactctgtcaccaggctggagtgcagtggcgaaatctcggctcgctgcaacctccaaaaagaaaaagaaaaatgttatatagaattcataaacacgttctaaaagccagtgcatttgtttagcatatgtgtcaaatgcaaacagaagcaatagtgatattcctttctcattctataaccattggggaaacaatataccaacattcttaggcattaaagagatccctcttatcttgttgattaattctaattctctcattctaaatctgagtgctactcccagataggacataatacttactgggatgggcactgcttggagtggcagag

SEQ ID NO: 63459 - DNA, 700 bp, Homo sapiens
aaggacattatctcagtgacattcaagcctgcagtgcaaagagcttctccggtaagaaagttaacagggatttctaacatctggagtgcacaagtgttacacaaggaaaagagaagtttgtgtcaattaaagctagaaaagatagtgttaaaaagttggaaaaataaaagaaatctaaagctcgagtctaacataaaatccttctcacagcttagaaaagctttcctctgtgttgacaggtcaaagagcaactctgcaaatgagctaataattgtcaaaactttagccagacctttccaccatgtgccaggactaagtggctttacccagagaacagcagcttgaaaaagtcttggggttcaaatagatttgaaactacctcattgttttgtgaactaaggaaaattaaatagctaggcaacctccaaaaagaaaaagaaaaatgttatatagaattcataaacacgttctaaaagccagtgcatttgtttagcatatgtgtcaaatgcaaacagaagcaatagtgatattcctttctcattctataaccattggggaaacaatataccaacattcttaggcattaaagagatccctcttatcttgttgattaattctaattctctcattctaaatctgagtgctactcccagataggacataatacttactgggatgggcactgcttggagtggcagag

SEQ ID NO: 63460 - DNA, 1676 bp, Homo sapiens
gacagagctgagacagccacccagggggtccactccaggacagactgtgccgcctgagagtgcagaggatgcatcttatcgactacctgctcctcctgctggttggactactggccctttctcatggccagctgcacgttgagcatgatggtgagagttgcagtaacagctcccaccagcagattctggagacaggtgagggctcccccagcctcaagatagcccctgccaatgctgactttgccttccgcttctactacctgatcgcttcggagaccccggggaagaacatctttttctccccgctgagcatctcggcggcctacgccatgctttccctgggggcctgctcacacagccgcagccagatccttgagggcctgggcttcaacctcaccgagctgtctgagtccgatgtccataggggcttccagcacctcctgcacactctcaacctccccggccatgggctggaaacacgcgtgggcagtgctctgttcctgagccacaacctgaagttccttgcaaaattcctgaatgacaccatggccgtctatgaggctaaactcttccacaccaacttctacgacactgtgggcacaatccagcttatcaacgaccacgtcaagaaggaaactcgagggaagattgtggatttggtcagtgagctcaagaaggacgtcttgatggtgctggtgaattacatttacttcaaagccctgtgggagaaaccattcatttcctcaaggaccactcccaaagacttctatgttgatgagaacacaacagtccgggtgcccatgatgctgcaggaccaggagcatcactggtatcttcatgacagatacttgccctgctcggtgctacggatggattacaaaggagacgcaaccgtgtttttcattctccctaaccaaggcaaaatgagggagattgaagaggttctgactccagagatgctaatgaggtggaacaacttgttgcggaagaggaatttttacaagaagctagagttgcatcttcccaagttctccatttctggctcctatgtattagatcagattttgcccaggctgggcttcacggatctgttctccaagtgggctgacttatccggcatcaccaaacagcaaaaactggaggcatccaaaagtttccacaaggccaccttggacgtggatgaggctggcaccgaggctgcagcagccaccagcttcgcgatcaaattcttctctgcccagaccaatcgccacatcctgcgattcaaccggcccttccttgtggtgatcttttccaccagcacccagagtgtcctctttctgggcaaggtcgtcgaccccacgaaaccatagccctcccagggctgctcatctgttccaagcaggaggatgtggcaggggagggctgggagtgagtagctctgtgtttagagttggggacaaggatgacaccgaaggtccaggagtccaggacagcaggtgctggccggtggggagcggggaggggcactgagatgggcagggcctggacattccacaccctggtgctgtgcagcctctggcagagcatccgacctcttggagcaagtttctgcctctggaaagggggcgggcccttttcacaacaggctggttgtaccgagtaaacaacacgatgccatgaagaccctgattcag

SEQ ID NO: 63461 - DNA, 304 bp, Homo sapiens
attctcttccctcccataggcctgagagtgcagaggatgcatcttatcgactacctgctcctcctgctggttggactactggccctttctcatggccagctgcacgttgagcatgatggtgagagttgcagtaacagctcccaccagcagattctggagacaggtgagggctcccccagcctcaagatagcccctgccaatgctgactttgccttccgcttctactacctgatcgcttcggagaccccggggaagaacatctttttctccccgctgagcatctcggcggcctacgccatgcttt

SEQ ID NO: 63462 - DNA, 379 bp, Homo sapiens
agcctcaagatagcccctgccaatgctgactttgccttccgcttctactacctgatcgcttcggagaccccggggaagaacatctttttctccccgctgagcatctcggcggcctacgccatgctttccctgggggcctgctcacacagccgcagccagatccttgagggcctgggcttcaacctcaccgagctgtctgagtccgatgtccataggggcttccagcacctcctgcacactctcaacctccccggccatgggctggaaacacgcgtgggcagtgctctgttcctgagccacaacctgaagttccttgcaaaattcctgaatgacaccatggccgtctatgaggctaaactcttccacaccaacttctacg

SEQ ID NO: 63463 - DNA, 1622 bp, Homo sapiens
gacagagctgagacagccacccagggggtccactccaggacagactgtgccgcctgagagtgcagaggatgcatcttatcgactacctgctcctcctgctggttggactactggccctttctcatggccagctgcacgttgagcatgatggtgagagttgcagtaacagctcccaccagcagattctggagacaggtgagggctcccccagcctcaagatagcccctgccaatgctgactttgccttccgcttctactacctgatcgcttcggagaccccggggaagaacatctttttctccccgctgagcatctcggcggcctacgccatgctttccctgggggcctgctcacacagccgcagccagatccttgagggcctgggcttcaacctcaccgagctgtctgagtccgatgtccataggggcttccagcacctcctgcacactctcaacctccccggccatgggctggaaacacgcgtgggcagtgctctgttcctgagccacaacctgaagttccttgcattctacgacactgtgggcacaatccagcttatcaacgaccacgtcaagaaggaaactcgagggaagattgtggatttggtcagtgagctcaagaaggacgtcttgatggtgctggtgaattacatttacttcaaagccctgtgggagaaaccattcatttcctcaaggaccactcccaaagacttctatgttgatgagaacacaacagtccgggtgcccatgatgctgcaggaccaggagcatcactggtatcttcatgacagatacttgccctgctcggtgctacggatggattacaaaggagacgcaaccgtgtttttcattctccctaaccaaggcaaaatgagggagattgaagaggttctgactccagagatgctaatgaggtggaacaacttgttgcggaagaggaatttttacaagaagctagagttgcatcttcccaagttctccatttctggctcctatgtattagatcagattttgcccaggctgggcttcacggatctgttctccaagtgggctgacttatccggcatcaccaaacagcaaaaactggaggcatccaaaagtttccacaaggccaccttggacgtggatgaggctggcaccgaggctgcagcagccaccagcttcgcgatcaaattcttctctgcccagaccaatcgccacatcctgcgattcaaccggcccttccttgtggtgatcttttccaccagcacccagagtgtcctctttctgggcaaggtcgtcgaccccacgaaaccatagccctcccagggctgctcatctgttccaagcaggaggatgtggcaggggagggctgggagtgagtagctctgtgtttagagttggggacaaggatgacaccgaaggtccaggagtccaggacagcaggtgctggccggtggggagcggggaggggcactgagatgggcagggcctggacattccacaccctggtgctgtgcagcctctggcagagcatccgacctcttggagcaagtttctgcctctggaaagggggcgggcccttttcacaacaggctggttgtaccgagtaaacaacacgatgccatgaagaccctgattcag

SEQ ID NO: 63464 - DNA, 666 bp, Homo sapiens
gctcactgcagctgggctcaagcaagcctcccacctcagcctcccaactagctgggacttcaggcgcgcaccaccacgcttggctaattttttatttttagtagagttgggggtcttgatttgttacccaggctggtctggaatgccccaagtgattctcccacttcgcccgcccaaagtactgggagccaccacgccgggctagactgtggggtttttggggggcaagaattgtactcatatctctgtttccacagtgggtcttacactgtggacaaacagcagctgatgttctcacccggccttgttctaagaggactccaaaaagcaagtcgtagccccagtgactgggaaaggcttccccgggagagcggccgacacagctgccgcagtagtaagggtttatttatcaagactgatttatttatcagttcaagacacagttacacagagtgtgggggatggttcatcagcagctggcacgtccagtggcgcgtgtgcctcgggaaggcctgggagggggacacaggtgctccgcggggaaagctgcccccaccccagcccaaagaagccttccaagctccatcagtcatgcagtcatgtacttttcctcatcagcacaaaccccgcttccttgaagagaagcgtgaggctgggcacggtggc

SEQ ID NO: 63465 - DNA, 439 bp, Homo sapiens
ctgaataatggagtcagacactttccacagcatttctagaacagaatcttggagaatggcctgggctgggtctcaggctgaggatcaaaggttggtgtgttcactcgatgtagtcatctcagatttctgccttcattccctcagttttgacctacctactttgtggacttacatggtttactttgtaagccttagcaaatgaagctacgattaatttgtacgtggaaaaccttttgtctttttgattaaagatccagacctcaggatgtacttcattcagaggctacatttgcagaagaaaagtccgtttaaaatgaggaaaacaaagttgttaatagttaaaactaactagccttattgggactggcaaaaatactgaaaactttgataaggctaataaataccttgtttatgaacatcagtcattgaccttgtaagc

SEQ ID NO: 63466 - DNA, 321 bp, Homo sapiens
ggagaaaccagctataatcaggctggattcaaggggggctgcaggtcagggtcctgctgcttcctgtgactctgcggcctcattaataaacacgcactgagtctaggttccccacctccaagctcaggggctcacatctgtctgagtgctgacggcaggaaaggagtggaagtgaccgaggaagaaggatggaacagccaggcagcggctgagaacagcttggagccgacataactgtgtgataggaaaagccaaagttgcagggaaccggggatgggaatccatccagatttttcagtttaaactgattgggggaaaaaa

SEQ ID NO: 63467 - DNA, 1292 bp, Homo sapiens
  misc_feature (72)..(72): n is a, c, g, or t
  misc_feature (104)..(104): n is a, c, g, or t
  misc_feature (651)..(651): n is a, c, g, or t
cggagatcacagagcaatattattctctggatttattgggtttgctgcattctgttagcatcattcatattnttctcccatgggtaccactttcctctcttttnctaataccaagatatggagactcatttatgccgtggagtgtgatgctgggaaatgaatgcttgcttattacctctctccacaggacctttcatgaccatacgtcgatgtctgccgcctcagtataaataggcacattcagaaatgtgttctctagtgaaggacatgttggcttggtggaaagcacagggacttcacgtctggactgcgagtcagagctgtgcgtcatgtgcttactggctgtgtgaccttggataaatttgcctcagttttctcatttgtaaaacagacagtcgctatttctgggaatagatgagataataaggaaagaacctagaatggtacctggctcctgccagttgcacagaatgtttgttttgcagtgtgatgcgtccagtagggacacttaggggacagtgtactgtcatgctgttgccctgttttgtaagagtgactgatggctacgtgacatcaccacactccctgcaagagctgcggtgtatggcacgtggctaagctgtaggtgcacatggccttcaactccacctnagctccagccttctttttgggagaactggcctctgggtccacctatgaagcaggaaggttgattattacttaaacccatagtcttataacctcttgggaaaagattctctcaaaatgactcttgatggtcaacatgggtgtgcatttacgcagctttcattcccatcgcttcttgcaggcagtgttgttcctgattgccccagtctagtttatcgcaagggaatttctttgcggggcagtgagctcccttttggcagaagaaagagtcaagcagaggctgggaggttcccttacccacagtggtggctggctctgtagtgcctcccggctctgggttctactttcctagtctcctgcctttccgcaagtgtctccacccagctccgatagagtgggtagcatcaggagaagggagggcagggatgagtgttgtagcatctcaacatttaagagcagaggacggggggctggggaagagcatacactggggccggtgtgaggagggagaacattagaaaaaaaaagctaatgcctgctgggcttaatacgtaggtaatgggttgataggtaaatgtgtgccatggtggtttgctgcacctatgtaataaacctgcacatcctgcacatgtacctcagaactt

SEQ ID NO: 63468 - DNA, 280 bp, Homo sapiens
ggctcagtcacacagcgacgtagaggtgactggaggtatatacttgtcctcacctggatcatgctgatgtggccccaaccccacctccctacccatccccacctccctacccatccccacctccctacccatccccacctccctacccatccccacctccctacccatcctatgatgtccaaagaaaccagacagagcaaattggccgaggccaaggaacagttgacagaccatcatccccagaccaaccctagtgttggtacagcagcaagcgacacca

SEQ ID NO: 63469 - DNA, 117 bp, Homo sapiens
gaagctgggcaccatgcctccctgccactctgaggacacccaagcagcgcatgaagaggcccaggtggaaaggaattaagagccctggcaagcaacctacaacaattttcctgccat

SEQ ID NO: 63470 - DNA, 1575 bp, Homo sapiens
atgatgggctcagcaaacctcacttgtgtagacaatgtccccccaaattataaattttctatgcctcagaacgtgtctataacaacatgtttaaaaggtagaaaggatacacatcccctgtagaagagtgacctgaactggagttgcatttgacatctgatgtcagcatgagggtgctggtcaccggggacttgagtacgtactttcctttcaaaagcacaatagatcaagatacaggtacacacatagctacagatatagatccagccacagatccagattagatatagatgcatatagaagcctagaaaagccaatatggaaaactctggcagtgtttgattctgagtggcaagcatattggtgactgtaattatttcttgcagttttctatattttttagtttcccaaactgcaaaaaatacccacaacagttaccagagaaaatgctggatgccataagaaggaagaacctcaaggggcaggaggcaaagttgtcttcttggaggagggggtgttagaaataacccaggcctcctggaaaatgacccaaatacagcctggctctgccagccccaggcccttccccacccccagggcaccctttctgtcccagtagagaaggtgacctggagtcaggccttgtgtgtgctccaagcgtttggagctttaccgtgggatgtggggagccaggggtgttgtttgctggcatttctgtggctgggtctttctggctgtggagctgtgtttgtgggcagtggctgagatggaggacctggggcaggtgtctcagtgacagcgcagtatcctccagcctcttccagggccccacgctactggctacctggcaatacagtccagcagttgctgcttctctaggcccctggtgcattcagaaacctcctgaaggccagcggagggtaagccaggaacagatcatgtccattgcacttcactagctgagcgagttggttctgcccttctgatccttggtccctcagggccaggacaggcccggtgaccccataatcatgcagccgtcatgctccgtcatctgaaattcacaaggaaggcaaggattcaaaggaagatgtctgagatgctgaactccagctcagccacttgtcaactccttgaccttggacaagttacttaaattaagccttgattttttttcatctgaataaatagagataaaaatacttatttcatggacactttccatatcagtttatttggatttaacctccctagatttttttttagcacatgatagcaacttccttaataaatactgggtcccttctcctagccttccccattgctgttctttttaattccatcccacatgtcctgtgcctgaaatatcctgtgccatgtgcctgaaattccattcttctcctggaacccttaacaggccacattgctatgctccgttagtcccctgcatggcttaatgtattaggtaacatgaagcatgtaaggaagaactttctaacacaggtgctgaaatgggacaggaaatgctgatggagtgagctctttgtcaatagaagtattcaagcaaaaaaaaaa

SEQ ID NO: 63471 - DNA, 767 bp, Homo sapiens
  misc_feature (92)..(92): n is a, c, g, or t
  misc_feature (105)..(106): n is a, c, g, or t
tacagtccagcagttgctgcttctctaggcccctggtgctgttttcgcccaagagggggaaaaaaaaaacccccccctttcccccctccttnggaaaaggccagnncggagggtaagccaggaacagatcatgtccattgcacttcactagctgagcgagttggttctgcccttctgatccttggtccctcagggccaggacaggcccggtgaccccataatcatgcagccgtcatgctccgtcatctgaaattcacaaggaaggcaaggattcaaaggaagatgtctgagatgctgaactccagctcagccacttgtcaactccttgaccttggacaagttacttaaattaagccttgattttttttcatctgaataaatagagataaaaatacttatttcatggacactttccatatcagtttatttggatttaacctccctagatttttttttagcacatgatagcaacttccttaataaatactgggtcccttctcctagccttccccattgctgttctttttaattccatcccacatgtcctgtgcctgaaatatcctgtgccatgtgcctgaaattccattcttctcctggaacccttaacaggccacattgctatgctccgttagtcccctgcatggcttaatgtattaggtaacatgaagcatgtaaggaagaactttctaacacaggtgctgaaatgggacaggaaatgctgatggagtgagctctttgtcaatagaagtattcaagcaaaaaaaaaa

SEQ ID NO: 63472 - DNA, 363 bp, Homo sapiens
gattagtgaaattaatcataccttgagcatgtttgagatcttagcaattgagaggccagagagtgaaccagaaagtcagtcccgaggtcctcagctacctgggcggggctcccttacattcccatactttgtacccattgtaaaaagccagttgtatgctaggtttgtaggatatttgccagacttacagagaggcttgcttctgaagagccacgttcagaggcatggtggtgtggtactaagatcgcccagctggaggtcagaagacaggtttgaaatccaggattagcctctgactagctctttgactctaagtgagtcaggccccacgaagcctcagtttccccacctatgaaatgaaaa

SEQ ID NO: 63473 - DNA, 1593 bp, Homo sapiens
cagcacatgtccatgttggggtaaagacgtggagtggtcgtctcgcccatccgatatagagtccagaggcgcagggctcattcccaaggtcccttggccgacggcggccgggtccggcctagaccaggctcctgtgaggcagcccagcgactctgtctcctctggctctgcccacagacacactgtcacccaatgctaggagccactgcttgaggaagcctgggtttgtcactgcctgcagccacagactactcctgcctcaaaacgacgtcacgacactgcagagcaggccagctccagctgcacatggccgcctccatctctacacaactttgagtcacagaaatgtcacgtgacctgcagaagccaagggtcctcctccttgggggtctcttttactgactctgtgactcccagccggggatcttctgcccccaggggacaccgggccatgtctggggacatctgtggttgtcttgactaggggagctcctggcatggagtgggtggaggccagggatgctgctcggcaccctgcagtgcccaggacggccccacccttgagaacggttcagtcccaatgtccacagggcccagggggagacacccagcccaactcacagaagacccaggacaggtgatggtggtctatgtcaaccacctgttcatgagagagacacagggaggagagggggcacctgccaaccgtttcatgcgctggtagagaccgggaatagcttggacagattgttcctggataacacaagacagcttcctgtttaaaaaacaaaactccggcccggagcaggggctcacgcctataatcccagcactttgggaggctgaggcgggcagattacttgagcccacaagttggagaccagcctgactaacatggcgaaaccccgtctctactaaaaatacaaaaattagctgggtgtggacgcaggtgcctgtaatcccagcaacttgggaggccgaggcaggagaatcgcttgaacccgggaggcagaggttgcagtgagccgagattgcactactgcactccagcctgggcgacagagcaagacttggtctcaaaaacacacacaaaaaaccaaaactccaagcgcagagcacccagtgccatcttcgtccgaatgcagcactcctggctgggtcacggccacccctaggccagtgcctggccaggggcttctcttgtctatgaccaggcaggtcacaggcgggagggacccaggtcaggctcagctgctgccccaccggaaacagacccagcagccttgcctagaccccaggtgggtccaggtttttctattggggcagagagagtgggccaggatgggggcgtctctcagctctgcaagctggagaattaactccgggacttgagctcggggtccccgctgggcgcaggcgtgggctccagcgggaaggaagcccctcgttgggttctcagcatggacagctggatggcatcactggattccctcacctggatccggagacaaaaggggagaaaatgatgaggcagcgcccaggcctgcggggttgagtcagccgtaataacagcctgttggccctaagtgtctg

SEQ ID NO: 63474 - DNA, 665 bp, Homo sapiens
agcgggggcaggggcgtgggcggggcgtggaccagccgcgccgagcggggcctctccgggccgcgtctgtggggtcgagactgcgcggccgttgggcgtgcagcggcgccagtcggcggacgaggggcccccgggagttgctggactgagacatgagcctccaactgtgtggttgggctcggtagcacatcgtgggacttgggtgtgcgcccacagggccaggctctcagtcacccctggaaaatggtgcctggttcacagctcccgtgcatctgcctcatctctcctgatcaacgtctgtctcttgggagtagctagagttcctcatgagcttgtcctcaagcgaggcatgcatgaggcctccagccggtggtcagtgagggagttaagtggcttctccgtggaaacacagccttctgctgcagcagaggctcacccagcgtgaactgcccccagggaacactgggcgatgcctggggacattgtggttgtcacgatggggggtgctcctggcctggagtgggtggaggccagagacactgctcagcagcaccctgcagtgcccaggacggccccgtcccagagaacaatccagccccgaatgtcagcaccttccccctacccgagttgtgaaaataaaaaatgtttccagacattaccaggtg

SEQ ID NO: 63475 - DNA, 1837 bp, Homo sapiens
agcgggggcaggggcgtgggcggggcgtggaccagccgcgccgagcggggcctctccgggccgcgtctgtggggtcgagactgcgcggccgttgggcgtgcagcggcgccagtcggcggacgaggggcccccgggagttgctggactgagacatgagcctccaactgtgtggttgggctcggtagcacatcgtgggacttgggtgtgcgcccacagatggtttggccctgcagtgaccagagcagcccaagccgccaccatggtgaaattgctagtggccaaaatcctgtgcatggtgggcgtgttcttcttcatgctgctcggctccctgctccccgtgaagatcatcgagacagattttgagaaggcccatcgctcgaaaaagatcctctctctctgcaacacctttggaggaggggtgtttctggccacgtgcttcaacgctctgctgcccgctgtgagggaaaagctccagaaggtcctgagcctcggccacatcagcaccgactacccgctggccgaaaccatcctcctgctgggcttcttcatgaccgtcttcctggagcagctgatcctgaccttccgcaaggagaagccgtccttcatcgacctggagaccttcaacgccggatcggacgtgggcagcgactcggagtatgagagccccttcatggggggcgcgcggggccacgcgctgtacgtggagccccacggccacggccccagcctgagcgtgcagggcctctcgcgcgccagccccgtgcgcctgctcagcctggccttcgcgctgtcggcccactcggtctttgagggcctggccctgggcctgcaggaggagggggagaaagtggtgagcctgttcgtgggggtggccgtccacgagacactggtggccgtggccctgggcatcagcatggcccggagtgccatgcccctgcgggacgcggccaagctggcggtcaccgtaagcgccatgatccccctgggcatcggcctgggcctgggcattgagagcgcccagggcgtgccgggcagcgtggcgtccgtgctgctgcagggcctggcgggcggcaccttcctcttcatcaccttcctggagatcctggccaaggagctggaggagaagagtgaccgtctgctcaaggtcctcttcctggtgctgggctacaccgtcctggccgggatggtcttcctcaagtggtgagcggcctcgccattgtccctgccgccggagcccgccgggagccccgggccggacacaggccgcgtcccccggccgcgcgtcccccaagagcgagcactgtggccctgggccaccacctgtgcacaaggggcctcccgggaccaggctgtgcccccgatcctacaccctgagcctcagagcactgctactttttaaaatacttctttctcttaaaagtctttaccaaaaaaaaaaaaaaaaaaaaaaaaaaaaaaaaaaaaaaaaaaaaacaagaaaaacaaaagaaagaagaaaacaaaagaaacaaaggcggggggcgccacccaagaaaagaaatccaccacggaggggcccaccaacatacagaggacacagcgacgatacgtgtacaacaacagagaggtcgccccaacaaagggcgacggctgctacaaaacgacagacaaaacaaacgtgccgcgcccactaataaaaacacccacccgcgagacagagatacgaaaaaaacagcagcccaaccagagacaaaacaacgagagaagaaaaacacacctcacacaacaggctgggtggacggaaaaaacaaaatacggggcacaaaaaacaaccaccaactaaacaaatattatcacg

SEQ ID NO: 63476 - DNA, 1227 bp, Homo sapiens
agcgggggcaggggcgtgggcggggcgtggaccagccgcgccgagcggggcctctccgggccgcgtctgtggggtcgagactgcgcggccgttgggcgtgcagcggcgccagtcggcggacgaggggcccccgggagttgctggactgagacatgagcctccaactgtgtggttgggctcggtagcacatcgtgggacttgggtgtgcgcccacagatggtttggccctgcagtgaccagagcagcccaagccgccaccatggtgaaattgctagtggccaaaatcctgtgcatggtgggcgtgttcttcttcatgctgctcggctccctgctccccgtgaagatcatcgagacagattttgagaaggcccatcgctcgaaaaagatcctctctctctgcaacacctttggaggaggggtgtttctggccacgtgcttcaacgctctgctgcccgctgtgagggaaaagctccagaaggtcctgagcctcggccacatcagcaccgactacccgctggccgaaaccatcctcctgctgggcttcttcatgaccgtcttcctggagcagctgatcctgaccttccgcaaggagaagccgtccttcatcgacctggagaccttcaacgccggatcggacgtgggcagcgactcggagtatgagagccccttcatggggggcgcgcggggccacgcgctgtacgtggagccccacggccacggccccagcctgagcgtgcagggcctctcgcgcgccagccccgtgcgcctgctcagcctggccttcgcgctgtcggcccactcggtctttgagggcctggccctgggcctgcaggaggagggggagaaagtggtgagcctgttcgtgggggtggccgtccacgagacactggtggccgtggccctgggcatcagcatggcccggagtgccatgcccctgcgggacgcggccaagctggcggtcaccgtaagcgccatgatccccctgggcatcggcctgggcctgggcattgagagcgcccagggcgtgccaggccgcgtcccccggccgcgcgtcccccaagagcgagcactgtggccctgggccaccacctgtgcacaaggggcctcccgggaccaggctgtgcccccgatcctacaccctgagcctcagagcactgctactttttaaaatacttctttctcttaaaagtctttaccataccaaagctgtgtggccatgtcaacctc

SEQ ID NO: 63477 - DNA, 901 bp, Homo sapiens
agcgggggcaggggcgtgggcggggcgtggaccagccgcgccgagcggggcctctccgggccgcgtctgtggggtcgagactgcgcggccgttgggcgtgcagcggcgccagtcggcggacgaggggcccccgggagttgctggactgagacatgagcctccaactgtgtggttgggctcggtagcacatcgtgggacttgggtgtgcgcccacagatggtttggccctgcagtgaccagagcagcccaagccgccaccatggtgaaattgctagtggccaaaatcctgtgcatggtgggcgtgttcttcttcatgctgctcggctccctgctccccgtgaagatcatcgagacagattttgagaaggcccatcgctcgaaaaagatcctctctctctgcaacacctttggaggaggggtgtttctggccacgtgcttcaacgctctgctgcccgctgtgagggaaaagctccagaaggtcctgagcctcggccacatcagcaccgactacccgctggccgaaaccatcctcctgctgggcttcttcatgaccgtcttcctggagcagctgatcctgaccttccgcaaggagaagccgtccttcatcgacctgcagtgaccagagcagcccaagccgccaccatggtgaaattgctagtggccaaaatcctgtgcatggtgggcgtgttcttcttcatgctgctcggctccctgctcccagcaggcgtgggctccagcgggaaggaagcccctcgttgggttctcagcatggacagctggatggcatcactggattccctcacctggatccggagacaaaaggggagaaaatgatgaggcagcgcccaggcctgcggggttgagtcagccgtaataacagcctgttggccctaagtgtctg

SEQ ID NO: 63478 - DNA, 1704 bp, Homo sapiens
agcgggggcaggggcgtgggcggggcgtggaccagccgcgccgagcggggcctctccgggccgcgtctgtggggtcgagactgcgcggccgttgggcgtgcagcggcgccagtcggcggacgaggggcccccgggagttgctggactgagacatgagcctccaactgtgtggttgggctcggtagcacatcgtgggacttgggtgtgcgcccacagatggtttggccctgcagtgaccagagcagcccaagccgccaccatggtgaaattgctagtggccaaaatcctgtgcatggtgggcgtgttcttcttcatgctgctcggctccctgctccccgtgaagatcatcgagacagattttgagaaggcccatcgctcgaaaaagatcctctctctctgcaacacctttggaggaggggtgtttctggccacgtgcttcaacgctctgctgcccgctgtgagggaaaaggtaagggctccctgggcactagcagcagcccttggcaccttatggccaagggactctgatgcattttcaacactgatgccaagttcagtgaaggccttgatgctgtaagggtgacggaaagtaggaagtgaatttgctgtgtgattgtgaactggttactttctgtctctgtgctctaccggccaaacaaggggtttggaccagacctgggattcccaacaggtggacttgtcggttgtcacctgataatcagaccagactacccacctaggtagggcacactctgtcctgaagctggaaagcatggcctctcttcggttcctatatcagtcagctactgttgcgtaacaaattatagcaaactgagcaccttaggactacagacgtttatcatctcacagtttctgtgagtcaggggtctgggcactgcttcaggagctcacaaggcagcagtcacagtgtctcctgggctgtggtctcatctcaacgttcaaccggggatgggtcggcctctaagctcatgtggttgtaagccaggttcagttcctcattggttgtcagaccgaaggtgtctgtttgtcagtgtctgttggctggggcagccctcagagcctggccacgtggacctccccagcatgatcagttccttcatcagcaaatggagaagatggccatgactctgtgtaagacagagggcacagtcccatgtcatgcagaggtgacagggtatcccttcccctctgccccagtgtcctgctggttagaagcaagttcaagtccttcccatactcaagtggccaggacctcacagggtatggctgtcaagaggcaggggcttctggggccatcttggagtctgtccaccccaactcctgacagcatcatcctctgctgacctgttccttgagctcccccatatcagcagcccagagtgtgggtcccctgtcaggccacagtgtgaccagccctggccatgcttgctgggtgaccctgggtgagtggcttcctctctctgggccagtgccagatgtgacattgaatttgtgttggttacatacttggtggagatatgaggaccccctgttcttcctcccaacgaaagcatggaagccctaagcttatcccccaacccctggccctgcttttcctcgtgcctagtgtccagccccgaatgtcagcaccttccccctacccgagttgtgaaaataaaaaatgtttccagacattaccaggtg

SEQ ID NO: 63479 - DNA, 1804 bp, Homo sapiens
  misc_feature (27)..(27): n is a, c, g, or t
  misc_feature (37)..(37): n is a, c, g, or t
  misc_feature (40)..(40): n is a, c, g, or t
  misc_feature (68)..(68): n is a, c, g, or t
  misc_feature (87)..(89): n is a, c, g, or t
cgcggtctggtggggtcgacgacatgnctgcggccgntantgggcgtttgcagctggcgcccagatancggcggaacgaatggggcnnnccccggcgacgtttgttgctggactgagacatgagcctccaactgtgtggttgggctcggtagcacatcgtgggacttgggtgtgcgcccacagatggtttggccctgcagtgaccagagcagcccaagccgccaccatggtgaaattgctagtggccaaaatcctgtgcatggtgggcgtgttcttcttcatgctgctcggctccctgctccccgtgaagatcatcgagacagattttgagaaggcccatcgctcgaaaaagatcctctctctctgcaacacctttggaggaggggtgtttctggccacgtgcttcaacgctctgctgcccgctgtgagggaaaagctccagaaggtcctgagcctcggccacatcagcaccgactacccgctggccgaaaccatcctcctgctgggcttcttcatgaccgtcttcctggagcagctgatcctgaccttccgcaaggagaagccgtccttcatcgacctggagaccttcaacgccggatcggacgtgggcagcgactcggagtatgagagccccttcatggggggcgcgcggggccacgcgctgtacgtggagccccacggccacggccccagcctgagcgtgcagggcctctcgcgcgccagccccgtgcgcctgctcagcctggccttcgcgctgtcggcccactcggtctttgagggcctggccctgggcctgcaggaggagggggagaaagtggtgagcctgttcgtgggggtggccgtccacgagacactggtggccgtggccctgggcatcagcatggcccggagtgccatgcccctgcgggacgcggccaagctggcggtcaccgtaagcgccatgatccccctgggcatcggcctgggcctgggcattgagagcgcccagggcgtgccgggcagcgtggcgtccgtgctgctgcagggcctggcgggcggcaccttcctcttcatcaccttcctggagatcctggccaaggagctggaggagaagagtgaccgtctgctcaaggtcctcttcctggtgctgggctacaccgtcctggccgggatggtcttcctcaagtggtgagcggcctcgccattgtccctgccgccggagcccgccgggagccccgggccggacacaggccgcgtcccccggccgcgcgtcccccaagagcgagcactgtggccctgggccaccacctgtgcacaaggggcctcccgggaccaggctgtgcccccgatcctacaccctgagcctcagagcactgctactttttaaaatacttctttctcttaaaagtctttaccaaaaaaaaaaaaaaaaaaaaaaaaaaaaaaaaaaaaaaaaaaaaacaagaaaaacaaaagaaagaagaaaacaaaagaaacaaaggcggggggcgccacccaagaaaagaaatccaccacggaggggcccaccaacatacagaggacacagcgacgatacgtgtacaacaacagagaggtcgccccaacaaagggcgacggctgctacaaaacgacagacaaaacaaacgtgccgcgcccactaataaaaacacccacccgcgagacagagatacgaaaaaaacagcagcccaaccagagacaaaacaacgagagaagaaaaacacacctcacacaacaggctgggtggacggaaaaaacaaaatacggggcacaaaaaacaaccaccaactaaacaaatattatcacg

SEQ ID NO: 63480 - DNA, 3001 bp, Homo sapiens
agcgggggcaggggcgtgggcggggcgtggaccagccgcgccgagcggggcctctccgggccgcgtctgtggggtcgagactgcgcggccgttgggcgtgcagcggcgccagtcggcggacgaggggcccccgggagttgctggactgagacatgagcctccaactgtgtggttgggctcggtagcacatcgtgggacttgggtgtgcgcccacagatggtttggccctgcagtgaccagagcagcccaagccgccaccatggtgaaattgctagtggccaaaatcctgtgcatggtgggcgtgttcttcttcatgctgctcggctccctgctccccgtgaagatcatcgagacagattttgagaaggcccatcgctcgaaaaagatcctctctctctgcaacacctttggaggaggggtgtttctggccacgtgcttcaacgctctgctgcccgctgtgagggaaaaggtaagggctccctgggcactagcagcagcccttggcaccttatggccaagggactctgatgcattttcaacactgatgccaagttcagtgaaggccttgatgctgtaagggtgacggaaagtaggaagtgaatttgctgtgtgattgtgaactggttactttctgtctctgtgctctaccggccaaacaaggggtttggaccagacctgggattcccaacaggtggacttgtcggttgtcacctgataatcagaccagactacccacctaggtagggcacactctgtcctgaagctggaaagcatggcctctcttcggttcctatatcagtcagctactgttgcgtaacaaattatagcaaactgagcaccttaggactacagacgtttatcatctcacagtttctgtgagtcaggggtctgggcactgcttcaggagctcacaaggcagcagtcacagtgtctcctgggctgtggtctcatctcaacgttcaaccggggatgggtcggcctctaagctcatgtggttgtaagccaggttcagttcctcattggttgtcagaccgaaggtgtctgtttgtcagtgtctgttggctggggcagccctcagagcctggccacgtggacctccccagcatgatcagttccttcatcagcaaatggagaagatggccatgactctgtgtaagacagagggcacagtcccatgtcatgcagaggtgacagggtatcccttcccctctgccccagtgtcctgctggttagaagcaagttcaagtccttcccatactcaagtggccaggacctcacagggtatggctgtcaagaggcaggggcttctggggccatcttggagtctgtccaccccaactcctgacagcatcatcctctgctgacctgttccttgagctcccccatatcagcagcccagagtgtgggtcccctgtcaggccacagtgtgaccagccctggccatgcttgctgggtgaccctgggtgagtggcttcctctctctgggccagtgccagatgtgacattgaatttgtgttggttacatacttggtggagatatgaggaccccctgttcttcctcccaacgaaagcatggaagccctaagcttatcccccaacccctggccctgcttttcctcgtgcctagtgtccagaaaggaggagaagggctgttgtctgggattaaatcatctgagcctgttagtgtggcagagtagagttccagggtggctccctgagcttccagcccctgctccgcacgccccatgctcttccctcccctcgagtgtgggtagggctgggactgccgtgcgtgtcactcctgccattatgtcagaatcccagcagaggggatgttgcagctgtgatgaccgccccagatcggttagcgctgagttcatcaaaagggagggggtgggcctggcctaatcaggtgagccactcaccctcctgctggccttggagaagcaaaaagccagggtgtgccaggagaagggcatgaagcgaggacccgagggcagcctctcggtgccaagagccatccccgccaacagccagccaggacacggggcctcagtccacagccaccaggaggtggactcttccgacctccagtgagcttggaagaggaccctgggtgtcagtgagatctcagccctgatgacaccctgcgagacctggagcgtagggcccagctagcccgcacctggatttccaccgttcagagccgagacaccgcattcctgctgttccgcgtggctgagtctgcattcgttcgttacgcggtgtgtgaagactgacatctgcactgcgaggatggagatcttggtcatctctgacatctcctgcatcgcagaggccactgccagccccccttttcccccatggtcatggtgtcacccccgtcaccctctgactgcaggcctgggcgactgcggggagcttgctcttccctccccctcatcacagtggccttctcatggcacccaaacctttcccgccgttctcctgtcctcgggctggtcaggcggatgaggtccctactcccgagcccccagcctcacccactgcagggccaggctctcagtcacccctggaaaatggtgcctggttcacagctcccgtgcatctgcctcatctctcctgatcaacgtctgtctcttgggagtagctagagttcctcatgagcttgtcctcaagcgaggcatgcatgaggcctccagccggtggtcagtgagggagttaagtggcttctccgtggaaacacagccttctgctgcagcagaggctcacccagcgtgaactgcccccagggaacactgggcgatgcctggggacattgtggttgtcacgatggggggtgctcctggcctggagtgggtggaggccagagacactgctcagcagcaccctgcagtgcccaggacggccccgtcccagagaacaatccagccccgaatgtcagcaccttccccctacccgagttgtgaaaataaaaaatgtttccagacattaccaggtg

SEQ ID NO: 63481 - DNA, 183 bp, Homo sapiens
cagcccatggagggtgagccaaagcagggtggggcatcacctcacccaggaagcacaaggggtcgggggatttccctttcctagccacgggaagccgtgacagactgtacctggaaaaaggagaaacttccgcccaaatactgcgcttttcccaaggtcttagcaactggcagacaaggagat

SEQ ID NO: 63482 - DNA, 128 bp, Homo sapiens
aaacatttgcttctgtcatagttgctaccagatgggacctgcaagctatagttatcctattctaagcactttttttgtaatggtattcttcgctttagatctttaacattttatttttaggttataaa

SEQ ID NO: 63483 - DNA, 2935 bp, Homo sapiens
  misc_feature (447)..(447): n is a, c, g, or t
aaaaggagagaacatttaaaaaacaacaacaaaaaaaactggttatacaattcactttaatggacttttacatgtataatcatctaataaaaacaggtgtggggcataatgatttttccagggggtagtctagctatctcatagggtttaagttactgaaaattaagttgaaataaaattggcacagacatagatattctgttttatgtaacagagtaaatcttttgtactactgtggcagaaacccaagtgtttctgtgctctggagtgacattgttttaaagacaggacatctggtgactacaactcaggggaagccacaaatcatctttgagagttaacctgacacaagcaaccatctttagatttttatcaatgcaagaaaaaaattaatcttcattctggttgggtcatcgtttctcttatctgcttgcttgttctttgtgnaggcattttgggatagtggaaaggtggtttcatttactagctgaataaccttgaacaaattgtggaacttccttattgtcagtgtcatcctctattaaaagtcagcgtaacaattattattcctgattggtttaagaattaaataaaacagactgaccatcacctggtacatggtagatagtaaagttaattcctttcctaaagctattattgtgtcttcttttaatacccatcaatcaagaaagcaaccaggaagggaatccatttcactcaggcccctttgtcctggaggtcctctgttctaagtgtttcattctggaaaaataagttggaagtttttcatttgcttcagcaccactccactggcttgccacatcttccttggtctccttggacagtgtggtaactcagtattccagctttctatcatacttggggttatggccagagtgacagaatgggcccagaccctgcagagttgagtagacgggcctccagactaaataaatcaggattgttcaaccatttacaatagccaccctggcctggaactagccttttgccatcagagttcctggaaagcagcaattttgtgatgcactttgtgggctatcaggattacatccaaagttaacaaacactactaaaaaaagttttgggattcaataaattaggaaaatgctgcataactgcctctcaaattcttatgtgcagttaagtgctttgagaaattgcacagtgaagaaccttgttgaacttttttcaccccggcacctcccaaactcattgaactattgaactagagccctgtttttgggaagtcactattaatgtccaatggctcttctgtatcccatctaccattttccttgaagtgcctaacctccgaaagaggttgcatacttcccaaacatgttaagacaggtaagccctggaaacttatgttctcatgtaacatttcactctttgctttatgattttataagctgagcttctgtttgtgtgcttgttctgactgatttgttctttcaccctgtgtagcctaatgcatggaaagctaacaggatggagcacaagtcaggatccctttcctctagccgggagtctgcttttaccagtccaatctctgttaccaaaccagtggtactggctagtggtgcagctctgagttctcccaaagagagtccctccagcaccacccctccaattgagatcagctcctctcgtctgaccaagttgacccgccgaaccaccgacaggaagagtgagttcctgaaaactctgaaggatgaccggaatggagacttctcagagaatagagactgtgacaagctggaagatttggaggacaacagcacacctgaaccaaaggaaaatggggaggaaggctgtcatcaaaatggtcttgccctccctgtagtggaagaaggggaggttctctcacactctctagaagcagagcacaggttattgaaagctatgggttggcaggaatatcctgaaaatgatgagaattgccttcccctcacagaggatgagctcaaagagttccacatgaagacagagcagctgagaagaaatggctttggaaagaatggcttcttgcagagccgcagttccagtctgttctccccttggagaagcacttgcaaagcagagtttgaggactcagacaccgaaaccagtagcagtgaaacatcagatgacgatgcctggaagtaggcatataaatgctcacagttaaatctgacccagtaaactctgtgtgtttagggagtatacaaaagaaatcgttcttttccttttcttatgttgttgaatacttcattcacaagggaaataatcatatcccaaagagagagcaattggcttgttttgcttttgttattgttcttccctgttatctgctttatagagagaagtttgtgtggtgggacagattttttaaacacactcacacacacacacacatacacacccagtatatatggggcgatgcacaggtaggagctggcagtgcagggaagaggagacactggtctgcagcaacagcttctactaccagcccttggggcactcacccctgtgatcaagcaatcattgtcaatgacaaagtgactattgaagttataattgtattaaattaatgctaataatttggatattttattttatttttggctgctcgggtaactttagcccttaaccaagcatatgtgggtttttttggttgtttttttttgttttttttttctttttcctttttgggtacagctgtaaaatatttggatataggaaatgttgtgttattcttgcagccttgatattcagggtggattgtaaaatataaatttttgtgagatttcaaagattaagattattttgataacattatttacagatttaaaagatgtggttatcacaagtctcgagggggaaactactgcataaaataactaacttggaataaatattttgcatcagtttg

SEQ ID NO: 63484 - DNA, 3468 bp, Homo sapiens
cgagtatgggctatcgtcgacccacgccgtcgctttgttatggttgtggactagccgcctctgccgggtcgacaagctggggacgcgtcctcagacgcagcgtctagtccctggccatagctccgccgctgcccgttggtgtctcacctttaactctccttatgctgggtgaaaacaaagagtgatagattcgtgtggcctttcaaatgattgtgaagtggtggaaatggatccaaaataataagtgacttctctaccaaagcatagaagattcttcatatctccttccagtggctcaatttagattttgggaaggagcagaacaagtgaaacacagaaaactgaagagaagaaatcctcattttggacctatatttctccttgactatttcttaatatccatcctacccatcgttctaatgttttaactttgctctgaatttataaatagtaaaggccaaagacatagaatatacatttagtagctttataccaagaaatttgccttgaaagctgctgttcgtggagggaaaagtgtagcaaattcctgtctatttttattttttatttttttttaacaaagacaagatttatgtccctagattttgaaggttaaggcaaatataaatacatatctgcacactattttttagcagttgcatgagtaagagtaatgagatttgtattttaaggactttgtcatgtggatgttttggagttgactgctcagatcttttatagggctttaatatttttgatctattaccttgatgacattatttgtccacacttgagcccatctgtctttctagctatgaccttgttatgaacagtatttgcactcggtgcaaatatccatgtcttacctaattaagcaacatcatagtgccataactcaaggaagttgaatgaggtgaacatagatacagctctttccccttccccccctttttaaatgtaacaaatactttttatgttccccttccccccttccccttttcccctttccccttttggaaacgtgtcaggaaccaaatagtttaagatgagcagttgaggggactgagagagtgatcgacacagaacctggcttcttcgtgcttcatcataagtcgtgctgccggccaggttacttaagcacccttttaacaaggaaaccttgtgggagatccagctggccgactcgagttcagaaacaggaccacagaggttacactctgggatcctggccatgaggttggatgcctcaccttactgaaaggagacactggacctaaatggcgcagcatgattttgttcctgcttggctaaatttctcaacaccacagtcagctaagtcacctactgccaccttcgaaaaacacggagagcacctacccagaggagaaggtagatttggagtaagccgccgtcgacataattcctctgatggtttttttaacaatggtcccctacgaactgcaggagattcttggcaccagccctccctgttccgccatgattctgtggactctggtgtctctaagggagcatatgctggaatcacagggaacccatctggttggcatagctcttcccgaggtcatgatggcatgagccaacgtagtggaggtggcacagggaaccatcgccattggaatggcagcttccactcccggaaagggtgtgcttttcaggaaaagccacctatggagattagggaagaaaagaaagaagacaaggtggaaaagttgcagtttgaagaggaggactttccttccttgaatccagaagctggcaaacagcatcagccatgcagacctattgggacaccttctggagtatgggaaaacccgcctagtgccaagcaaccctccaagatgctagttatcaaaaaagtttccaaagaggatcctgctgctgccttctctgctgcattcacctcaccaggatctcaccatgcaaatgggaacaaattgtcatccgtggttccaagtgtctataagaacctggttcctaagcctgtaccacctccttccaagcctaatgcatggaaagctaacaggatggagcacaagtcaggatccctttcctctagccgggagtctgcttttaccagtccaatctctgttaccaaaccagtggtactggctagtggtgcagctctgagttctcccaaagagagtccctccagcaccacccctccaattgagatcagctcctctcgtctgaccaagttgacccgccgaaccaccgacaggaagagtgagttcctgaaaactctgaaggatgaccggaatggagacttctcagagaatagagactgtgacaagctggaagatttggaggacaacagcacacctgaaccaaaggaaaatggggaggaaggctgtcatcaaaatggtcttgccctccctgtagtggaagaaggggaggttctctcacactctctagaagcagagcacaggttattgaaagctatgggttggcaggaatatcctgaaaatgatgagaattgccttcccctcacagaggatgagctcaaagagttccacatgaagacagagcagctgagaagaaatggctttggaaagaatggcttcttgcagagccgcagttccagtctgttctccccttggagaagcacttgcaaagcagagtttgaggactcagacaccgaaaccagtagcagtgaaacatcagatgacgatgcctggaagtaggcatataaatgctcacagttaaatctgacccagtaaactctgtgtgtttagggagtatacaaaagaaatcgttcttttccttttcttatgttgttgaatacttcattcacaagggaaataatcatatcccaaagagagagcaattggcttgttttgcttttgttattgttcttccctgttatctgctttatagagagaagtttgtgtggtgggacagattttttaaacacactcacacacacacacacatacacacccagtatatatggggcgatgcacaggtaggagctggcagtgcagggaagaggagacactggtctgcagcaacagcttctactaccagcccttggggcactcacccctgtgatcaagcaatcattgtcaatgacaaagtgactattgaagttataattgtattaaattaatgctaataatttggatattttattttatttttggctgctcgggtaactttagcccttaaccaagcatatgtgggtttttttggttgtttttttttgttttttttttctttttcctttttgggtacagctgtaaaatatttggatataggaaatgttgtgttattcttgcagccttgatattcagggtggattgtaaaatataaatttttgtgagatttcaaagattaagattattttgataacattatttacagatttaaaagatgtggttatcacaagtctcgagggggaaactactgcataaaataactaacttggaataaatattttgcatcagtttg

SEQ ID NO: 63485 - DNA, 3533 bp, Homo sapiens
acgggggatgggagggccgtgctgctggtcgctcctcctcctccacccgctctgcccctcctggaccttgtgggccgggcagccattttgggaagagctttgttatggttgtggactagccgcctctgccgggtcgacaagctggggacgcgtcctcagacgcagcgtctagtccctggccatagctccgccgctgcccgttggtgtctcacctttaactctccttatgctgggtgaaaacaaagagtgatagattcgtgtggcctttcaaatgattgtgaagtggtggaaatggatccaaaataataagtgacttctctaccaaagcatagaagattcttcatatctccttccagtggctcaatttagattttgggaaggagcagaacaagtgaaacacagaaaactgaagagaagaaatcctcattttggacctatatttctccttgactatttcttaatatccatcctacccatcgttctaatgttttaactttgctctgaatttataaatagtaaaggccaaagacatagaatatacatttagtagctttataccaagaaatttgccttgaaagctgctgttcgtggagggaaaagtgtagcaaattcctgtctatttttattttttatttttttttaacaaagacaagatttatgtccctagattttgaaggttaaggcaaatataaatacatatctgcacactattttttagcagttgcatgagtaagagtaatgagatttgtattttaaggactttgtcatgtggatgttttggagttgactgctcagatcttttatagggctttaatatttttgatctattaccttgatgacattatttgtccacacttgagcccatctgtctttctagctatgaccttgttatgaacagtatttgcactcggtgcaaatatccatgtcttacctaattaagcaacatcatagtgccataactcaaggaagttgaatgaggtgaacatagatacagctctttccccttccccccctttttaaatgtaacaaatactttttatgttccccttccccccttccccttttcccctttccccttttggaaacgtgtcaggaaccaaatagtttaagatgagcagttgaggggactgagagagtgatcgacacagaacctggcttcttcgtgcttcatcataagtcgtgctgccggccaggttacttaagcacccttttaacaaggaaaccttgtgggagatccagctggccgactcgagttcagaaacaggaccacagaggttacactctgggatcctggccatgaggttggatgcctcaccttactgaaaggagacactggacctaaatggcgcagcatgattttgttcctgcttggctaaatttctcaacaccacagtcagctaagtcacctactgccaccttcgaaaaacacggagagcacctacccagaggagaaggtagatttggagtaagccgccgtcgacataattcctctgatggtttttttaacaatggtcccctacgaactgcaggagattcttggcaccagccctccctgttccgccatgattctgtggactctggtgtctctaagggagcatatgctggaatcacagggaacccatctggttggcatagctcttcccgaggtcatgatggcatgagccaacgtagtggaggtggcacagggaaccatcgccattggaatggcagcttccactcccggaaagggtgtgcttttcaggaaaagccacctatggagattagggaagaaaagaaagaagacaaggtggaaaagttgcagtttgaagaggaggactttccttccttgaatccagaagctggcaaacagcatcagccatgcagacctattgggacaccttctggagtatgggaaaacccgcctagtgccaagcaaccctccaagatgctagttatcaaaaaagtttccaaagaggatcctgctgctgccttctctgctgcattcacctcaccaggatctcaccatgcaaatgggaacaaattgtcatccgtggttccaagtgtctataagaacctggttcctaagcctgtaccacctccttccaagcctaatgcatggaaagctaacaggatggagcacaagtcaggatccctttcctctagccgggagtctgcttttaccagtccaatctctgttaccaaaccagtggtactggctagtggtgcagctctgagttctcccaaagagagtccctccagcaccacccctccaattgagatcagctcctctcgtctgaccaagttgacccgccgaaccaccgacaggaagagtgagttcctgaaaactctgaaggatgaccggaatggagacttctcagagaatagagactgtgacaagctggaagatttggaggacaacagcacacctgaaccaaaggaaaatggggaggaaggctgtcatcaaaatggtcttgccctccctgtagtggaagaaggggaggttctctcacactctctagaagcagagcacaggttattgaaagctatgggttggcaggaatatcctgaaaatgatgagaattgccttcccctcacagaggatgagctcaaagagttccacatgaagacagagcagctgagaagaaatggctttggaaagaatggcttcttgcagagccgcagttccagtctgttctccccttggagaagcacttgcaaagcagagtttgaggactcagacaccgaaaccagtagcagtgaaacatcagatgacgatgcctggaagtaggcatataaatgctcacagttaaatctgacccagtaaactctgtgtgtttagggagtatacaaaagaaatcgttcttttccttttcttatgttgttgaatacttcattcacaagggaaataatcatatcccaaagagagagcaattggcttgttttgcttttgttattgttcttccctgttatctgctttatagagagaagtttgtgtggtgggacagattttttaaacacactcacacacacacacacatacacacccagtatatatggggcgatgcacaggtaggagctggcagtgcagggaagaggagacactggtctgcagcaacagcttctactaccagcccttggggcactcacccctgtgatcaagcaatcattgtcaatgacaaagtgactattgaagttataattgtattaaattaatgctaataatttggatattttattttatttttggctgctcgggtaactttagcccttaaccaagcatatgtgggtttttttggttgtttttttttgttttttttttctttttcctttttgggtacagctgtaaaatatttggatataggaaatgttgtgttattcttgcagccttgatattcagggtggattgtaaaatataaatttttgtgagatttcaaagattaagattattttgataacattatttacagatttaaaagatgtggttatcacaagtctcgagggggaaactactgcataaaataactaacttggaataaatattttgcatcagtttg

SEQ ID NO: 63486 - DNA, 3488 bp, Homo sapiens
acgggggatgggagggccgtgctgctggtcgctcctcctcctccacccgctctgcccctcctggaccttgtgggccgggcagccattttgggaagagctttgttatggttgtggactagccgcctctgccgggtcgacaagctggggacgcgtcctcagacgcagcgtctagtccctggccatagctccgccgctgcccgagtgatagattcgtgtggcctttcaaatgattgtgaagtggtggaaatggatccaaaataataagtgacttctctaccaaagcatagaagattcttcatatctccttccagtggctcaatttagattttgggaaggagcagaacaagtgaaacacagaaaactgaagagaagaaatcctcattttggacctatatttctccttgactatttcttaatatccatcctacccatcgttctaatgttttaactttgctctgaatttataaatagtaaaggccaaagacatagaatatacatttagtagctttataccaagaaatttgccttgaaagctgctgttcgtggagggaaaagtgtagcaaattcctgtctatttttattttttatttttttttaacaaagacaagatttatgtccctagattttgaaggttaaggcaaatataaatacatatctgcacactattttttagcagttgcatgagtaagagtaatgagatttgtattttaaggactttgtcatgtggatgttttggagttgactgctcagatcttttatagggctttaatatttttgatctattaccttgatgacattatttgtccacacttgagcccatctgtctttctagctatgaccttgttatgaacagtatttgcactcggtgcaaatatccatgtcttacctaattaagcaacatcatagtgccataactcaaggaagttgaatgaggtgaacatagatacagctctttccccttccccccctttttaaatgtaacaaatactttttatgttccccttccccccttccccttttcccctttccccttttggaaacgtgtcaggaaccaaatagtttaagatgagcagttgaggggactgagagagtgatcgacacagaacctggcttcttcgtgcttcatcataagtcgtgctgccggccaggttacttaagcacccttttaacaaggaaaccttgtgggagatccagctggccgactcgagttcagaaacaggaccacagaggttacactctgggatcctggccatgaggttggatgcctcaccttactgaaaggagacactggacctaaatggcgcagcatgattttgttcctgcttggctaaatttctcaacaccacagtcagctaagtcacctactgccaccttcgaaaaacacggagagcacctacccagaggagaaggtagatttggagtaagccgccgtcgacataattcctctgatggtttttttaacaatggtcccctacgaactgcaggagattcttggcaccagccctccctgttccgccatgattctgtggactctggtgtctctaagggagcatatgctggaatcacagggaacccatctggttggcatagctcttcccgaggtcatgatggcatgagccaacgtagtggaggtggcacagggaaccatcgccattggaatggcagcttccactcccggaaagggtgtgcttttcaggaaaagccacctatggagattagggaagaaaagaaagaagacaaggtggaaaagttgcagtttgaagaggaggactttccttccttgaatccagaagctggcaaacagcatcagccatgcagacctattgggacaccttctggagtatgggaaaacccgcctagtgccaagcaaccctccaagatgctagttatcaaaaaagtttccaaagaggatcctgctgctgccttctctgctgcattcacctcaccaggatctcaccatgcaaatgggaacaaattgtcatccgtggttccaagtgtctataagaacctggttcctaagcctgtaccacctccttccaagcctaatgcatggaaagctaacaggatggagcacaagtcaggatccctttcctctagccgggagtctgcttttaccagtccaatctctgttaccaaaccagtggtactggctagtggtgcagctctgagttctcccaaagagagtccctccagcaccacccctccaattgagatcagctcctctcgtctgaccaagttgacccgccgaaccaccgacaggaagagtgagttcctgaaaactctgaaggatgaccggaatggagacttctcagagaatagagactgtgacaagctggaagatttggaggacaacagcacacctgaaccaaaggaaaatggggaggaaggctgtcatcaaaatggtcttgccctccctgtagtggaagaaggggaggttctctcacactctctagaagcagagcacaggttattgaaagctatgggttggcaggaatatcctgaaaatgatgagaattgccttcccctcacagaggatgagctcaaagagttccacatgaagacagagcagctgagaagaaatggctttggaaagaatggcttcttgcagagccgcagttccagtctgttctccccttggagaagcacttgcaaagcagagtttgaggactcagacaccgaaaccagtagcagtgaaacatcagatgacgatgcctggaagtaggcatataaatgctcacagttaaatctgacccagtaaactctgtgtgtttagggagtatacaaaagaaatcgttcttttccttttcttatgttgttgaatacttcattcacaagggaaataatcatatcccaaagagagagcaattggcttgttttgcttttgttattgttcttccctgttatctgctttatagagagaagtttgtgtggtgggacagattttttaaacacactcacacacacacacacatacacacccagtatatatggggcgatgcacaggtaggagctggcagtgcagggaagaggagacactggtctgcagcaacagcttctactaccagcccttggggcactcacccctgtgatcaagcaatcattgtcaatgacaaagtgactattgaagttataattgtattaaattaatgctaataatttggatattttattttatttttggctgctcgggtaactttagcccttaaccaagcatatgtgggtttttttggttgtttttttttgttttttttttctttttcctttttgggtacagctgtaaaatatttggatataggaaatgttgtgttattcttgcagccttgatattcagggtggattgtaaaatataaatttttgtgagatttcaaagattaagattattttgataacattatttacagatttaaaagatgtggttatcacaagtctcgagggggaaactactgcataaaataactaacttggaataaatattttgcatcagtttg

SEQ ID NO: 63487 - DNA, 3385 bp, Homo sapiens
ggtagcgcggccgacgcagcgcgcgcagcctccggggccaggccgtgtggcccgctggggactggagtctcaacgacgcgcacacgagaagtaaggaagtgatagattcgtgtggcctttcaaatgattgtgaagtggtggaaatggatccaaaataataagtgacttctctaccaaagcatagaagattcttcatatctccttccagtggctcaatttagattttgggaaggagcagaacaagtgaaacacagaaaactgaagagaagaaatcctcattttggacctatatttctccttgactatttcttaatatccatcctacccatcgttctaatgttttaactttgctctgaatttataaatagtaaaggccaaagacatagaatatacatttagtagctttataccaagaaatttgccttgaaagctgctgttcgtggagggaaaagtgtagcaaattcctgtctatttttattttttatttttttttaacaaagacaagatttatgtccctagattttgaaggttaaggcaaatataaatacatatctgcacactattttttagcagttgcatgagtaagagtaatgagatttgtattttaaggactttgtcatgtggatgttttggagttgactgctcagatcttttatagggctttaatatttttgatctattaccttgatgacattatttgtccacacttgagcccatctgtctttctagctatgaccttgttatgaacagtatttgcactcggtgcaaatatccatgtcttacctaattaagcaacatcatagtgccataactcaaggaagttgaatgaggtgaacatagatacagctctttccccttccccccctttttaaatgtaacaaatactttttatgttccccttccccccttccccttttcccctttccccttttggaaacgtgtcaggaaccaaatagtttaagatgagcagttgaggggactgagagagtgatcgacacagaacctggcttcttcgtgcttcatcataagtcgtgctgccggccaggttacttaagcacccttttaacaaggaaaccttgtgggagatccagctggccgactcgagttcagaaacaggaccacagaggttacactctgggatcctggccatgaggttggatgcctcaccttactgaaaggagacactggacctaaatggcgcagcatgattttgttcctgcttggctaaatttctcaacaccacagtcagctaagtcacctactgccaccttcgaaaaacacggagagcacctacccagaggagaaggtagatttggagtaagccgccgtcgacataattcctctgatggtttttttaacaatggtcccctacgaactgcaggagattcttggcaccagccctccctgttccgccatgattctgtggactctggtgtctctaagggagcatatgctggaatcacagggaacccatctggttggcatagctcttcccgaggtcatgatggcatgagccaacgtagtggaggtggcacagggaaccatcgccattggaatggcagcttccactcccggaaagggtgtgcttttcaggaaaagccacctatggagattagggaagaaaagaaagaagacaaggtggaaaagttgcagtttgaagaggaggactttccttccttgaatccagaagctggcaaacagcatcagccatgcagacctattgggacaccttctggagtatgggaaaacccgcctagtgccaagcaaccctccaagatgctagttatcaaaaaagtttccaaagaggatcctgctgctgccttctctgctgcattcacctcaccaggatctcaccatgcaaatgggaacaaattgtcatccgtggttccaagtgtctataagaacctggttcctaagcctgtaccacctccttccaagcctaatgcatggaaagctaacaggatggagcacaagtcaggatccctttcctctagccgggagtctgcttttaccagtccaatctctgttaccaaaccagtggtactggctagtggtgcagctctgagttctcccaaagagagtccctccagcaccacccctccaattgagatcagctcctctcgtctgaccaagttgacccgccgaaccaccgacaggaagagtgagttcctgaaaactctgaaggatgaccggaatggagacttctcagagaatagagactgtgacaagctggaagatttggaggacaacagcacacctgaaccaaaggaaaatggggaggaaggctgtcatcaaaatggtcttgccctccctgtagtggaagaaggggaggttctctcacactctctagaagcagagcacaggttattgaaagctatgggttggcaggaatatcctgaaaatgatgagaattgccttcccctcacagaggatgagctcaaagagttccacatgaagacagagcagctgagaagaaatggctttggaaagaatggcttcttgcagagccgcagttccagtctgttctccccttggagaagcacttgcaaagcagagtttgaggactcagacaccgaaaccagtagcagtgaaacatcagatgacgatgcctggaagtaggcatataaatgctcacagttaaatctgacccagtaaactctgtgtgtttagggagtatacaaaagaaatcgttcttttccttttcttatgttgttgaatacttcattcacaagggaaataatcatatcccaaagagagagcaattggcttgttttgcttttgttattgttcttccctgttatctgctttatagagagaagtttgtgtggtgggacagattttttaaacacactcacacacacacacacatacacacccagtatatatggggcgatgcacaggtaggagctggcagtgcagggaagaggagacactggtctgcagcaacagcttctactaccagcccttggggcactcacccctgtgatcaagcaatcattgtcaatgacaaagtgactattgaagttataattgtattaaattaatgctaataatttggatattttattttatttttggctgctcgggtaactttagcccttaaccaagcatatgtgggtttttttggttgtttttttttgttttttttttctttttcctttttgggtacagctgtaaaatatttggatataggaaatgttgtgttattcttgcagccttgatattcagggtggattgtaaaatataaatttttgtgagatttcaaagattaagattattttgataacattatttacagatttaaaagatgtggttatcacaagtctcgagggggaaactactgcataaaataactaacttggaataaatattttgcatcagtttg

SEQ ID NO: 63488 - DNA, 3425 bp, Homo sapiens
acctgcgctaattggttcctaggcccggctttctgtttgggggccattcttaatttctagttgaatccagatgttgaacggtccttgaagttctattccagggctcccaggcagcagaatctgcccacagagttcggagtgatagattcgtgtggcctttcaaatgattgtgaagtggtggaaatggatccaaaataataagtgacttctctaccaaagcatagaagattcttcatatctccttccagtggctcaatttagattttgggaaggagcagaacaagtgaaacacagaaaactgaagagaagaaatcctcattttggacctatatttctccttgactatttcttaatatccatcctacccatcgttctaatgttttaactttgctctgaatttataaatagtaaaggccaaagacatagaatatacatttagtagctttataccaagaaatttgccttgaaagctgctgttcgtggagggaaaagtgtagcaaattcctgtctatttttattttttatttttttttaacaaagacaagatttatgtccctagattttgaaggttaaggcaaatataaatacatatctgcacactattttttagcagttgcatgagtaagagtaatgagatttgtattttaaggactttgtcatgtggatgttttggagttgactgctcagatcttttatagggctttaatatttttgatctattaccttgatgacattatttgtccacacttgagcccatctgtctttctagctatgaccttgttatgaacagtatttgcactcggtgcaaatatccatgtcttacctaattaagcaacatcatagtgccataactcaaggaagttgaatgaggtgaacatagatacagctctttccccttccccccctttttaaatgtaacaaatactttttatgttccccttccccccttccccttttcccctttccccttttggaaacgtgtcaggaaccaaatagtttaagatgagcagttgaggggactgagagagtgatcgacacagaacctggcttcttcgtgcttcatcataagtcgtgctgccggccaggttacttaagcacccttttaacaaggaaaccttgtgggagatccagctggccgactcgagttcagaaacaggaccacagaggttacactctgggatcctggccatgaggttggatgcctcaccttactgaaaggagacactggacctaaatggcgcagcatgattttgttcctgcttggctaaatttctcaacaccacagtcagctaagtcacctactgccaccttcgaaaaacacggagagcacctacccagaggagaaggtagatttggagtaagccgccgtcgacataattcctctgatggtttttttaacaatggtcccctacgaactgcaggagattcttggcaccagccctccctgttccgccatgattctgtggactctggtgtctctaagggagcatatgctggaatcacagggaacccatctggttggcatagctcttcccgaggtcatgatggcatgagccaacgtagtggaggtggcacagggaaccatcgccattggaatggcagcttccactcccggaaagggtgtgcttttcaggaaaagccacctatggagattagggaagaaaagaaagaagacaaggtggaaaagttgcagtttgaagaggaggactttccttccttgaatccagaagctggcaaacagcatcagccatgcagacctattgggacaccttctggagtatgggaaaacccgcctagtgccaagcaaccctccaagatgctagttatcaaaaaagtttccaaagaggatcctgctgctgccttctctgctgcattcacctcaccaggatctcaccatgcaaatgggaacaaattgtcatccgtggttccaagtgtctataagaacctggttcctaagcctgtaccacctccttccaagcctaatgcatggaaagctaacaggatggagcacaagtcaggatccctttcctctagccgggagtctgcttttaccagtccaatctctgttaccaaaccagtggtactggctagtggtgcagctctgagttctcccaaagagagtccctccagcaccacccctccaattgagatcagctcctctcgtctgaccaagttgacccgccgaaccaccgacaggaagagtgagttcctgaaaactctgaaggatgaccggaatggagacttctcagagaatagagactgtgacaagctggaagatttggaggacaacagcacacctgaaccaaaggaaaatggggaggaaggctgtcatcaaaatggtcttgccctccctgtagtggaagaaggggaggttctctcacactctctagaagcagagcacaggttattgaaagctatgggttggcaggaatatcctgaaaatgatgagaattgccttcccctcacagaggatgagctcaaagagttccacatgaagacagagcagctgagaagaaatggctttggaaagaatggcttcttgcagagccgcagttccagtctgttctccccttggagaagcacttgcaaagcagagtttgaggactcagacaccgaaaccagtagcagtgaaacatcagatgacgatgcctggaagtaggcatataaatgctcacagttaaatctgacccagtaaactctgtgtgtttagggagtatacaaaagaaatcgttcttttccttttcttatgttgttgaatacttcattcacaagggaaataatcatatcccaaagagagagcaattggcttgttttgcttttgttattgttcttccctgttatctgctttatagagagaagtttgtgtggtgggacagattttttaaacacactcacacacacacacacatacacacccagtatatatggggcgatgcacaggtaggagctggcagtgcagggaagaggagacactggtctgcagcaacagcttctactaccagcccttggggcactcacccctgtgatcaagcaatcattgtcaatgacaaagtgactattgaagttataattgtattaaattaatgctaataatttggatattttattttatttttggctgctcgggtaactttagcccttaaccaagcatatgtgggtttttttggttgtttttttttgttttttttttctttttcctttttgggtacagctgtaaaatatttggatataggaaatgttgtgttattcttgcagccttgatattcagggtggattgtaaaatataaatttttgtgagatttcaaagattaagattattttgataacattatttacagatttaaaagatgtggttatcacaagtctcgagggggaaactactgcataaaataactaacttggaataaatattttgcatcagtttg

SEQ ID NO: 63489 - DNA, 3369 bp, Homo sapiens
cgagtatgggctatcgtcgacccacgccgtcgctttgttatggttgtggactagccgcctctgccgggtcgacaagctggggacgcgtcctcagacgcagcgtctagtccctggccatagctccgccgctgcccgagtgatagattcgtgtggcctttcaaatgattgtgaagtggtggaaatggatcccagtggctcaatttagattttgggaaggagcagaacaagtgaaacacagaaaactgaagagaagaaatcctcattttggacctatatttctccttgactatttcttaatatccatcctacccatcgttctaatgttttaactttgctctgaatttataaatagtaaaggccaaagacatagaatatacatttagtagctttataccaagaaatttgccttgaaagctgctgttcgtggagggaaaagtgtagcaaattcctgtctatttttattttttatttttttttaacaaagacaagatttatgtccctagattttgaaggttaaggcaaatataaatacatatctgcacactattttttagcagttgcatgagtaagagtaatgagatttgtattttaaggactttgtcatgtggatgttttggagttgactgctcagatcttttatagggctttaatatttttgatctattaccttgatgacattatttgtccacacttgagcccatctgtctttctagctatgaccttgttatgaacagtatttgcactcggtgcaaatatccatgtcttacctaattaagcaacatcatagtgccataactcaaggaagttgaatgaggtgaacatagatacagctctttccccttccccccctttttaaatgtaacaaatactttttatgttccccttccccccttccccttttcccctttccccttttggaaacgtgtcaggaaccaaatagtttaagatgagcagttgaggggactgagagagtgatcgacacagaacctggcttcttcgtgcttcatcataagtcgtgctgccggccaggttacttaagcacccttttaacaaggaaaccttgtgggagatccagctggccgactcgagttcagaaacaggaccacagaggttacactctgggatcctggccatgaggttggatgcctcaccttactgaaaggagacactggacctaaatggcgcagcatgattttgttcctgcttggctaaatttctcaacaccacagtcagctaagtcacctactgccaccttcgaaaaacacggagagcacctacccagaggagaaggtagatttggagtaagccgccgtcgacataattcctctgatggtttttttaacaatggtcccctacgaactgcaggagattcttggcaccagccctccctgttccgccatgattctgtggactctggtgtctctaagggagcatatgctggaatcacagggaacccatctggttggcatagctcttcccgaggtcatgatggcatgagccaacgtagtggaggtggcacagggaaccatcgccattggaatggcagcttccactcccggaaagggtgtgcttttcaggaaaagccacctatggagattagggaagaaaagaaagaagacaaggtggaaaagttgcagtttgaagaggaggactttccttccttgaatccagaagctggcaaacagcatcagccatgcagacctattgggacaccttctggagtatgggaaaacccgcctagtgccaagcaaccctccaagatgctagttatcaaaaaagtttccaaagaggatcctgctgctgccttctctgctgcattcacctcaccaggatctcaccatgcaaatgggaacaaattgtcatccgtggttccaagtgtctataagaacctggttcctaagcctgtaccacctccttccaagcctaatgcatggaaagctaacaggatggagcacaagtcaggatccctttcctctagccgggagtctgcttttaccagtccaatctctgttaccaaaccagtggtactggctagtggtgcagctctgagttctcccaaagagagtccctccagcaccacccctccaattgagatcagctcctctcgtctgaccaagttgacccgccgaaccaccgacaggaagagtgagttcctgaaaactctgaaggatgaccggaatggagacttctcagagaatagagactgtgacaagctggaagatttggaggacaacagcacacctgaaccaaaggaaaatggggaggaaggctgtcatcaaaatggtcttgccctccctgtagtggaagaaggggaggttctctcacactctctagaagcagagcacaggttattgaaagctatgggttggcaggaatatcctgaaaatgatgagaattgccttcccctcacagaggatgagctcaaagagttccacatgaagacagagcagctgagaagaaatggctttggaaagaatggcttcttgcagagccgcagttccagtctgttctccccttggagaagcacttgcaaagcagagtttgaggactcagacaccgaaaccagtagcagtgaaacatcagatgacgatgcctggaagtaggcatataaatgctcacagttaaatctgacccagtaaactctgtgtgtttagggagtatacaaaagaaatcgttcttttccttttcttatgttgttgaatacttcattcacaagggaaataatcatatcccaaagagagagcaattggcttgttttgcttttgttattgttcttccctgttatctgctttatagagagaagtttgtgtggtgggacagattttttaaacacactcacacacacacacacatacacacccagtatatatggggcgatgcacaggtaggagctggcagtgcagggaagaggagacactggtctgcagcaacagcttctactaccagcccttggggcactcacccctgtgatcaagcaatcattgtcaatgacaaagtgactattgaagttataattgtattaaattaatgctaataatttggatattttattttatttttggctgctcgggtaactttagcccttaaccaagcatatgtgggtttttttggttgtttttttttgttttttttttctttttcctttttgggtacagctgtaaaatatttggatataggaaatgttgtgttattcttgcagccttgatattcagggtggattgtaaaatataaatttttgtgagatttcaaagattaagattattttgataacattatttacagatttaaaagatgtggttatcacaagtctcgagggggaaactactgcataaaataactaacttggaataaatattttgcatcagtttg

SEQ ID NO: 63490 - DNA, 3603 bp, Homo sapiens
cgagtatgggctatcgtcgacccacgccgtcgctttgttatggttgtggactagccgcctctgccgggtcgacaagctggggacgcgtcctcagacgcagcgtctagtccctggccatagctccgccgctgcccgttggtgtctcacctttaactctccttatgctgggtgaaaacaaagagtgatagattcgtgtggcctttcaaatgattgtgaagtggtggaaatggatccaaaataataagtgacttctctaccaaagcatagaagattcttcatatctccttccagtggctcaatttagattttgggaaggagcagaacaagtgaaacacagaaaactgaagagaagaaatcctcattttggacctatatttctccttgactatttcttaatatccatcctacccatcgttctaatgttttaactttgctctgaatttataaatagtaaaggccaaagacatagaatatacatttagtagctttataccaagaaatttgccttgaaagctgctgttcgtggagggaaaagtgtagcaaattcctgtctatttttattttttatttttttttaacaaagacaagatttatgtccctagattttgaaggttaaggcaaatataaatacatatctgcacactattttttagcagttgcatgagtaagagtaatgagatttgtattttaaggactttgtcatgtggatgttttggagttgactgctcagatcttttatagggctttaatatttttgatctattaccttgatgacattatttgtccacacttgagcccatctgtctttctagctatgaccttgttatgaacagtatttgcactcggtgcaaatatccatgtcttacctaattaagcaacatcatagtgccataactcaaggaagttgaatgaggtgaacatagatacagctctttccccttccccccctttttaaatgtaacaaatactttttatgttccccttccccccttccccttttcccctttccccttttggaaacgtgtcaggaaccaaatagtttaagatgagcagttgaggggactgagagagtgatcgacacagaacctggcttcttcgtgcttcatcataagtcgtgctgccggccaggttacttaagcacccttttaacaaggaaaccttgtgggagatccagctggccgactcgagttcagaaacaggaccacagaggttacactctgggatcctggccatgaggttggatgcctcaccttactgaaaggagacactggacctaaatggcgcagcatgattttgttcctgcttggctaaatttctcaacaccacagtcagctaagtcacctactgccaccttcgaaaaacacggagagcacctacccagaggagaaggtagatttggagtaagccgccgtcgacataattcctctgatggtttttttaacaatggtcccctacgaactgcaggagattcttggcaccagccctccctgttccgccatgattctgtggactctggtgtctctaagggagcatatgctggaatcacagggaacccatctggttggcatagctcttcccgaggtcatgatggcatgagccaacgtagtggaggtggcacagggaaccatcgccattggaatggcagcttccactcccggaaagggtgtgcttttcaggaaaagccacctatggagattagggaagaaaagaaagaagacaaggtggaaaagttgcagtttgaagaggaggactttccttccttgaatccagaagctggcaaacagcatcagccatgcagacctattgggacaccttctggagtatgggaaaacccgcctagtgccaagcaaccctccaagatgctagttatcaaaaaagtttccaaagaggatcctgctgctgccttctctgctgcattcacctcaccaggatctcaccatgcaaatgggaacaaattgtcatccgtggttccaagtgtctataagaacctggttcctaagcctgtaccacctccttccaagcctaatgcatggaaagctaacaggatggagcacaagtcaggatccctttcctctagccgggagtctgcttttaccagtccaatctctgttaccaaaccagtggtactggctagtggtgcagctctgagttctcccaaagagagtccctccagcaccacccctccaattgagatcagctcctctcgtctgaccaagttgacccgccgaaccaccgacaggaagagtgagttcctgaaaactctgaaggatgaccggaatggagacttctcagagaatagagactgtgacaagctggaagatttggaggacaacagcacacctgaaccaaaggaaaatggggaggaaggctgtcatcaaaatggtcttgccctccctgtagtggaagaaggggaggttctctcacactctctagaagcagagcacaggttattgaaagctatgggttggcaggaatatcctgaaaatgatgagaattgccttcccctcacagaggatgagctcaaagagttccacatgaagacagagcagctgagaagaaatggctttggaaagaatggcttcttgcagagccgcagttccagtctgttctccccttggagaagcacttgcaaagcagagtttgaggactcagacaccgaaaccagtagcagtgaaacatcagatgacgatgcctggaagtaggcatataaatgctcacagttaaatctgacccagtaaactctgtgtgtttagggagtatacaaaagaaatcgttcttttccttttcttatgttgttgaatacttcattcacaagggaaataatcatatcccaaagagagagcaattggcttgttttgcttttgttattgttcttccctgttatctgctttatagagagaagtttgtgtggtgggacagattttttaaacacactcacacacacacacacatacacacccagtatatatggggcgatgcacaggtaggagctggcagtgcagggaagaggagacactggtctgcagcaacagcttctactaccagcccttggggcactcacccctgtgatcaagcaatcattgtcaatgacaaattttatttttggctgctcgggtaactttagcccttaaccaagcatatgtgggtttttttggttgtttttttttgttttttttttctttttcctttttgggtacagctgtaaaatatttggatataggaaatgttgtgttattcttgcagccttgatattcagggtggattgtaaaatataaatttttgtgagatttcaaagattaagattattttgataacattatttacagatttaaaagatgtggttatcacaagtctcgagggggaaactactgcataaaataactaacttggaataaatattttgcatcagtttggattgtcttgtgtaagaagtatattttctttaaaattagatgagtggattcttttttaggggaaatatttttagaagttggggggaaatgtgaattcagacacaactgtttctctattttagcagatacttttttgatgcagaaaaacctgtgcaataaattaccagtaataaagtcagaaaccaagata

SEQ ID NO: 63491 - DNA, 3535 bp, Homo sapiens
cgagtatgggctatcgtcgacccacgccgtcgctttgttatggttgtggactagccgcctctgccgggtcgacaagctggggacgcgtcctcagacgcagcgtctagtccctggccatagctccgccgctgcccgttggtgtctcacctttaactctccttatgctgggtgaaaacaaagagtgatagattcgtgtggcctttcaaatgattgtgaagtggtggaaatggatccaaaataataagtgacttctctaccaaagcatagaagattcttcatatctccttccagtggctcaatttagattttgggaaggagcagaacaagtgaaacacagaaaactgaagagaagaaatcctcattttggacctatatttctccttgactatttcttaatatccatcctacccatcgttctaatgttttaactttgctctgaatttataaatagtaaaggccaaagacatagaatatacatttagtagctttataccaagaaatttgccttgaaagctgctgttcgtggagggaaaagtgtagcaaattcctgtctatttttattttttatttttttttaacaaagacaagatttatgtccctagattttgaaggttaaggcaaatataaatacatatctgcacactattttttagcagttgcatgagtaagagtaatgagatttgtattttaaggactttgtcatgtggatgttttggagttgactgctcagatcttttatagggctttaatatttttgatctattaccttgatgacattatttgtccacacttgagcccatctgtctttctagctatgaccttgttatgaacagtatttgcactcggtgcaaatatccatgtcttacctaattaagcaacatcatagtgccataactcaaggaagttgaatgaggtgaacatagatacagctctttccccttccccccctttttaaatgtaacaaatactttttatgttccccttccccccttccccttttcccctttccccttttggaaacgtgtcaggaaccaaatagtttaagatgagcagttgaggggactgagagagtgatcgacacagaacctggcttcttcgtgcttcatcataagtcgtgctgccggccaggttacttaagcacccttttaacaaggaaaccttgtgggagatccagctggccgactcgagttcagaaacaggaccacagaggttacactctgggatcctggccatgaggttggatgcctcaccttactgaaaggagacactggacctaaatggcgcagcatgattttgttcctgcttggctaaatttctcaacaccacagtcagctaagtcacctactgccaccttcgaaaaacacggagagcacctacccagaggagaaggtagatttggagtaagccgccgtcgacataattcctctgatggtttttttaacaatggtcccctacgaactgcaggagattcttggcaccagccctccctgttccgccatgattctgtggactctggtgtctctaagggagcatatgctggaatcacagggaacccatctggttggcatagctcttcccgaggtcatgatggcatgagccaacgtagtggaggtggcacagggaaccatcgccattggaatggcagcttccactcccggaaagggtgtgcttttcaggaaaagccacctatggagattagggaagaaaagaaagaagacaaggtggaaaagttgcagtttgaagaggaggactttccttccttgaatccagaagctggcaaacagcatcagccatgcagacctattgggacaccttctggagtatgggaaaacccgcctagtgccaagcaaccctccaagatgctagttatcaaaaaagtttccaaagaggatcctgctgctgccttctctgctgcattcacctcaccaggatctcaccatgcaaatgggaacaaattgtcatccgtggttccaagtgtctataagaacctggttcctaagcctgtaccacctccttccaagcctaatgcatggaaagctaacaggatggagcacaagtcaggatccctttcctctagccgggagtctgcttttaccagtccaatctctgttaccaaaccagtggtactggctagtggtgcagctctgagttctcccaaagagagtccctccagcaccacccctccaattgagatcagctcctctcgtctgaccaagttgacccgccgaaccaccgacaggaagagtgagttcctgaaaactctgaaggatgaccggaatggagacttctcagagaatagagactgtgacaagctggaagatttggaggacaacagcacacctgaaccaaaggaaaatggggaggaaggctgtcatcaaaatggtcttgccctccctgtagtggaagaaggggaggttctctcacactctctagaagcagagcacaggttattgaaagctatgggttggcaggaatatcctgaaaatgatgagaattgccttcccctcacagaggatgagctcaaagagttccacatgaagacagagcagctgagaagaaatggctttggaaagaatggcttcttgcagagccgcagttccagtctgttctccccttggagaagcacttgcaaagcagagtttgaggactcagacaccgaaaccagtagcagtgaaacatcagatgacgatgcctggaagtaggcatataaatgctcacagttaaatctgacccagtaaactctgtgtgtttagggagtatacaaaagaaatcgttcttttccttttcttatgttgttgaatacttcattcacaagggaaataatcatatcccaaagagagagcaattggcttgttttgcttttgttattgttcttccctgttatctgctttatagagagaagtttgtgtggtgggacagattttttaaacacactcacacacacacacacatacacacccagtatatatggggcgatgcacaggtaggagctggcagtgcagggaagaggagacactggtctgcagcaacagcttctactaccagcccttggggcactcacccctgtgatcaagcaatcattgtcaatgacaaagtgactattgaagttataattgtattaaattaatgctaataatttggatattttattttatttttggctgctcgggtaactttagcccttaaccaagcatatgtgggtttttttggttgtttttttttgttttttttttctttttcctttttgggtacagctgtaaaatatttggatataggaaatgttatattttacaatccaccctgaatatcaaggctgcaagaataacacaacatttcctatatccaaatatgtgttattcttgcagccttgatattcagggtggattgtaaaatataaatttttgtgagatttcaaagattaagattattttgataacattatttacagatttaaaagatgtggttatcacaagtctcgagggggaaactactgcataaaataactaacttggaataaatattttgcatcagtttg

SEQ ID NO: 63492 - DNA, 2721 bp, Homo sapiens
gactatggaattgatctcctaatggtctcttagttgatgtttaaatacctcagatccatcctttaagctgctactagagtgacggttgtaagttgataattagataatgttaactgcatgaaagatggatcctcattacctgtagaataaaacttaatctcccctaagaaatcctccacaagctggctcttgcctgctttgccagatacctctttccccacagaagggtcccctccttccctagcactactcatgctgaactatttgcagacctgaatattctgttctttttaatgctttctgttcctggaattaccgtttttccagctttggaattcatctttaaggattcttaaatcacctgttagtaaagccttttctgatagcacttctctttcaagtagaattgatgtttcttactgagtactccttcttccctaatatgaatttttttcatcgtccttgtaaccttttattgtacttaacttgtctagaagtttttatagcaaaactgtgacccgtgtgaagacaggggctctttattgtatttctagcacagtccttggcatatggtctgcccctgccctacacccatcttagaaatgcagtgaatactatacatttcactgaccacattgtcctcctttaatctgaggaaaatgatccacattcttgttcatctaactttcagtgcctccttatttggcatacatatcctataggaaagtgggaattcgcacatttagtctgtttatttaaaataaatgaaatcccttatatcaaaggaaatgaaactcaggagaacctaatattaacataatacctattgattttgtgttttgatattttctgtttgttacgtttctgaatacagtgtcaaattagtaagtgttgctaatatgtaaaatatgtaattatttgataggttccatggtgatggctactttgtgaaaagtgccaaaatgatcagctttctgtatcaaccattcatatcccttttttcctagccttccttgaatccagaagctggcaaacagcatcagccatgcagacctattgggacaccttctggagtatgggaaaacccgcctagtgccaagcaaccctccaagatgctagttatcaaaaaagtttccaaagaggatcctgctgctgccttctctgctgcattcacctcaccaggatctcaccatgcaaatgggaacaaattgtcatccgtggttccaagtgtctataagaacctggttcctaagcctgtaccacctccttccaagcctaatgcatggaaagctaacaggatggagcacaagtcaggatccctttcctctagccgggagtctgcttttaccagtccaatctctgttaccaaaccagtggtactggctagtggtgcagctctgagttctcccaaagagagtccctccagcaccacccctccaattgagatcagctcctctcgtctgaccaagttgacccgccgaaccaccgacaggaagagtgagttcctgaaaactctgaaggatgaccggaatggagacttctcagagaatagagactgtgacaagctggaagatttggaggacaacagcacacctgaaccaaaggaaaatggggaggaaggctgtcatcaaaatggtcttgccctccctgtagtggaagaaggggaggttctctcacactctctagaagcagagcacaggttattgaaagctatgggttggcaggaatatcctgaaaatgatgagaattgccttcccctcacagaggatgagctcaaagagttccacatgaagacagagcagctgagaagaaatggctttggaaagaatggcttcttgcagagccgcagttccagtctgttctccccttggagaagcacttgcaaagcagagtttgaggactcagacaccgaaaccagtagcagtgaaacatcagatgacgatgcctggaagtaggcatataaatgctcacagttaaatctgacccagtaaactctgtgtgtttagggagtatacaaaagaaatcgttcttttccttttcttatgttgttgaatacttcattcacaagggaaataatcatatcccaaagagagagcaattggcttgttttgcttttgttattgttcttccctgttatctgctttatagagagaagtttgtgtggtgggacagattttttaaacacactcacacacacacacacatacacacccagtatatatggggcgatgcacaggtaggagctggcagtgcagggaagaggagacactggtctgcagcaacagcttctactaccagcccttggggcactcacccctgtgatcaagcaatcattgtcaatgacaaagtgactattgaagttataattgtattaaattaatgctaataatttggatattttattttatttttggctgctcgggtaactttagcccttaaccaagcatatgtgggtttttttggttgtttttttttgttttttttttctttttcctttttgggtacagctgtaaaatatttggatataggaaatgttgtgttattcttgcagccttgatattcagggtggattgtaaaatataaatttttgtgagatttcaaagattaagattattttgataacattatttacagatttaaaagatgtggttatcacaagtctcgagggggaaactactgcataaaataactaacttggaataaatattttgcatcagtttg

SEQ ID NO: 63493 - DNA, 2559 bp, Homo sapiens
cgagtatgggctatcgtcgacccacgccgtcgctttgttatggttgtggactagccgcctctgccgggtcgacaagctggggacgcgtcctcagacgcagcgtctagtccctggccatagctccgccgctgcccgttggtgtctcacctttaactctccttatgctgggtgaaaacaaagagtgatagattcgtgtggcctttcaaatgattgtgaagtggtggaaatggatccaaaataataagtgacttctctaccaaagcatagaagattcttcatatctccttccagtggctcaatttagattttgggaaggagcagaacaagtgaaacacagaaaactgaagagaagaaatcctcattttggacctatatttctccttgactatttcttaatatccatcctacccatcgttctaatgttttaactttgctctgaatttataaatagtaaaggccaaagacatagaatatacatttagtagctttataccaagaaatttgccttgaaagctgctgttcgtggagggaaaagtgtagcaaattcctgtctatttttattttttatttttttttaacaaagacaagatttatgtccctagattttgaaggttaaggcaaatataaatacatatctgcacactattttttagcagttgcatgagtaagagtaatgagatttgtattttaaggactttgtcatgtggatgttttggagttgactgctcagatcttttatagggctttaatatttttgatctattaccttgatgacattatttgtccacacttgagcccatctgtctttctagctatgaccttgttatgaacagtatttgcactcggtgcaaatatccatgtcttacctaattaagcaacatcatagtgccataactcaaggaagttgaatgaggtgaacatagatacagctctttccccttccccccctttttaaatgtaacaaatactttttatgttccccttccccccttccccttttcccctttccccttttggaaacgtgtcaggaaccaaatagtttaagatgagcagttgaggggactgagagagtgatcgacacagaacctggcttcttcgtgcttcatcataagtcgtgctgccggccaggttacttaagcacccttttaacaaggaaaccttgtgggagatccagctggccgactcgagttcagaaacaggaccacagaggttacactctgggatcctggccatgaggttggatgcctcaccttactgaaaggagacactggacctaaatggcgcagcatgattttgttcctgcttggctaaatttctcaacaccacagtcagctaagtcacctactgccaccttcgaaaaacacggagagcacctacccagaggagaaggtagatttggagtaagccgccgtcgacataattcctctgatggtttttttaacaatggtcccctacgaactgcaggagaaaatggtcttgccctccctgtagtggaagaaggggaggttctctcacactctctagaagcagagcacaggttattgaaagctatgggttggcaggaatatcctgaaaatgatgagaattgccttcccctcacagaggatgagctcaaagagttccacatgaagacagagcagctgagaagaaatggctttggaaagaatggcttcttgcagagccgcagttccagtctgttctccccttggagaagcacttgcaaagcagagtttgaggactcagacaccgaaaccagtagcagtgaaacatcagatgacgatgcctggaagtaggcatataaatgctcacagttaaatctgacccagtaaactctgtgtgtttagggagtatacaaaagaaatcgttcttttccttttcttatgttgttgaatacttcattcacaagggaaataatcatatcccaaagagagagcaattggcttgttttgcttttgttattgttcttccctgttatctgctttatagagagaagtttgtgtggtgggacagattttttaaacacactcacacacacacacacatacacacccagtatatatggggcgatgcacaggtaggagctggcagtgcagggaagaggagacactggtctgcagcaacagcttctactaccagcccttggggcactcacccctgtgatcaagcaatcattgtcaatgacaaagtgactattgaagttataattgtattaaattaatgctaataatttggatattttattttatttttggctgctcgggtaactttagcccttaaccaagcatatgtgggtttttttggttgtttttttttgttttttttttctttttcctttttgggtacagctgtaaaatatttggatataggaaatgttgtgttattcttgcagccttgatattcagggtggattgtaaaatataaatttttgtgagatttcaaagattaagattattttgataacattatttacagatttaaaagatgtggttatcacaagtctcgagggggaaactactgcataaaataactaacttggaataaatattttgcatcagtttg

SEQ ID NO: 63494 - DNA, 1896 bp, Homo sapiens
cgagtatgggctatcgtcgacccacgccgtcgctttgttatggttgtggactagccgcctctgccgggtcgacaagctggggacgcgtcctcagacgcagcgtctagtccctggccatagctccgccgctgcccgttggtgtctcacctttaactctccttatgctgggtgaaaacaaagagtgatagattcgtgtggcctttcaaatgattgtgaagtggtggaaatggatccaaaataataagtgacttctctaccaaagcatagaagattcttcatatctccttccagtggctcaatttagattttgggaaggagcagaacaagtgaaacacagaaaactgaagagaagaaatcctcattttggacctatatttctccttgactatttcttaatatccatcctacccatcgttctaatgttttaactttgctctgaatttataaatagtaaaggccaaagacatagaatatacatttagtagctttataccaagaaatttgccttgaaagctgctgttcgtggagggaaaagtgtagcaaattcctgtctatttttattttttatttttttttaacaaagacaagatttatgtccctagattttgaaggttaaggcaaatataaatacatatctgcacactattttttagcagttgcatgagtaagagtaatgagatttgtattttaaggactttgtcatgtggatgttttggagttgactgctcagatcttttatagggctttaatatttttgatctattaccttgatgacattatttgtccacacttgagcccatctgtctttctagctatgaccttgttatgaacagtatttgcactcggtgcaaatatccatgtcttacctaattaagcaacatcatagtgccataactcaaggaagttgaatgaggtgaacatagatacagctctttccccttccccccctttttaaatgtaacaaatactttttatgttccccttccccccttccccttttcccctttccccttttggaaacgtgtcaggaaccaaatagtttaagatgagcagttgaggggactgagagagtgatcgacacagaacctggcttcttcgtgcttcatcataagtcgtgctgccggccaggttacttaagcacccttttaacaaggaaaccttgtgggagatccagctggccgactcgagttcagaaacaggaccacagaggttacactctgggatcctggccatgaggttggatgcctcaccttactgaaaggagacactggacctaaatggcgcagcatgattttgttcctgcttggctaaatttctcaacaccacagtcagctaagtcacctactgccaccttcgaaaaacacggagagcacctacccagaggagaaggtagatttggagtaagccgccgtcgacataattcctctgatggtttttttaacaatggtcccctacgaactgcaggagattcttggcaccagccctccctgttccgccatgattctgtggactctggtgtctctaagggagcatatgctggaatcacagggaacccatctggttggcatagctcttcccgaggtcatgatggcatgagccaacgtagtggaggtggcacagggaaccatcgccattggaatggcagcttccactcccggaaagggtgtgcttttcaggaaaagccacctatggagattagggaagaaaagaaagaagacaaggtggaaaagttgcagtttgaagaggaggactttccttccttgaatccagaagctggcaaacagcatcagccatgcagacctattgggacaccttctggagtatgggaaaacccgcctagtgccaagcaccctccagatgctagtatcattcagtgaaaatcgggccaggtatctg

SEQ ID NO: 63495 - DNA, 1070 bp, Homo sapiens
  misc_feature (735)..(735): n is a, c, g, or t
  misc_feature (738)..(738): n is a, c, g, or t
  misc_feature (853)..(853): n is a, c, g, or t
acctgcgctaattggttcctaggcccggctttctgtttgggggccattcttaatttctagttgaatccagatgttgaacggtccttgaagttctattccagggctcccaggcagcagaatctgcccacagagttcgggtaagtagagtgcaagtactgaaacaatctcagaatgatggtggtgaaggaaggtaagagacgggattttaggcccagtgtgacctgaattgcttgccatctgtgggacttatgttttactttgcaaaacagggtttataaggcctatggggacacatctcactgcattagggccctttactatcatttagagggggaaaaaagcccagttcttacatccattttctttgctgggacctataaacttcattaagggttaaagagcacaagagcaggattttcacttccatgaaaggtgtggtgataagggccctaggcttgggggtggttcggaaagtcagatcatttctcctactgccctcggctttatttctcggctatgtgaccttgggcaagtcccttctcttatctagacttgtttcacaagggaaaatgggttacccgaaaagcgagagtggattagtgtcgtcgcatacgcgcggatctatattgtgagggtaacgtcgcaggagctattgtagctaagtgagatgaccgatgggggcaaacaacgagccggcccaaggtcacacttcgtaatgcactgcactggacttantangggtacgtactatggatccttgcatccgccgagtgcacgtacagcgagaatcagtctgtttactcagtcgaccagcgaattagtagcgcaacatgtagtagaggatcctatgcgncgctaatagttacgtgacaggcaggccttctgtaagtttcggatgcgtagagccgtgtgcgagattttctagtgtgcagatgcctcgtgctgcatggccaagcactcgcccgctcttcctcagttaacgtgcaagtactccaatatgagaatctgcaggtactgagaaagcggcagctgtcgccaagcagcaggcatatcccactggaatcccccgg

SEQ ID NO: 63496 - DNA, 324 bp, Homo sapiens
atcctggccatgaggttggatgcctcaccttactgaaaggagacactggacctaaatggcgcagcatgattttgttcctgcttggctaaatttctcaacaccacagtcagctaaggtactgttctccattcctgtagtaacttctcaaatatgagagggtttgggggtggttttggttgttttttggtttcattttgttttgagacagggtctccctctgtcacccaggatgaagtgcggtagtgtgatcacagcttactgcagctttggcctcctgggctcaggcagtcctcctgactcagctcccagagtagctgggcctac

SEQ ID NO: 63497 - DNA, 410 bp, Homo sapiens
gatcagctcctctcgtctgaccaagttgacccgccgaaccaccgacaggaagagtgagttcctgaaaactctgaaggatgaccggaatggagacttctcagagaatagagactgtgacaagctggaagatgtaagagcatccgccttttctgggggtagcctaggaattttcctttgatacatacgtgatttcttcttcttaaaggataaagatgtggcaagatttttaaatgtacagagatactgtctgtaggtgtaactgccttctagaccacatagtaaagtgagtttaatccttttttcagcaaaaatgttaaattcgggtttattttagtaatcactcacctattgaagtacatcttggttgcttccaagtgttggcaactatgaataaaactgcagtaaacatc

SEQ ID NO: 63498 - DNA, 269 bp, Homo sapiens
acgggggatgggagggccgtgctgctggtcgctcctcctcctccacccgctctgcccctcctggaccttgtgggccgggcagccattttgggaagagctttgttatggttgtggactagccgcctctgccgggtcgacaagctggggacgcgtcctcagacgcagcgtctagtccctggccatagctccgccgctgcccgttggtgtctcacctttaactctccttatgctggacctaactttgcgtgtgtgtgtgtagacaagatgaa

SEQ ID NO: 63499 - DNA, 3496 bp, Homo sapiens
ggtagcgcggccgacgcagcgcgcgcagcctccggggccaggccgtgtggcccgctggggactggagtctcaacgacgcgcacacgagaagtaaggagcggaaggtgggaaagggccggaaaacacacgttcctccgaaaccggtttgcaagtccttgtagagttggtgtctcacctttaactctccttatgctgggtgaaaacaaagagtgatagattcgtgtggcctttcaaatgattgtgaagtggtggaaatggatccaaaataataagtgacttctctaccaaagcatagaagattcttcatatctccttccagtggctcaatttagattttgggaaggagcagaacaagtgaaacacagaaaactgaagagaagaaatcctcattttggacctatatttctccttgactatttcttaatatccatcctacccatcgttctaatgttttaactttgctctgaatttataaatagtaaaggccaaagacatagaatatacatttagtagctttataccaagaaatttgccttgaaagctgctgttcgtggagggaaaagtgtagcaaattcctgtctatttttattttttatttttttttaacaaagacaagatttatgtccctagattttgaaggttaaggcaaatataaatacatatctgcacactattttttagcagttgcatgagtaagagtaatgagatttgtattttaaggactttgtcatgtggatgttttggagttgactgctcagatcttttatagggctttaatatttttgatctattaccttgatgacattatttgtccacacttgagcccatctgtctttctagctatgaccttgttatgaacagtatttgcactcggtgcaaatatccatgtcttacctaattaagcaacatcatagtgccataactcaaggaagttgaatgaggtgaacatagatacagctctttccccttccccccctttttaaatgtaacaaatactttttatgttccccttccccccttccccttttcccctttccccttttggaaacgtgtcaggaaccaaatagtttaagatgagcagttgaggggactgagagagtgatcgacacagaacctggcttcttcgtgcttcatcataagtcgtgctgccggccaggttacttaagcacccttttaacaaggaaaccttgtgggagatccagctggccgactcgagttcagaaacaggaccacagaggttacactctgggatcctggccatgaggttggatgcctcaccttactgaaaggagacactggacctaaatggcgcagcatgattttgttcctgcttggctaaatttctcaacaccacagtcagctaagtcacctactgccaccttcgaaaaacacggagagcacctacccagaggagaaggtagatttggagtaagccgccgtcgacataattcctctgatggtttttttaacaatggtcccctacgaactgcaggagattcttggcaccagccctccctgttccgccatgattctgtggactctggtgtctctaagggagcatatgctggaatcacagggaacccatctggttggcatagctcttcccgaggtcatgatggcatgagccaacgtagtggaggtggcacagggaaccatcgccattggaatggcagcttccactcccggaaagggtgtgcttttcaggaaaagccacctatggagattagggaagaaaagaaagaagacaaggtggaaaagttgcagtttgaagaggaggactttccttccttgaatccagaagctggcaaacagcatcagccatgcagacctattgggacaccttctggagtatgggaaaacccgcctagtgccaagcaaccctccaagatgctagttatcaaaaaagtttccaaagaggatcctgctgctgccttctctgctgcattcacctcaccaggatctcaccatgcaaatgggaacaaattgtcatccgtggttccaagtgtctataagaacctggttcctaagcctgtaccacctccttccaagcctaatgcatggaaagctaacaggatggagcacaagtcaggatccctttcctctagccgggagtctgcttttaccagtccaatctctgttaccaaaccagtggtactggctagtggtgcagctctgagttctcccaaagagagtccctccagcaccacccctccaattgagatcagctcctctcgtctgaccaagttgacccgccgaaccaccgacaggaagagtgagttcctgaaaactctgaaggatgaccggaatggagacttctcagagaatagagactgtgacaagctggaagatttggaggacaacagcacacctgaaccaaaggaaaatggggaggaaggctgtcatcaaaatggtcttgccctccctgtagtggaagaaggggaggttctctcacactctctagaagcagagcacaggttattgaaagctatgggttggcaggaatatcctgaaaatgatgagaattgccttcccctcacagaggatgagctcaaagagttccacatgaagacagagcagctgagaagaaatggctttggaaagaatggcttcttgcagagccgcagttccagtctgttctccccttggagaagcacttgcaaagcagagtttgaggactcagacaccgaaaccagtagcagtgaaacatcagatgacgatgcctggaagtaggcatataaatgctcacagttaaatctgacccagtaaactctgtgtgtttagggagtatacaaaagaaatcgttcttttccttttcttatgttgttgaatacttcattcacaagggaaataatcatatcccaaagagagagcaattggcttgttttgcttttgttattgttcttccctgttatctgctttatagagagaagtttgtgtggtgggacagattttttaaacacactcacacacacacacacatacacacccagtatatatggggcgatgcacaggtaggagctggcagtgcagggaagaggagacactggtctgcagcaacagcttctactaccagcccttggggcactcacccctgtgatcaagcaatcattgtcaatgacaaagtgactattgaagttataattgtattaaattaatgctaataatttggatattttattttatttttggctgctcgggtaactttagcccttaaccaagcatatgtgggtttttttggttgtttttttttgttttttttttctttttcctttttgggtacagctgtaaaatatttggatataggaaatgttgtgttattcttgcagccttgatattcagggtggattgtaaaatataaatttttgtgagatttcaaagattaagattattttgataacattatttacagatttaaaagatgtggttatcacaagtctcgagggggaaactactgcataaaataactaacttggaataaatattttgcatcagtttg

SEQ ID NO: 63500 - DNA, 3451 bp, Homo sapiens
ggtagcgcggccgacgcagcgcgcgcagcctccggggccaggccgtgtggcccgctggggactggagtctcaacgacgcgcacacgagaagtaaggagcggaaggtgggaaagggccggaaaacacacgttcctccgaaaccggtttgcaagtccttgtagagagtgatagattcgtgtggcctttcaaatgattgtgaagtggtggaaatggatccaaaataataagtgacttctctaccaaagcatagaagattcttcatatctccttccagtggctcaatttagattttgggaaggagcagaacaagtgaaacacagaaaactgaagagaagaaatcctcattttggacctatatttctccttgactatttcttaatatccatcctacccatcgttctaatgttttaactttgctctgaatttataaatagtaaaggccaaagacatagaatatacatttagtagctttataccaagaaatttgccttgaaagctgctgttcgtggagggaaaagtgtagcaaattcctgtctatttttattttttatttttttttaacaaagacaagatttatgtccctagattttgaaggttaaggcaaatataaatacatatctgcacactattttttagcagttgcatgagtaagagtaatgagatttgtattttaaggactttgtcatgtggatgttttggagttgactgctcagatcttttatagggctttaatatttttgatctattaccttgatgacattatttgtccacacttgagcccatctgtctttctagctatgaccttgttatgaacagtatttgcactcggtgcaaatatccatgtcttacctaattaagcaacatcatagtgccataactcaaggaagttgaatgaggtgaacatagatacagctctttccccttccccccctttttaaatgtaacaaatactttttatgttccccttccccccttccccttttcccctttccccttttggaaacgtgtcaggaaccaaatagtttaagatgagcagttgaggggactgagagagtgatcgacacagaacctggcttcttcgtgcttcatcataagtcgtgctgccggccaggttacttaagcacccttttaacaaggaaaccttgtgggagatccagctggccgactcgagttcagaaacaggaccacagaggttacactctgggatcctggccatgaggttggatgcctcaccttactgaaaggagacactggacctaaatggcgcagcatgattttgttcctgcttggctaaatttctcaacaccacagtcagctaagtcacctactgccaccttcgaaaaacacggagagcacctacccagaggagaaggtagatttggagtaagccgccgtcgacataattcctctgatggtttttttaacaatggtcccctacgaactgcaggagattcttggcaccagccctccctgttccgccatgattctgtggactctggtgtctctaagggagcatatgctggaatcacagggaacccatctggttggcatagctcttcccgaggtcatgatggcatgagccaacgtagtggaggtggcacagggaaccatcgccattggaatggcagcttccactcccggaaagggtgtgcttttcaggaaaagccacctatggagattagggaagaaaagaaagaagacaaggtggaaaagttgcagtttgaagaggaggactttccttccttgaatccagaagctggcaaacagcatcagccatgcagacctattgggacaccttctggagtatgggaaaacccgcctagtgccaagcaaccctccaagatgctagttatcaaaaaagtttccaaagaggatcctgctgctgccttctctgctgcattcacctcaccaggatctcaccatgcaaatgggaacaaattgtcatccgtggttccaagtgtctataagaacctggttcctaagcctgtaccacctccttccaagcctaatgcatggaaagctaacaggatggagcacaagtcaggatccctttcctctagccgggagtctgcttttaccagtccaatctctgttaccaaaccagtggtactggctagtggtgcagctctgagttctcccaaagagagtccctccagcaccacccctccaattgagatcagctcctctcgtctgaccaagttgacccgccgaaccaccgacaggaagagtgagttcctgaaaactctgaaggatgaccggaatggagacttctcagagaatagagactgtgacaagctggaagatttggaggacaacagcacacctgaaccaaaggaaaatggggaggaaggctgtcatcaaaatggtcttgccctccctgtagtggaagaaggggaggttctctcacactctctagaagcagagcacaggttattgaaagctatgggttggcaggaatatcctgaaaatgatgagaattgccttcccctcacagaggatgagctcaaagagttccacatgaagacagagcagctgagaagaaatggctttggaaagaatggcttcttgcagagccgcagttccagtctgttctccccttggagaagcacttgcaaagcagagtttgaggactcagacaccgaaaccagtagcagtgaaacatcagatgacgatgcctggaagtaggcatataaatgctcacagttaaatctgacccagtaaactctgtgtgtttagggagtatacaaaagaaatcgttcttttccttttcttatgttgttgaatacttcattcacaagggaaataatcatatcccaaagagagagcaattggcttgttttgcttttgttattgttcttccctgttatctgctttatagagagaagtttgtgtggtgggacagattttttaaacacactcacacacacacacacatacacacccagtatatatggggcgatgcacaggtaggagctggcagtgcagggaagaggagacactggtctgcagcaacagcttctactaccagcccttggggcactcacccctgtgatcaagcaatcattgtcaatgacaaagtgactattgaagttataattgtattaaattaatgctaataatttggatattttattttatttttggctgctcgggtaactttagcccttaaccaagcatatgtgggtttttttggttgtttttttttgttttttttttctttttcctttttgggtacagctgtaaaatatttggatataggaaatgttgtgttattcttgcagccttgatattcagggtggattgtaaaatataaatttttgtgagatttcaaagattaagattattttgataacattatttacagatttaaaagatgtggttatcacaagtctcgagggggaaactactgcataaaataactaacttggaataaatattttgcatcagtttg

SEQ ID NO: 63501 - DNA, 3470 bp, Homo sapiens
acctgcgctaattggttcctaggcccggctttctgtttgggggccattcttaatttctagttgaatccagatgttgaacggtccttgaagttctattccagggctcccaggcagcagaatctgcccacagagttcggttggtgtctcacctttaactctccttatgctgggtgaaaacaaagagtgatagattcgtgtggcctttcaaatgattgtgaagtggtggaaatggatccaaaataataagtgacttctctaccaaagcatagaagattcttcatatctccttccagtggctcaatttagattttgggaaggagcagaacaagtgaaacacagaaaactgaagagaagaaatcctcattttggacctatatttctccttgactatttcttaatatccatcctacccatcgttctaatgttttaactttgctctgaatttataaatagtaaaggccaaagacatagaatatacatttagtagctttataccaagaaatttgccttgaaagctgctgttcgtggagggaaaagtgtagcaaattcctgtctatttttattttttatttttttttaacaaagacaagatttatgtccctagattttgaaggttaaggcaaatataaatacatatctgcacactattttttagcagttgcatgagtaagagtaatgagatttgtattttaaggactttgtcatgtggatgttttggagttgactgctcagatcttttatagggctttaatatttttgatctattaccttgatgacattatttgtccacacttgagcccatctgtctttctagctatgaccttgttatgaacagtatttgcactcggtgcaaatatccatgtcttacctaattaagcaacatcatagtgccataactcaaggaagttgaatgaggtgaacatagatacagctctttccccttccccccctttttaaatgtaacaaatactttttatgttccccttccccccttccccttttcccctttccccttttggaaacgtgtcaggaaccaaatagtttaagatgagcagttgaggggactgagagagtgatcgacacagaacctggcttcttcgtgcttcatcataagtcgtgctgccggccaggttacttaagcacccttttaacaaggaaaccttgtgggagatccagctggccgactcgagttcagaaacaggaccacagaggttacactctgggatcctggccatgaggttggatgcctcaccttactgaaaggagacactggacctaaatggcgcagcatgattttgttcctgcttggctaaatttctcaacaccacagtcagctaagtcacctactgccaccttcgaaaaacacggagagcacctacccagaggagaaggtagatttggagtaagccgccgtcgacataattcctctgatggtttttttaacaatggtcccctacgaactgcaggagattcttggcaccagccctccctgttccgccatgattctgtggactctggtgtctctaagggagcatatgctggaatcacagggaacccatctggttggcatagctcttcccgaggtcatgatggcatgagccaacgtagtggaggtggcacagggaaccatcgccattggaatggcagcttccactcccggaaagggtgtgcttttcaggaaaagccacctatggagattagggaagaaaagaaagaagacaaggtggaaaagttgcagtttgaagaggaggactttccttccttgaatccagaagctggcaaacagcatcagccatgcagacctattgggacaccttctggagtatgggaaaacccgcctagtgccaagcaaccctccaagatgctagttatcaaaaaagtttccaaagaggatcctgctgctgccttctctgctgcattcacctcaccaggatctcaccatgcaaatgggaacaaattgtcatccgtggttccaagtgtctataagaacctggttcctaagcctgtaccacctccttccaagcctaatgcatggaaagctaacaggatggagcacaagtcaggatccctttcctctagccgggagtctgcttttaccagtccaatctctgttaccaaaccagtggtactggctagtggtgcagctctgagttctcccaaagagagtccctccagcaccacccctccaattgagatcagctcctctcgtctgaccaagttgacccgccgaaccaccgacaggaagagtgagttcctgaaaactctgaaggatgaccggaatggagacttctcagagaatagagactgtgacaagctggaagatttggaggacaacagcacacctgaaccaaaggaaaatggggaggaaggctgtcatcaaaatggtcttgccctccctgtagtggaagaaggggaggttctctcacactctctagaagcagagcacaggttattgaaagctatgggttggcaggaatatcctgaaaatgatgagaattgccttcccctcacagaggatgagctcaaagagttccacatgaagacagagcagctgagaagaaatggctttggaaagaatggcttcttgcagagccgcagttccagtctgttctccccttggagaagcacttgcaaagcagagtttgaggactcagacaccgaaaccagtagcagtgaaacatcagatgacgatgcctggaagtaggcatataaatgctcacagttaaatctgacccagtaaactctgtgtgtttagggagtatacaaaagaaatcgttcttttccttttcttatgttgttgaatacttcattcacaagggaaataatcatatcccaaagagagagcaattggcttgttttgcttttgttattgttcttccctgttatctgctttatagagagaagtttgtgtggtgggacagattttttaaacacactcacacacacacacacatacacacccagtatatatggggcgatgcacaggtaggagctggcagtgcagggaagaggagacactggtctgcagcaacagcttctactaccagcccttggggcactcacccctgtgatcaagcaatcattgtcaatgacaaagtgactattgaagttataattgtattaaattaatgctaataatttggatattttattttatttttggctgctcgggtaactttagcccttaaccaagcatatgtgggtttttttggttgtttttttttgttttttttttctttttcctttttgggtacagctgtaaaatatttggatataggaaatgttgtgttattcttgcagccttgatattcagggtggattgtaaaatataaatttttgtgagatttcaaagattaagattattttgataacattatttacagatttaaaagatgtggttatcacaagtctcgagggggaaactactgcataaaataactaacttggaataaatattttgcatcagtttg

SEQ ID NO: 63502 - DNA, 3478 bp, Homo sapiens
acgggggatgggagggccgtgctgctggtcgctcctcctcctccacccgctctgcccctcctggaccttgtgggccgggcagccattttgggaagagctttgttatggttgtggactagccgcctctgccgggtcgacaagctggggacgcgtcctcagacgcagcgtctagtccctggccatagctccgccgctgcccgttggtgtctcacctttaactctccttatgctgggtgaaaacaaagagtgatagattcgtgtggcctttcaaatgattgtgaagtggtggaaatggatccaaaataataagtgacttctctaccaaagcatagaagattcttcatatctccttccagtggctcaatttagattttgggaaggagcagaacaagtgaaacacagaaaactgaagagaagaaatcctcattttggacctatatttctccttgactatttcttaatatccatcctacccatcgttctaatgttttaactttgctctgaatttataaatagtaaaggccaaagacatagaatatacatttagtagctttataccaagaaatttgccttgaaagctgctgttcgtggagggaagatttatgtccctagattttgaaggttaaggcaaatataaatacatatctgcacactattttttagcagttgcatgagtaagagtaatgagatttgtattttaaggactttgtcatgtggatgttttggagttgactgctcagatcttttatagggctttaatatttttgatctattaccttgatgacattatttgtccacacttgagcccatctgtctttctagctatgaccttgttatgaacagtatttgcactcggtgcaaatatccatgtcttacctaattaagcaacatcatagtgccataactcaaggaagttgaatgaggtgaacatagatacagctctttccccttccccccctttttaaatgtaacaaatactttttatgttccccttccccccttccccttttcccctttccccttttggaaacgtgtcaggaaccaaatagtttaagatgagcagttgaggggactgagagagtgatcgacacagaacctggcttcttcgtgcttcatcataagtcgtgctgccggccaggttacttaagcacccttttaacaaggaaaccttgtgggagatccagctggccgactcgagttcagaaacaggaccacagaggttacactctgggatcctggccatgaggttggatgcctcaccttactgaaaggagacactggacctaaatggcgcagcatgattttgttcctgcttggctaaatttctcaacaccacagtcagctaagtcacctactgccaccttcgaaaaacacggagagcacctacccagaggagaaggtagatttggagtaagccgccgtcgacataattcctctgatggtttttttaacaatggtcccctacgaactgcaggagattcttggcaccagccctccctgttccgccatgattctgtggactctggtgtctctaagggagcatatgctggaatcacagggaacccatctggttggcatagctcttcccgaggtcatgatggcatgagccaacgtagtggaggtggcacagggaaccatcgccattggaatggcagcttccactcccggaaagggtgtgcttttcaggaaaagccacctatggagattagggaagaaaagaaagaagacaaggtggaaaagttgcagtttgaagaggaggactttccttccttgaatccagaagctggcaaacagcatcagccatgcagacctattgggacaccttctggagtatgggaaaacccgcctagtgccaagcaaccctccaagatgctagttatcaaaaaagtttccaaagaggatcctgctgctgccttctctgctgcattcacctcaccaggatctcaccatgcaaatgggaacaaattgtcatccgtggttccaagtgtctataagaacctggttcctaagcctgtaccacctccttccaagcctaatgcatggaaagctaacaggatggagcacaagtcaggatccctttcctctagccgggagtctgcttttaccagtccaatctctgttaccaaaccagtggtactggctagtggtgcagctctgagttctcccaaagagagtccctccagcaccacccctccaattgagatcagctcctctcgtctgaccaagttgacccgccgaaccaccgacaggaagagtgagttcctgaaaactctgaaggatgaccggaatggagacttctcagagaatagagactgtgacaagctggaagatttggaggacaacagcacacctgaaccaaaggaaaatggggaggaaggctgtcatcaaaatggtcttgccctccctgtagtggaagaaggggaggttctctcacactctctagaagcagagcacaggttattgaaagctatgggttggcaggaatatcctgaaaatgatgagaattgccttcccctcacagaggatgagctcaaagagttccacatgaagacagagcagctgagaagaaatggctttggaaagaatggcttcttgcagagccgcagttccagtctgttctccccttggagaagcacttgcaaagcagagtttgaggactcagacaccgaaaccagtagcagtgaaacatcagatgacgatgcctggaagtaggcatataaatgctcacagttaaatctgacccagtaaactctgtgtgtttagggagtatacaaaagaaatcgttcttttccttttcttatgttgttgaatacttcattcacaagggaaataatcatatcccaaagagagagcaattggcttgttttgcttttgttattgttcttccctgttatctgctttatagagagaagtttgtgtggtgggacagattttttaaacacactcacacacacacacacatacacacccagtatatatggggcgatgcacaggtaggagctggcagtgcagggaagaggagacactggtctgcagcaacagcttctactaccagcccttggggcactcacccctgtgatcaagcaatcattgtcaatgacaaagtgactattgaagttataattgtattaaattaatgctaataatttggatattttattttatttttggctgctcgggtaactttagcccttaaccaagcatatgtgggtttttttggttgtttttttttgttttttttttctttttcctttttgggtacagctgtaaaatatttggatataggaaatgttgtgttattcttgcagccttgatattcagggtggattgtaaaatataaatttttgtgagatttcaaagattaagattattttgataacattatttacagatttaaaagatgtggttatcacaagtctcgagggggaaactactgcataaaataactaacttggaataaatattttgcatcagtttg

SEQ ID NO: 63503 - DNA, 3658 bp, Homo sapiens
cgagtatgggctatcgtcgacccacgccgtcgctttgttatggttgtggactagccgcctctgccgggtcgacaagctggggacgcgtcctcagacgcagcgtctagtccctggccatagctccgccgctgcccgttggtgtctcacctttaactctccttatgctgggtgaaaacaaagagtgatagattcgtgtggcctttcaaatgattgtgaagtggtggaaatggatccaaaataataagtgacttctctaccaaagcatagaagattcttcatatctccttccagtggctcaatttagattttgggaaggagcagaacaagtgaaacacagaaaactgaagagaagaaatcctcattttggacctatatttctccttgactatttcttaatatccatcctacccatcgttctaatgttttaactttgctctgaatttataaatagtaaaggccaaagacatagaatatacatttagtagctttataccaagaaatttgccttgaaagctgctgttcgtggagggaaaagtgtagcaaattcctgtctatttttattttttatttttttttaacaaagacaagatttatgtccctagattttgaaggttaaggcaaatataaatacatatctgcacactattttttagcagttgcatgagtaagagtaatgagatttgtattttaaggactttgtcatgtggatgttttggagttgactgctcagatcttttatagggctttaatatttttgatctattaccttgatgacattatttgtccacacttgagcccatctgtctttctagctatgaccttgttatgaacagtatttgcactcggtgcaaatatccatgtcttacctaattaagcaacatcatagtgccataactcaaggaagttgaatgaggtgaacatagatacagctctttccccttccccccctttttaaatgtaacaaatactttttatgttccccttccccccttccccttttcccctttccccttttggaaacgtgtcaggaaccaaatagtttaagatgagcagttgaggggactgagagagtgatcgacacagaacctggcttcttcgtgcttcatcataagtcgtgctgccggccaggttacttaagcacccttttaacaaggaaaccttgtgggagatccagctggccgactcgagttcagaaacaggaccacagaggttacactctgggatcctggccatgaggttggatgcctcaccttactgaaaggagacactggacctaaatggcgcagcatgattttgttcctgcttggctaaatttctcaacaccacagtcagctaagtcacctactgccaccttcgaaaaacacggagagcacctacccagaggagaaggtagatttggagtaagccgccgtcgacataattcctctgatggtttttttaacaatggtcccctacgaactgcaggagattcttggcaccagccctccctgttccgccatgattctgtggactctggtgtctctaagggagcatatgctggaatcacagggaacccatctggttggcatagctcttcccgaggtcatgatggcatgagccaacgtagtggaggtggcacagggaaccatcgccattggaatggcagcttccactcccggaaagggtgtgcttttcaggaaaagccacctatggagattagggaagaaaagaaagaagacaaggtggaaaagttgcagtttgaagaggaggactttccttccttgaatccagaagctggcaaacagcatcagccatgcagacctattgggacaccttctggagtatgggaaaacccgcctagtgccaagcaaccctccaagatgctagttatcaaaaaagtttccaaagaggatcctgctgctgccttctctgctgcattcacctcaccaggatctcaccatgcaaatgggaacaaattgtcatccgtggttccaagtgtctataagaacctggttcctaagcctgtaccacctccttccaagcctaatgcatggaaagctaacaggatggagcacaagtcaggatccctttcctctagccgggagtctgcttttaccagtccaatctctgttaccaaaccagtggtactggctagtggtgcagctctgagttctcccaaagagagtccctccagcaccacccctccaattgagatcagctcctctcgtctgaccaagttgacccgccgaaccaccgacaggaagagtgagttcctgaaaactctgaaggatgaccggaatggagacttctcagagaatagagactgtgacaagctggaagatttggaggacaacagcacacctgaaccaaaggaaaatggggaggaaggctgtcatcaaaatggtcttgccctccctgtagtggaagaaggggaggttctctcacactctctagaagcagagcacaggttattgaaagctatgggttggcaggaatatcctgaaaatgatgagaattgccttcccctcacagaggatgagctcaaagagttccacatgaagacagagcagctgagaagaaatggctttggaaagaatggcttcttgcagagccgcagttccagtctgttctccccttggagaagcacttgcaaagcagagtttgaggactcagacaccgaaaccagtagcagtgaaacatcagatgacgatgcctggaagtaggcatataaatgctcacagttaaatctgacccagtaaactctgtgtgtttagggagtatacaaaagaaatcgttcttttccttttcttatgttgttgaatacttcattcacaagggaaataatcatatcccaaagagagagcaattggcttgttttgcttttgttattgttcttccctgttatctgctttatagagagaagtttgtgtggtgggacagattttttaaacacactcacacacacacacacatacacacccagtatatatggggcgatgcacaggtaggagctggcagtgcagggaagaggagacactggtctgcagcaacagcttctactaccagcccttggggcactcacccctgtgatcaagcaatcattgtcaatgacaaagtgactattgaagttataattgtattaaattaatgctaataatttggatattttattttatttttggctgctcgggtaactttagcccttaaccaagcatatgtgggtttttttggttgtttttttttgttttttttttctttttcctttttgggtacagctgtaaaatatttggatataggaaatgttgtgttattcttgcagccttgatattcagggtggattgtaaaatataaatttttgtgagatttcaaagattaagattattttgataacattatttacagatttaaaagatgtggttatcacaagtctcgagggggaaactactgcataaaataactaacttggaataaatattttgcatcagtttggattgtcttgtgtaagaagtatattttctttaaaattagatgagtggattcttttttaggggaaatatttttagaagttggggggaaatgtgaattcagacacaactgtttctctattttagcagatacttttttgatgcagaaaaacctgtgcaataaattaccagtaataaagtcagaaaccaagata

SEQ ID NO: 63504 - DNA, 2734 bp, Homo sapiens
cgagtatgggctatcgtcgacccacgccgtcgctttgttatggttgtggactagccgcctctgccgggtcgacaagctggggacgcgtcctcagacgcagcgtctagtccctggccatagctccgccgctgcccgttggtgtctcacctttaactctccttatgctgggtgaaaacaaagagtgatagattcgtgtggcctttcaaatgattgtgaagtggtggaaatggatccaaaataataagtgacttctctaccaaagcatagaagattcttcatatctccttccagtggctcaatttagattttgggaaggagcagaacaagtgaaacacagaaaactgaagagaagaaatcctcattttggacctatatttctccttgactatttcttaatatccatcctacccatcgttctaatgttttaactttgctctgaatttataaatagtaaaggccaaagacatagaatatacatttagtagctttataccaagaaatttgccttgaaagctgctgttcgtggagggaaaagtgtagcaaattcctgtctatttttattttttatttttttttaacaaagacaagatttatgtccctagattttgaaggttaaggcaaatataaatacatatctgcacactattttttagcagttgcatgagtaagagtaatgagatttgtattttaaggactttgtcatgtggatgttttggagttgactgctcagatcttttatagggctttaatatttttgatctattaccttgatgacattatttgtccacacttgagcccatctgtctttctagctatgaccttgttatgaacagtatttgcactcggtgcaaatatccatgtcttacctaattaagcaacatcatagtgccataactcaaggaagttgaatgaggtgaacatagatacagctctttccccttccccccctttttaaatgtaacaaatactttttatgttccccttccccccttccccttttcccctttccccttttggaaacgtgtcaggaaccaaatagtttaagatgagcagttgaggggactgagagagtgatcgacacagaacctggcttcttcgtgcttcatcataagtcgtgctgccggccaggttacttaagcacccttttaacaaggaaaccttgtgggagatccagctggccgactcgagttcagaaacaggaccacagaggttacactctgggtgtcatccgtggttccaagtgtctataagaacctggttcctaagcctgtaccacctccttccaagcctaatgcatggaaagctaacaggatggagcacaagtcaggatccctttcctctagccgggagtctgcttttaccagtccaatctctgttaccaaaccagtggtactggctagtggtgcagctctgagttctcccaaagagagtccctccagcaccacccctccaattgagatcagctcctctcgtctgaccaagttgacccgccgaaccaccgacaggaagagtgagttcctgaaaactctgaaggatgaccggaatggagacttctcagagaatagagactgtgacaagctggaagatttggaggacaacagcacacctgaaccaaaggaaaatggggaggaaggctgtcatcaaaatggtcttgccctccctgtagtggaagaaggggaggttctctcacactctctagaagcagagcacaggttattgaaagctatgggttggcaggaatatcctgaaaatgatgagaattgccttcccctcacagaggatgagctcaaagagttccacatgaagacagagcagctgagaagaaatggctttggaaagaatggcttcttgcagagccgcagttccagtctgttctccccttggagaagcacttgcaaagcagagtttgaggactcagacaccgaaaccagtagcagtgaaacatcagatgacgatgcctggaagtaggcatataaatgctcacagttaaatctgacccagtaaactctgtgtgtttagggagtatacaaaagaaatcgttcttttccttttcttatgttgttgaatacttcattcacaagggaaataatcatatcccaaagagagagcaattggcttgttttgcttttgttattgttcttccctgttatctgctttatagagagaagtttgtgtggtgggacagattttttaaacacactcacacacacacacacatacacacccagtatatatggggcgatgcacaggtaggagctggcagtgcagggaagaggagacactggtctgcagcaacagcttctactaccagcccttggggcactcacccctgtgatcaagcaatcattgtcaatgacaaagtgactattgaagttataattgtattaaattaatgctaataatttggatattttattttatttttggctgctcgggtaactttagcccttaaccaagcatatgtgggtttttttggttgtttttttttgttttttttttctttttcctttttgggtacagctgtaaaatatttggatataggaaatgttgtgttattcttgcagccttgatattcagggtggattgtaaaatataaatttttgtgagatttcaaagattaagattattttgataacattatttacagatttaaaagatgtggttatcacaagtctcgagggggaaactactgcataaaataactaacttggaataaatattttgcatcagtttg

SEQ ID NO: 63505 - DNA, 3415 bp, Homo sapiens
cgagtatgggctatcgtcgacccacgccgtcgctttgttatggttgtggactagccgcctctgccgggtcgacaagctggggacgcgtcctcagacgcagcgtctagtccctggccatagctccgccgctgcccgttggtgtctcacctttaactctccttatgctgggtgaaaacaaagagtgatagattcgtgtggcctttcaaatgattgtgaagtggtggaaatggatccaaaataataagtgacttctctaccaaagcatagaagattcttcatatctccttccagtggctcaatttagattttgggaaggagcagaacaagtgaaacacagaaaactgaagagaagaaatcctcattttggacctatatttctccttgactatttcttaatatccatcctacccatcgttctaatgttttaactttgctctgaatttataaatagtaaaggccaaagacatagaatatacatttagtagctttataccaagaaatttgccttgaaagctgctgttcgtggagggaaaagtgtagcaaattcctgtctatttttattttttatttttttttaacaaagacaagatttatgtccctagattttgaaggttaaggcaaatataaatacatatctgcacactattttttagcagttgcatgagtaagagtaatgagatttgtattttaaggactttgtcatgtggatgttttggagttgactgctcagatcttttatagggctttaatatttttgatctattaccttgatgacattatttgtccacacttgagcccatctgtctttctagctatgaccttgttatgaacagtatttgcactcggtgcaaatatccatgtcttacctaattaagcaacatcatagtgccataactcaaggaagttgaatgaggtgaacatagatacagctctttccccttccccccctttttaaatgtaacaaatactttttatgttccccttccccccttccccttttcccctttccccttttggaaacgtgtcaggaaccaaatagtttaagatgagcagttgaggggactgagagagtgatcgacacagaacctggcttcttcgtgcttcatcataagtcgtgctgccggccaggttacttaagcacccttttaacaaggaaaccttgtgggagatccagctggccgactcgagttcagaaacaggaccacagaggttacactctgggatcctggccatgaggttggatgcctcaccttactgaaaggagacactggacctaaatggcgcagcatgattttgttcctgcttggctaaatttctcaacaccacagtcagctaagtcacctactgccaccttcgaaaaacacggagagcacctacccagaggagaaggtagatttggagtaagccgccgtcgacataattcctctgatggtttttttaacaatggtcccctacgaactgcaggagattcttggcaccagccctccctgttccgccatgattctgtggactctggtgtctctaagggagcatatgctggaatcacagggaacccatctggttggcatagctcttcccgaggtcatgatggcatgagccaacgtagtggaggtggcacagggaaccatcgccattggaatggcagcttccactcccggaaagggtgtgcttttcaggaaaagccacctatggagattagggaagaaaagaaagaagacaaggtggaaaagttgcagtttgaagaggaggactttccttccttgaatccagaagctggcaaacagcatcagccatgcagacctattgggacaccttctggagtatgggaaaacccgcctagtgccaagcaaccctccaagatgctagttatcaaaaaagtttccaaagaggatcctgctgctgccttctctgctgcattcacctcaccaggatctcaccatgcaaatgggaacaaattgtcatccgtggttccaagtgtctataagaacctggttcctaagcctgtaccacctccttccaagcctaatgcatggaaagctaacaggatggagcacaagtcaggatccctttcctctagccgggagtctgcttttaccagtccaatctctgttaccaaaccagtggtactggctagtggtgcagctctgagttctcccaaagagagtccctccagcaccacccctccaattgagatcagctcctctcgtctgaccaagttgacccgccgaaccaccgacaggaagagtgagttcctgaaaactctgaaggatgaccggaatggagacttctcagagaatagagactgtgacaagctggaagatttggaggacaacagcacacctgaaccaaaggaaaatggggaggaaggctgtcatcaaaatggtcttgccctccctgtagtggaagaaggggaggttctctcacactctctagaagcagagcacaggttattgaaagctatgggttggcaggaatatcctgaaaatgatgagaattgccttcccctcacagaggatgagctcaaagagttccacatgaagacagagcagctgagaagaaatggctttggaaagaatggcttcttgcagagccgcagttccagtctgttctccccttggagaagcacttgcaaagcagagtttgaggactcagacaccgaaaccagtagcagtgaaacatcagatgacgatgcctggaagtaggcatataaatgctcacagttaaatctgacccagtaaactctgtgtgtttagggagtatacggaaataatcatatcccaaagagagagcaattggcttgttttgcttttgttattgttcttccctgttatctgctttatagagagaagtttgtgtggtgggacagattttttaaacacactcacacacacacacacatacacacccagtatatatggggcgatgcacaggtaggagctggcagtgcagggaagaggagacactggtctgcagcaacagcttctactaccagcccttggggcactcacccctgtgatcaagcaatcattgtcaatgacaaagtgactattgaagttataattgtattaaattaatgctaataatttggatattttattttatttttggctgctcgggtaactttagcccttaaccaagcatatgtgggtttttttggttgtttttttttgttttttttttctttttcctttttgggtacagctgtaaaatatttggatataggaaatgttgtgttattcttgcagccttgatattcagggtggattgtaaaatataaatttttgtgagatttcaaagattaagattattttgataacattatttacagatttaaaagatgtggttatcacaagtctcgagggggaaactactgcataaaataactaacttggaataaatattttgcatcagtttg

SEQ ID NO: 63506 - DNA, 2601 bp, Homo sapiens
cgagtatgggctatcgtcgacccacgccgtcgctttgttatggttgtggactagccgcctctgccgggtcgacaagctggggacgcgtcctcagacgcagcgtctagtccctggccatagctccgccgctgcccgttggtgtctcacctttaactctccttatgctgggtgaaaacaaagagtgatagattcgtgtggcctttcaaatgattgtgaagtggtggaaatggatccaaaataataagtgacttctctaccaaagcatagaagattcttcatatctccttccagtggctcaatttagattttgggaaggagcagaacaagtgaaacacagaaaactgaagagaagaaatcctcattttggacctatatttctccttgactatttcttaatatccatcctacccatcgttctaatgttttaactttgctctgaatttataaatagtaaaggccaaagacatagaatatacatttagtagctttataccaagaaatttgccttgaaagctgctgttcgtggagggaaaagtgtagcaaattcctgtctatttttattttttatttttttttaacaaagacaagatttatgtccctagattttgaaggttaaggcaaatataaatacatatctgcacactattttttagcagttgcatgagtaagagtaatgagatttgtattttaaggactttgtcatgtggatgttttggagttgactgctcagatcttttatagggctttaatatttttgatctattaccttgatgacattatttgtccacacttgagcccatctgtctttctagctatgaccttgttatgaacagtatttgcactcggtgcaaatatccatgtcttacctaattaagcaacatcatagtgccataactcaaggaagttgaatgaggtgaacatagatacagctctttccccttccccccctttttaaatgtaacaaatactttttatgttccccttccccccttccccttttcccctttccccttttggaaacgtgtcaggaaccaaatagtttaagatgagcagttgaggggactgagagagtgatcgacacagaacctggcttcttcgtgcttcatcataagtcgtgctgccggccaggttacttaagcacccttttaacaaggaaaccttgtgggagatccagctggccgactcgagttcagaaacaggaccacagaggttacactctgggatcctggccatgaggttggatgcctcaccttactgaaaggagacactggacctaaatggcgcagcatgattttgttcctgcttggctaaatttctcaacaccacagtcagctaagtcacctactgccaccttcgaaaaacacggagagcacctacccagaggagaaggtagatttggagtaagccgccgtcgacataattcctctgatggtttttttaacaatggtcccctacgaactgcaggagattcttggcaccagccctccctgttccgccatgattctgtggactctggtgtctctaagggagcatatgctggaatcacagggaacccatctggttggcatagctcttcccgaggtcatgatggcatgagccaacgtagtggaggtggcacagggaaccatcgccattggaatggcagcttccactcccggaaagggtgtgcttttcaggaaaagccacctatggagattagggaagaaaagaaagaagacaaggtggaaaagttgcagtttgaagaggaggactttccttccttgaatccagaagctggcaaacagcatcagccatgcagacctattgggacaccttctggagtatgggaaaacccgcctagtgccaagcaaccctccaagatgctagttatcaaaaaagtttccaaagaggatcctgctgctgccttctctgctgcattcacctcaccaggatctcaccatgcaaatgggaacaaattgtcatccgtggttccaagtgtctataagaacctggttcctaagcctgtaccacctccttccaagcctaatgcatggaaagctaacaggatggagcacaagtcaggatccctttcctctagccgggagtctgcttttaccagtccaatctctgttaccaaaccagtggtactggctagtggtgcagctctgagttctcccaaagagagtccctccagcaccacccctccaattgagatcagctcctctcgtctgaccaagttgacccgccgaaccaccgacaggaagagtgagttcctgaaaactctgaaggatgaccggaatggagacttctcagagaatagagactgtgacaagctggaagatttggaggacaacagcacacctgaaccaaaggaaaatggggaggaaggctgtcatcaaaatggtcttgccctccctgtagtggaagaaggggaggttctctcacactctctagaagcagagcacaggttattgaaagctatgggttggcaggaatatcctgaaaatgatgagaattgccttcccctcacagaggatgagctcaaagagttccacatgaagacagagcagctgagaagaaatgctttggaaagaatgcgtagcagacggccgctactagctc

SEQ ID NO: 63507 - DNA, 4118 bp, Homo sapiens
ctctcggcctgcgggctcgcggaaaccggaagcggcggctgtccgcggtgccggctgggggcggagaggcggcggtgggctccctggggtgtgtgagcccggtgatggagccgggcccgacagccgcgcagcggaggtgttcgttgccgccgtggctgccgctggggctgctgctgtggtcggggctggccctgggcgcgctccccttcggcagcagtccgcacagggtcttccacgacctcctgtcggagcagcagttgctggaggtggaggacttgtccctgtccctcctgcagggtggagggctggggcctctgtcgctgcccccggacctgccggatctggatcctgagtgccgggagctcctgctggacttcgccaacagcagcgcagagctgacagggtgtctggtgcgcagcgcccggcccgtgcgcctctgtcagacctgctaccccctcttccaacaggtcgtcagcaagatggacaacatcagccgagccgcggggaatacttcagagagtcagagttgtgccagaagtctcttaatggcagatagaatgcaaatagttgtgattctctcagaattttttaataccacatggcaggaggcaaattgtgcaaattgtttaacaaacaacagtgaagaattatcaaacagcacagtatatttccttaatctatttaatcacaccctgacctgctttgaacataaccttcaggggaatgcacatagtcttttacagacaaaaaattattcagaagtatgcaaaaactgccgtgaagcatacaaaactctgagtagtctgtacagtgaaatgcaaaaaatgaatgaacttgagaataaggctgaacctggaacacatttatgcattgatgtggaagatgcaatgaacatcactcgaaaactatggagtcgaactttcaactgttcagtcccttgcagtgacacagtgcctgtaattgctgtttctgtgttcattctctttctacctgttgtcttctaccttagtagctttcttcactcagagcaaaagaaacgcaaactcattctgcccaaacgtctcaagtccagtaccagttttgcaaatattcaggaaaattcaaactgagacctacaaaatggagaattgacatatcacgtgaatgaatggtggaagacacaacttggtttcagaaagaagataaactgtgatttgacaagtcaagctcttaagaaatacaaggacttcagatccatttttaaataagaattttcgatttttctttccttttccacttctttctaacagatttggatatttttaatttccaggcatagcaatgttatctattttaatgtgtatttgtcacaataacagaacatgcaagaacaatcattattttattttataggcatttgattactattctagacttctggtatcttcttactaacataaatatctcaagtagaaaagtttttgaaaactaacatttaaaaattaatcagttacagtaaagactttgaaaaagaaatgtacttgttaggaagtagcttaattaccccccattgcagtattattgttatatatatagttaatatgttgtacatcacaataatatataattcagtctctagtttccctagagtcatttttgaaaccactgattgcaaacctccctgacaatttttaaaagtagtaagccacattacatttatctttgtaaaaagatttatggtaactggtttcttacttgacttttataaatagtattttacatcttatttttgcctttatttcataagtaatttaaaaatcactggattgctttattatattcagggcaatatggattatttttataccaaggatttgcatcgtgaattacattaagttatttggcaatttataatttattactactttaaatcaaatgtagcattatcacactgtatttaaattgtcattttttaaaggaatattttcttcttaagatatatagaggattttggagaagagagacaggaggggtaaaaccagcttaaggttcagcgagcagaaagggacctgagaggatgctcactgtaagactgttggacagtggtgtgtattgaggggatgaatcggaacgatagtctcatgcagaaaatagtgagattaagatcatccttattgtttctaaattatttcaatcagatgaaagtgatacgattgaaatgaaatcacatagttcgtgctcagaaattctattttggtatgtttgtattagcctttagaaaaaacactccgtttcagaattgttcacagttttatttcttaggtttttagagttcaggatttcatttattaatttcttcttgcttttttggtggaaataggctttgttgtaaacattaagaatataaaatctcctctatatagaaacaagaattttgttaaaaagagaatttgaatcccttcctatactataaaatgctctatagggagacaaagtgtttcttttttcttttatgtttactgtttatgtggagtgaaatataaggctcttggatgtataacatactcaaaagctgttacactttctctgatctgctgtgatccactgaaaatgtgctggggtttgttctgctgtcactgtttatgctgctggaacttagcactgtcttgatttgaagcatatgattgagagccatttgaagcaatcttcattaatgcagataaaacaagtttacatgtgcagagttagaaaatgacatgttcaattctgtaagtggtgactttttgagcacctttcagtattatgtatttgtaaaaaccattgtttttggatataaagctaataagcactttaaaaaggaaaaggcagcctttactattttttctggttgagtcattgctctttagacctagcatcagcaatagatttcaaagataagtattaagcgctaccctaaagtgtgtaagtttttcattttgtcatattgaaaaatgatttgcatagtactgaatgttgacacacagcttatatgtatttacaagaatatctttaagtgtttttttgacacattaaaataaaggataaggaaattgtaagctttatttggatttttaaatacatttttaaaatttcagatgtaatttaacatcacatttgtttttcaggtattgagtttagatgcctacttttatgagtaccatcagctggacacagtgtctcatacctgtatttgcagcactttgggaggctgaagcagatcgctggagcttatgagttcgagaccagcctggacaacatagtgaaacactgtctctgcaaaaaatacaaaaattagctgggtatggtgagacagtgtctcactatgttgcccaaggctggtcttgaactcctgagttcaagagatcctcctgccttagcctcccaaagtgctgggattacaagcataagcaccacacctggctgaacatcagatattttaaagtgtagcccagagtctagttggtaaatgttacttatattgggactagtattttctaatgtttctgggatatgctccctataaaatgaaatgttttcctggaacaatgctaattaggattgcattcctggccaaagacatgacatcaaataagtaatagacatcaccagcaatgaattttgaaaagcaaaaaatactattaacctatataaccatttaaaatttaaaaaattatgttccaagtacctctattttctgagctagaagaaaccttagaggccatctgatgatagattcccagagctggatggatccctagggactacctaatctgactttctgtccactgcatggattcttctaaaaagtatgtcacttatttccctaccttattaagactaaataagtggaacatcatagagctctttatttataacagtcattctttgatagtcaactcttaaatggagacttgagatgcttaaatattgtactactgtgcttatcttgtaaagatttcataaaatgatagtattggttattttaaaaaggctttggcttatgctgaattatacatgtagcaccaaaatgttacaactctactaaatttccttgttctaaactattatattagctataataaatattagtcatacatgta

SEQ ID NO: 63508 - DNA, 3457 bp, Homo sapiens
ctctcggcctgcgggctcgcggaaaccggaagcggcggctgtccgcggtgccggctgggggcggagaggcggcggtgggctccctggggtgtgtgagcccggtgatggagccgggcccgacagccgcgcagcggaggtgttcgttgccgccgtggctgccgctggggctgctgctgtggtcggggctggccctgggcgcgctccccttcggcagcagtccgcacagggtcttccacgacctcctgtcggagcagcagttgctggaggtggaggacttgtccctgtccctcctgcagggtggagggctggggcctctgtcgctgcccccggacctgccggatctggatcctgagtgccgggagctcctgctggacttcgccaacagcagcgcagagctgacagggtgtctggtgcgcagcgcccggcccgtgcgcctctgtcagacctgctaccccctcttccaacaggtcgtcagcaagatggacaacatcagccgagccgcggggaatacttcagagagtcagagttgtgccagaagtctcttaatggcagatagaatgcaaatagttgtgattctctcagaattttttaataccacatggcaggaggcaaattgtgcaaattgtttaacaaacaacagtgaagaattatcaaacagcacagtatatttccttaatctatttaatcacaccctgacctgctttgaacataaccttcaggggaatgcacatagtcttttacagacaaaaaattattcagaagtatgcaaaaactgccgtgaagcatacaaaactctgagtagtctgtacagtgaaatgcaaaaaatgaatgaacttgagaataaggctgaacctggaacacatttatgcattgatgtggaagatgcaatgaacatcactcgaaaactatggagtcgaactttcaactgttcagtcccttgcagtgacacagtgcctgtaattgctgtttctgtgttcattctctttctacctgttgtcttctaccttagtagctttcttcactcagagcaaaagaaacgcaaactcattctgcccaaacgtctcaagtccagtaccagttttgcaaatattcaggaaaattcaaactgagacctacaaaatggagaattgacatatcacgtgaatgaatggtggaagacacaacttggtttcagaaagaagataaactgtgatttgacaagtcaagctcttaagaaatacaaggacttcagatccatttttaaataagaattttcgatttttctttccttttccacttctttctaacagatttggatatttttaatttccaggcatagcaatgttatctattttaatgtgtatttgtcacaataacagaacatgcaagaacaatcattattttattttataggcatttgattactattctagacttctggtatcttcttactaacataaatatctcaagtagaaaagtttttgaaaactaacatttaaaaattaatcagttacagtaaagactttgaaaaagaaatgtacttgttaggaagtagcttaattaccccccattgcagtattattgttatatatatagttaatatgttgtacatcacaataatatataattcagtctctagtttccctagagtcatttttgaaaccactgattgcaaacctccctgacaatttttaaaagtagtaagccacattacatttatctttgtaaaaagatttatggtaactggtttcttacttgacttttataaatagtattttacatcttatttttgcctttatttcataagtaatttaaaaatcactggattgctttattatattcagggcaatatggattatttttataccaaggatttgcatcgtgaattacattaagttatttggcaatttataatttattactactttaaatcaaatgtagcattatcacactgtatttaaattgtcattttttaaaggaatattttcttcttaagatatatagaggattttggagaagagagacaggaggggtaaaaccagcttaaggttcagcgagcagaaagggacctgagaggatgctcactgtaagactgttggacagtggtgtgtattgaggggatgaatcggaacgatagtctcatgcagaaaatagtgagattaagatcatccttattgtttctaaattatttcaatcagatgaaagtgatacgattgaaatgaaatcacatagttcgtgctcagaaattctattttggtatgtttgtattagcctttagaaaaaacactccgtttcagaattgttcacagttttatttcttaggtttttagagttcaggatttcatttattaatttcttcttgcttttttggtggaaataggctttgttgtaaacattaagaatataaaatctcctctatatagaaacaagaattttgttaaaaagagaatttgaatcccttcctatactataaaatgctctatagggagacaaagtgtttcttttttcttttatgtttactgtttatgtggagtgaaatataaggctcttggatgtataacatactcaaaagctgttacactttctctgatctgctgtgatccactgaaaatgtgctggggtttgttctgctgtcactgtttatgctgctggaacttagcactgtcttgatttgaagcatatgattgagagccatttgaagcaatcttcattaatgcagataaaacaagtttacatgtgcagagttagaaaatgacatgttcaattctgtaagtggtgactttttgagcacctttcagtattatgtatttgtaaaaaccattgtttttggatataaagctaataagcactttaaaaaggaaaaggcagcctttactattttttctggttgagtcattgctctttagacctagcatcagcaatagatttcaaagataagtattaagcgctaccctaaagtgtgtaagtttttcattttgtcatattgaaaaatgatttgcatagtactgaatgttgacacacagcttatatgtatttacaagaatatctttaagtgtttttttgacacattaaaataaaggataaggaaattgtaagctttatttggatttttaaatacatttttaaaatttcagatgtaatttaacatcacatttgtttttcaggtattgagtttagatgcctacttttatgagtaccatcagctggacacagtgtctcatacctgtatttgcagcactttgggaggctgaagcagatcgctggagcttatgagttcgagaccagcctggacaacatagtgaaacactgtctctgcaaaaaatacaaaaattagctgggtatggtggtaagtgcctgtagtcctagctacttgggaggctgagatgggaggatgtcttgagcccgggaggtggaggttgcaatgagccaagattgtaccactgcattccaacctgggcgacagagccagaccttgtct

SEQ ID NO: 63509 - DNA, 4140 bp, Homo sapiens
ctctcggcctgcgggctcgcggaaaccggaagcggcggctgtccgcggtgccggctgggggcggagaggcggcggtgggctccctggggtgtgtgagcccggtgatggagccgggcccgacagccgcgcagcggaggtgttcgttgccgccgtggctgccgctggggctgctgctgtggtcggggctggccctgggcgcgctccccttcggcagcagtccgcacagggtcttccacgacctcctgtcggagcagcagttgctggaggtggaggacttgtccctgtccctcctgcagggtggagggctggggcctctgtcgctgcccccggacctgccggatctggatcctgagtgccgggagctcctgctggacttcgccaacagcagcgcagagctgacagggtgtctggtgcgcagcgcccggcccgtgcgcctctgtcagacctgctaccccctcttccaacaggtcgtcagcaagatggacaacatcagccgagccgcggggaatacttcagagagtcagagttgtgccagaagtctcttaatggcagatagaatgcaaatagttgtgattctctcagaattttttaataccacatggcaggaggcaaattgtgcaaattgtttaacaaacaacagtgaagaattatcaaacagcacagtatatttccttaatctatttaatcacaccctgacctgctttgaacataaccttcaggggaatgcacatagtcttttacagacaaaaaattattcagaagtatgcaaaaactgccgtgaagcatacaaaactctgagtagtctgtacagtgaaatgcaaaaaatgaatgaacttgagaataaggctgaacctggaacacatttatgcattgatgtggaagatgcatgacacagtgcctgtaattgctgtttctgtgttcattctctttctacctgttgtcttctaccttagtagctttcttcactcagagcaaaagaaacgcaaactcattctgcccaaacgtctcaagtccagtaccagttttgcaaatattcaggaaaattcaaactgagacctacaaaatggagaattgacatatcacgtgaatgaatggtggaagacacaacttggtttcagaaagaagataaactgtgatttgacaagtcaagctcttaagaaatacaaggacttcagatccatttttaaataagaattttcgatttttctttccttttccacttctttctaacagatttggatatttttaatttccaggcatagcaatgttatctattttaatgtgtatttgtcacaataacagaacatgcaagaacaatcattattttattttataggcatttgattactattctagacttctggtatcttcttactaacataaatatctcaagtagaaaagtttttgaaaactaacatttaaaaattaatcagttacagtaaagactttgaaaaagaaatgtacttgttaggaagtagcttaattaccccccattgcagtattattgttatatatatagttaatatgttgtacatcacaataatatataattcagtctctagtttccctagagtcatttttgaaaccactgattgcaaacctccctgacaatttttaaaagtagtaagccacattacatttatctttgtaaaaagatttatggtaactggtttcttacttgacttttataaatagtattttacatcttatttttgcctttatttcataagtaatttaaaaatcactggattgctttattatattcagggcaatatggattatttttataccaaggatttgcatcgtgaattacattaagttatttggcaatttataatttattactactttaaatcaaatgtagcattatcacactgtatttaaattgtcattttttaaaggaatattttcttcttaagatatatagaggattttggagaagagagacaggaggggtaaaaccagcttaaggttcagcgagcagaaagggacctgagaggatgctcactgtaagactgttggacagtggtgtgtattgaggggatgaatcggaacgatagtctcatgcagaaaatagtgagattaagatcatccttattgtttctaaattatttcaatcagatgaaagtgatacgattgaaatgaaatcacatagttcgtgctcagaaattctattttggtatgtttgtattagcctttagaaaaaacactccgtttcagaattgttcacagttttatttcttaggtttttagagttcaggatttcatttattaatttcttcttgcttttttggtggaaataggctttgttgtaaacattaagaatataaaatctcctctatatagaaacaagaattttgttaaaaagagaatttgaatcccttcctatactataaaatgctctatagggagacaaagtgtttcttttttcttttatgtttactgtttatgtggagtgaaatataaggctcttggatgtataacatactcaaaagctgttacactttctctgatctgctgtgatccactgaaaatgtgctggggtttgttctgctgtcactgtttatgctgctggaacttagcactgtcttgatttgaagcatatgattgagagccatttgaagcaatcttcattaatgcagataaaacaagtttacatgtgcagagttagaaaatgacatgttcaattctgtaagtggtgactttttgagcacctttcagtattatgtatttgtaaaaaccattgtttttggatataaagctaataagcactttaaaaaggaaaaggcagcctttactattttttctggttgagtcattgctctttagacctagcatcagcaatagatttcaaagataagtattaagcgctaccctaaagtgtgtaagtttttcattttgtcatattgaaaaatgatttgcatagtactgaatgttgacacacagcttatatgtatttacaagaatatctttaagtgtttttttgacacattaaaataaaggataaggaaattgtaagctttatttggatttttaaatacatttttaaaatttcagatgtaatttaacatcacatttgtttttcaggtattgagtttagatgcctacttttatgagtaccatcagctggacacagtgtctcatacctgtatttgcagcactttgggaggctgaagcagatcgctggagcttatgagttcgagaccagcctggacaacatagtgaaacactgtctctgcaaaaaatacaaaaattagctgggtatggtgagacagtgtctcactatgttgcccaaggctggtcttgaactcctgagttcaagagatcctcctgccttagcctcccaaagtgctgggattacaagcataagcaccacacctggctgaacatcagatattttaaagtgtagcccagagtctagttggtaaatgttacttatattgggactagtattttctaatgtttctgggatatgctccctataaaatgaaatgttttcctggaacaatgctaattaggattgcattcctggccaaagacatgacatcaaataagtaatagacatcaccagcaatgaattttgaaaagcaaaaaatactattaacctatataaccatttaaaatttaaaaaattatgttccaagtacctctattttctgagctagaagaaaccttagaggccatctgatgatagattcccagagctggatggatccctagggactacctaatctgactttctgtccactgcatggattcttctaaaaagtatgtcacttatttccctaccttattaagactaaataagtggaacatcatagagctctttatttataacagtcattctttgatagtcaactcttaaatggagacttgagatgcttaaatattgtactactgtgcttatcttgtaaagatttcataaaatgatagtattggttattttaaaaaggctttggcttatgctgaattatacatgtagcaccaaaatgttacaactctactaaatttccttgttctaaactattatattagctataataaatattagtcatacatgtaacatgtttaatgacaaataactttctttatctccttggaattaaagagggcttttaaaagataaaaaaactgatccat

SEQ ID NO: 63510 - DNA, 2480 bp, Homo sapiens
ccctatgaaacctgtaggcgtcggcgatcgatgcacgcgtcgattattacatctttgcctattcaataagtaatttaaaaatcactggattgctttattatattcagggcaatatggattatttttataccaaggatttgcatcgtgaattacattaagttatttggcaatttataatttattactactttaaatcaaatgtagcattatcacactgtatttaaattgtcattttttaaaggaatattttcttcttaagatatatagaggattttggagaagagagacaggaggggtaaaaccagcttaaggttcagcgagcagaaagggacctgagaggatgctcactgtaagactgttggacagtggtgtgtattgaggggatgaatcggaacgatagtctcatgcagaaaatagtgagattaagatcatccttattgtttctaaattatttcaatcagatgaaagtgatacgattgaaatgaaatcacatagttcgtgctcagaaattctattttggtatgtttgtattagcctttagaaaaaacactccgtttcagaattgttcacagttttatttcttaggtttttagagttcaggatttcatttattaatttcttcttgcttttttggtggaaataggctttgttgtaaacattaagaatataaaatctcctctatatagaaacaagaattttgttaaaaagagaatttgaatcccttcctatactataaaatgctctatagggagacaaagtgtttcttttttcttttatgtttactgtttatgtggagtgaaatataaggctcttggatgtataacatactcaaaagctgttacactttctctgatctgctgtgatccactgaaaatgtgctggggtttgttctgctgtcactgtttatgctgctggaacttagcactgtcttgatttgaagcatatgattgagagccatttgaagcaatcttcattaatgcagataaaacaagtttacatgtgcagagttagaaaatgacatgttcaattctgtaagtggtgactttttgagcacctttcagtattatgtatttgtaaaaaccattgtttttggatataaagctaataagcactttaaaaaggaaaaggcagcctttactattttttctggttgagtcattgctctttagacctagcatcagcaatagatttcaaagataagtattaagcgctaccctaaagtgtgtaagtttttcattttgtcatattgaaaaatgatttgcatagtactgaatgttgacacacagcttatatgtatttacaagaatatctttaagtgtttttttgacacattaaaataaaggataaggaaattgtaagctttatttggatttttaaatacatttttaaaatttcagatgtaatttaacatcacatttgtttttcaggtattgagtttagatgcctacttttatgagtaccatcagctggacacagtgtctcatacctgtatttgcagcactttgggaggctgaagcagatcgctggagcttatgagttcgagaccagcctggacaacatagtgaaacactgtctctgcaaaaaatacaaaaattagctgggtatggtgagacagtgtctcactatgttgcccaaggctggtcttgaactcctgagttcaagagatcctcctgccttagcctcccaaagtgctgggattacaagcataagcaccacacctggctgaacatcagatattttaaagtgtagcccagagtctagttggtaaatgttacttatattgggactagtattttctaatgtttctgggatatgctccctataaaatgaaatgttttcctggaacaatgctaattaggattgcattcctggccaaagacatgacatcaaataagtaatagacatcaccagcaatgaattttgaaaagcaaaaaatactattaacctatataaccatttaaaatttaaaaaattatgttccaagtacctctattttctgagctagaagaaaccttagaggccatctgatgatagattcccagagctggatggatccctagggactacctaatctgactttctgtccactgcatggattcttctaaaaagtatgtcacttatttccctaccttattaagactaaataagtggaacatcatagagctctttatttataacagtcattctttgatagtcaactcttaaatggagacttgagatgcttaaatattgtactactgtgcttatcttgtaaagatttcataaaatgatagtattggttattttaaaaaggctttggcttatgctgaattatacatgtagcaccaaaatgttacaactctactaaatttccttgttctaaactattatattagctataataaatattagtcatacatgtaacatgtttaatgacaaataactttctttatctccttggaattaaagagggcttttaaaagataaaaaaactgatccat

SEQ ID NO: 63511 - DNA, 700 bp, Homo sapiens
cctcttccaacaggtcgtcagcaagatggacaacatcagccgagccgcgggggtgggtacaggaccacgtccgggactgtggctcaggagagttgggaaaggaggagggtgtaatgatggtcagcgctgggggcctcagtttccccaacagtaagaaaaaggggttggactgagtctgtagagttgggtcatcagaaaaagggggtggcattatggggcttgggatttgggtttttgcttccaagaatgctgttggacatctttggttcatataggtgtgattggttttcttgggggtcctgattccccaaccctcttgctcttcctccacccactccaccacggcttcttctcatcttcacctggagttgccaggaaggatccttttctgaaacaagtggggtggagacactggtagtggttagaaatttgagctttgtagccagaaatgttcatgtccaccaacttctaactatgtaaccttggattaattatcttctcagaaccttagtttcctcctctataaagtggaaagaacatctgcctaatgcggctgttggaagaattaaaagagatattgcctgtgacttcatcttagtgatgtgaacagtctggagctagctagcggccaggactccagttccactctgcttattagcggtatactatgggcaagttacttacattctctgtgcctgtt

SEQ ID NO: 63512 - DNA, 4196 bp, Homo sapiens
ctctcggcctgcgggctcgcggaaaccggaagcggcggctgtccgcggtgccggctgggggcggagaggcggcggtgggctccctggggtgtgtgagcccggtgatggagccgggcccgacagccgcgcagcggaggtgttcgttgccgccgtggctgccgctggggctgctgctgtggtcggggctggccctgggcgcgctccccttcggcagcagtccgcacagggtcttccacgacctcctgtcggagcagcagttgctggaggtggaggacttgtccctgtccctcctgcagggtggagggctggggcctctgtcgctgcccccggacctgccggatctggatcctgagtgccgggagctcctgctggacttcgccaacagcagcgcagagctgacagggtgtctggtgcgcagcgcccggcccgtgcgcctctgtcagacctgctaccccctcttccaacaggtcgtcagcaagatggacaacatcagccgagccgcggggaatacttcagagagtcagagttgtgccagaagtctcttaatggcagatagaatgcaaatagttgtgattctctcagaattttttaataccacatggcaggaggcaaattgtgcaaattgtttaacaaacaacagtgaagaattatcaaacagcacagtatatttccttaatctatttaatcacaccctgacctgctttgaacataaccttcaggggaatgcacatagtcttttacagacaaaaaattattcagaagtatgcaaaaactgccgtgaagcatacaaaactctgagtagtctgtacagtgaaatgcaaaaaatgaatgaacttgagaataaggctgaacctggaacacatttatgcattgatgtggaagatgcaatgaacatcactcgaaaactatggagtcgaactttcaactgttcagtcccttgcagtgacacagtgcctgtaattgctgtttctgtgttcattctctttctacctgttgtcttctaccttagtagctttcttcactcagagcaaaagaaacgcaaactcattctgcccaaacgtctcaagtccagtaccagttttgcaaatattcaggaaaattcaaactgagacctacaaaatggagaattgacatatcacgtgaatgaatggtggaagacacaacttggtttcagaaagaagataaactgtgatttgacaagtcaagctcttaagaaatacaaggacttcagatccatttttaaataagaattttcgatttttctttccttttccacttctttctaacagatttggatatttttaatttccaggcatagcaatgttatctattttaatgtgtatttgtcacaataacagaacatgcaagaacaatcattattttattttataggcatttgattactattctagacttctggtatcttcttactaacataaatatctcaagtagaaaagtttttgaaaactaacatttaaaaattaatcagttacagtaaagactttgaaaaagaaatgtacttgttaggaagtagcttaattaccccccattgcagtattattgttatatatatagttaatatgttgtacatcacaataatatataattcagtctctagtttccctagagtcatttttgaaaccactgattgcaaacctccctgacaatttttaaaagtagtaagccacattacatttatctttgtaaaaagatttatggtaactggtttcttacttgacttttataaatagtattttacatcttatttttgcctttatttcataagtaatttaaaaatcactggattgctttattatattcagggcaatatggattatttttataccaaggatttgcatcgtgaattacattaagttatttggcaatttataatttattactactttaaatcaaatgtagcattatcacactgtatttaaattgtcattttttaaaggaatattttcttcttaagatatatagaggattttggagaagagagacaggaggggtaaaaccagcttaaggttcagcgagcagaaagggacctgagaggatgctcactgtaagactgttggacagtggtgtgtattgaggggatgaatcggaacgatagtctcatgcagaaaatagtgagattaagatcatccttattgtttctaaattatttcaatcagatgaaagtgatacgattgaaatgaaatcacatagttcgtgctcagaaattctattttggtatgtttgtattagcctttagaaaaaacactccgtttcagaattgttcacagttttatttcttaggtttttagagttcaggatttcatttattaatttcttcttgcttttttggtggaaataggctttgttgtaaacattaagaatataaaatctcctctatatagaaacaagaattttgttaaaaagagaatttgaatcccttcctatactataaaatgctctatagggagacaaagtgtttcttttttcttttatgtttactgtttatgtggagtgaaatataaggctcttggatgtataacatactcaaaagctgttacactttctctgatctgctgtgatccactgaaaatgtgctggggtttgttctgctgtcactgtttatgctgctggaacttagcactgtcttgatttgaagcatatgattgagagccatttgaagcaatcttcattaatgcagataaaacaagtttacatgtgcagagttagaaaatgacatgttcaattctgtaagtggtgactttttgagcacctttcagtattatgtatttgtaaaaaccattgtttttggatataaagctaataagcactttaaaaaggaaaaggcagcctttactattttttctggttgagtcattgctctttagacctagcatcagcaatagatttcaaagataagtattaagcgctaccctaaagtgtgtaagtttttcattttgtcatattgaaaaatgatttgcatagtactgaatgttgacacacagcttatatgtatttacaagaatatctttaagtgtttttttgacacattaaaataaaggataaggaaattgtaagctttatttggatttttaaatacatttttaaaatttcagatgtaatttaacatcacatttgtttttcaggtattgagtttagatgcctacttttatgagtaccatcagctggacacagtgtctcatacctgtatttgcagcactttgggaggctgaagcagatcgctggagcttatgagttcgagaccagcctggacaacatagtgaaacactgtctctgcaaaaaatacaaaaattagctgggtatggtgagacagtgtctcactatgttgcccaaggctggtcttgaactcctgagttcaagagatcctcctgccttagcctcccaaagtgctgggattacaagcataagcaccacacctggctgaacatcagatattttaaagtgtagcccagagtctagttggtaaatgttacttatattgggactagtattttctaatgtttctgggatatgctccctataaaatgaaatgttttcctggaacaatgctaattaggattgcattcctggccaaagacatgacatcaaataagtaatagacatcaccagcaatgaattttgaaaagcaaaaaatactattaacctatataaccatttaaaatttaaaaaattatgttccaagtacctctattttctgagctagaagaaaccttagaggccatctgatgatagattcccagagctggatggatccctagggactacctaatctgactttctgtccactgcatggattcttctaaaaagtatgtcacttatttccctaccttattaagactaaataagtggaacatcatagagctctttatttataacagtcattctttgatagtcaactcttaaatggagacttgagatgcttaaatattgtactactgtgcttatcttgtaaagatttcataaaatgatagtattggttattttaaaaaggctttggcttatgctgaattatacatgtagcaccaaaatgttacaactctactaaatttccttgttctaaactattatattagctataataaatattagtcatacatgtaacatgtttaatgacaaataactttctttatctccttggaattaaagagggcttttaaaagataaaaaaactgatccat

SEQ ID NO: 63513 - DNA, 4353 bp, Homo sapiens
ctctcggcctgcgggctcgcggaaaccggaagcggcggctgtccgcggtgccggctgggggcggagaggcggcggtgggctccctggggtgtgtgagcccggtgatggagccgggcccgacagccgcgcagcggaggtgttcgttgccgccgtggctgccgctggggctgctgctgtggtcggggctggccctgggcgcgctccccttcggcagcagtccgcacagggtcttccacgacctcctgtcggagcagcagttgctggaggtggaggacttgtccctgtccctcctgcagggtggagggctggggcctctgtcgctgcccccggacctgccggatctggatcctgagtgccgggagctcctgctggacttcgccaacagcagcgcagagctgacagggtgtctggtgcgcagcgcccggcccgtgcgcctctgtcagacctgctaccccctcttccaacaggtcgtcagcaagatggacaacatcagccgagccgcggggaaccttagtttcctcctctataaagtggaaagaacatctgcctaatgcggctgttggaagaattaaaagagatattgcctgtgacttcatcttagtgatgtgaacagtctggagctagctagcggccaggactccagttccactctgcttattagcgaatacttcagagagtcagagttgtgccagaagtctcttaatggcagatagaatgcaaatagttgtgattctctcagaattttttaataccacatggcaggaggcaaattgtgcaaattgtttaacaaacaacagtgaagaattatcaaacagcacagtatatttccttaatctatttaatcacaccctgacctgctttgaacataaccttcaggggaatgcacatagtcttttacagacaaaaaattattcagaagtatgcaaaaactgccgtgaagcatacaaaactctgagtagtctgtacagtgaaatgcaaaaaatgaatgaacttgagaataaggctgaacctggaacacatttatgcattgatgtggaagatgcaatgaacatcactcgaaaactatggagtcgaactttcaactgttcagtcccttgcagtgacacagtgcctgtaattgctgtttctgtgttcattctctttctacctgttgtcttctaccttagtagctttcttcactcagagcaaaagaaacgcaaactcattctgcccaaacgtctcaagtccagtaccagttttgcaaatattcaggaaaattcaaactgagacctacaaaatggagaattgacatatcacgtgaatgaatggtggaagacacaacttggtttcagaaagaagataaactgtgatttgacaagtcaagctcttaagaaatacaaggacttcagatccatttttaaataagaattttcgatttttctttccttttccacttctttctaacagatttggatatttttaatttccaggcatagcaatgttatctattttaatgtgtatttgtcacaataacagaacatgcaagaacaatcattattttattttataggcatttgattactattctagacttctggtatcttcttactaacataaatatctcaagtagaaaagtttttgaaaactaacatttaaaaattaatcagttacagtaaagactttgaaaaagaaatgtacttgttaggaagtagcttaattaccccccattgcagtattattgttatatatatagttaatatgttgtacatcacaataatatataattcagtctctagtttccctagagtcatttttgaaaccactgattgcaaacctccctgacaatttttaaaagtagtaagccacattacatttatctttgtaaaaagatttatggtaactggtttcttacttgacttttataaatagtattttacatcttatttttgcctttatttcataagtaatttaaaaatcactggattgctttattatattcagggcaatatggattatttttataccaaggatttgcatcgtgaattacattaagttatttggcaatttataatttattactactttaaatcaaatgtagcattatcacactgtatttaaattgtcattttttaaaggaatattttcttcttaagatatatagaggattttggagaagagagacaggaggggtaaaaccagcttaaggttcagcgagcagaaagggacctgagaggatgctcactgtaagactgttggacagtggtgtgtattgaggggatgaatcggaacgatagtctcatgcagaaaatagtgagattaagatcatccttattgtttctaaattatttcaatcagatgaaagtgatacgattgaaatgaaatcacatagttcgtgctcagaaattctattttggtatgtttgtattagcctttagaaaaaacactccgtttcagaattgttcacagttttatttcttaggtttttagagttcaggatttcatttattaatttcttcttgcttttttggtggaaataggctttgttgtaaacattaagaatataaaatctcctctatatagaaacaagaattttgttaaaaagagaatttgaatcccttcctatactataaaatgctctatagggagacaaagtgtttcttttttcttttatgtttactgtttatgtggagtgaaatataaggctcttggatgtataacatactcaaaagctgttacactttctctgatctgctgtgatccactgaaaatgtgctggggtttgttctgctgtcactgtttatgctgctggaacttagcactgtcttgatttgaagcatatgattgagagccatttgaagcaatcttcattaatgcagataaaacaagtttacatgtgcagagttagaaaatgacatgttcaattctgtaagtggtgactttttgagcacctttcagtattatgtatttgtaaaaaccattgtttttggatataaagctaataagcactttaaaaaggaaaaggcagcctttactattttttctggttgagtcattgctctttagacctagcatcagcaatagatttcaaagataagtattaagcgctaccctaaagtgtgtaagtttttcattttgtcatattgaaaaatgatttgcatagtactgaatgttgacacacagcttatatgtatttacaagaatatctttaagtgtttttttgacacattaaaataaaggataaggaaattgtaagctttatttggatttttaaatacatttttaaaatttcagatgtaatttaacatcacatttgtttttcaggtattgagtttagatgcctacttttatgagtaccatcagctggacacagtgtctcatacctgtatttgcagcactttgggaggctgaagcagatcgctggagcttatgagttcgagaccagcctggacaacatagtgaaacactgtctctgcaaaaaatacaaaaattagctgggtatggtgagacagtgtctcactatgttgcccaaggctggtcttgaactcctgagttcaagagatcctcctgccttagcctcccaaagtgctgggattacaagcataagcaccacacctggctgaacatcagatattttaaagtgtagcccagagtctagttggtaaatgttacttatattgggactagtattttctaatgtttctgggatatgctccctataaaatgaaatgttttcctggaacaatgctaattaggattgcattcctggccaaagacatgacatcaaataagtaatagacatcaccagcaatgaattttgaaaagcaaaaaatactattaacctatataaccatttaaaatttaaaaaattatgttccaagtacctctattttctgagctagaagaaaccttagaggccatctgatgatagattcccagagctggatggatccctagggactacctaatctgactttctgtccactgcatggattcttctaaaaagtatgtcacttatttccctaccttattaagactaaataagtggaacatcatagagctctttatttataacagtcattctttgatagtcaactcttaaatggagacttgagatgcttaaatattgtactactgtgcttatcttgtaaagatttcataaaatgatagtattggttattttaaaaaggctttggcttatgctgaattatacatgtagcaccaaaatgttacaactctactaaatttccttgttctaaactattatattagctataataaatattagtcatacatgtaacatgtttaatgacaaataactttctttatctccttggaattaaagagggcttttaaaagataaaaaaactgatccat

SEQ ID NO: 63514 - DNA, 4149 bp, Homo sapiens
ctctcggcctgcgggctcgcggaaaccggaagcggcggctgtccgcggtgccggctgggggcggagaggcggcggtgggctccctggggtgtgtgagcccggtgatggagccgggcccgacagccgcgcagcggaggtgttcgttgccgccgtggctgccgctggggctgctgctgtggtcggggctggccctgggcgcgctccccttcggcagcagtccgcacagggtcttccacgacctcctgtcggagcagcagttgctggaggtggaggacttgtccctgtccctcctgcagggtggagggctggggcctctgtcgctgcccccggacctgccggatctggatcctgagtgccgggagctcctgctggacttcgccaacagcagcgcagagctgacagggtgtctggtgcgcagcgcccggcccgtgcgcctctgtcagacctgctaccccctcttccaacaggtcgtcagcaagatggacaacatcagccgagccgcggggaatacttcagagagtcagagttgtgccagaagtctcttaatggcagatagaatgcaaatagttgtgattctctcagaattttttaataccacatggcaggaggcaaattgtgcaaattgtttaacaaacaacagtgaagaattatcaaacagcacagtatatttccttaatctatttaatcacaccctgacctgctttgaacataaccttcaggggaatgcacatagtcttttacagacaaaaaattattcagaagtatgcaaaaactgccgtgaagcatacaaaactctgagtagtctgtacagtgaaatgcaaaaaatgaatgaacttgagaataaggctgaacctggaacacatttatgcattgatgtggaagatgcaatgaacatcactcgaaaactatggagtcgaactttcaactgttcagtcccttgcagtgacacagtgcctgtaattgctgtttctgtgttcattctctttctacctgttgtcttctaccttagtagctttcttcactcagagcaaaagaaacgcaaactcattctgcccaaacgtctcaagtccagtaccagttttgcaaatattcaggaaaattcaaactgagacctacaaaatggagaattgacatatcacgtgaatgaatggtggaagacacaacttggtttcagaaagaagataaactgtgatttgacaagtcaagctcttaagaaatacaaggacttcagatccatttttaaataagaattttcgatttttctttccttttccacttctttctaacagatttggatatttttaatttccaggcatagcaatgttatctattttaatgtgtatttgtcacaataacagaacatgcaagaacaatcattattttattttataggcatttgattactattctagacttctggtatcttcttactaacataaatatctcaagtagaaaagtttttgaaaactaacatttaaaaattaatcagttacagtaaagactttgaatattattgttatatatatagttaatatgttgtacatcacaataatatataattcagtctctagtttccctagagtcatttttgaaaccactgattgcaaacctccctgacaatttttaaaagtagtaagccacattacatttatctttgtaaaaagatttatggtaactggtttcttacttgacttttataaatagtattttacatcttatttttgcctttatttcataagtaatttaaaaatcactggattgctttattatattcagggcaatatggattatttttataccaaggatttgcatcgtgaattacattaagttatttggcaatttataatttattactactttaaatcaaatgtagcattatcacactgtatttaaattgtcattttttaaaggaatattttcttcttaagatatatagaggattttggagaagagagacaggaggggtaaaaccagcttaaggttcagcgagcagaaagggacctgagaggatgctcactgtaagactgttggacagtggtgtgtattgaggggatgaatcggaacgatagtctcatgcagaaaatagtgagattaagatcatccttattgtttctaaattatttcaatcagatgaaagtgatacgattgaaatgaaatcacatagttcgtgctcagaaattctattttggtatgtttgtattagcctttagaaaaaacactccgtttcagaattgttcacagttttatttcttaggtttttagagttcaggatttcatttattaatttcttcttgcttttttggtggaaataggctttgttgtaaacattaagaatataaaatctcctctatatagaaacaagaattttgttaaaaagagaatttgaatcccttcctatactataaaatgctctatagggagacaaagtgtttcttttttcttttatgtttactgtttatgtggagtgaaatataaggctcttggatgtataacatactcaaaagctgttacactttctctgatctgctgtgatccactgaaaatgtgctggggtttgttctgctgtcactgtttatgctgctggaacttagcactgtcttgatttgaagcatatgattgagagccatttgaagcaatcttcattaatgcagataaaacaagtttacatgtgcagagttagaaaatgacatgttcaattctgtaagtggtgactttttgagcacctttcagtattatgtatttgtaaaaaccattgtttttggatataaagctaataagcactttaaaaaggaaaaggcagcctttactattttttctggttgagtcattgctctttagacctagcatcagcaatagatttcaaagataagtattaagcgctaccctaaagtgtgtaagtttttcattttgtcatattgaaaaatgatttgcatagtactgaatgttgacacacagcttatatgtatttacaagaatatctttaagtgtttttttgacacattaaaataaaggataaggaaattgtaagctttatttggatttttaaatacatttttaaaatttcagatgtaatttaacatcacatttgtttttcaggtattgagtttagatgcctacttttatgagtaccatcagctggacacagtgtctcatacctgtatttgcagcactttgggaggctgaagcagatcgctggagcttatgagttcgagaccagcctggacaacatagtgaaacactgtctctgcaaaaaatacaaaaattagctgggtatggtgagacagtgtctcactatgttgcccaaggctggtcttgaactcctgagttcaagagatcctcctgccttagcctcccaaagtgctgggattacaagcataagcaccacacctggctgaacatcagatattttaaagtgtagcccagagtctagttggtaaatgttacttatattgggactagtattttctaatgtttctgggatatgctccctataaaatgaaatgttttcctggaacaatgctaattaggattgcattcctggccaaagacatgacatcaaataagtaatagacatcaccagcaatgaattttgaaaagcaaaaaatactattaacctatataaccatttaaaatttaaaaaattatgttccaagtacctctattttctgagctagaagaaaccttagaggccatctgatgatagattcccagagctggatggatccctagggactacctaatctgactttctgtccactgcatggattcttctaaaaagtatgtcacttatttccctaccttattaagactaaataagtggaacatcatagagctctttatttataacagtcattctttgatagtcaactcttaaatggagacttgagatgcttaaatattgtactactgtgcttatcttgtaaagatttcataaaatgatagtattggttattttaaaaaggctttggcttatgctgaattatacatgtagcaccaaaatgttacaactctactaaatttccttgttctaaactattatattagctataataaatattagtcatacatgtaacatgtttaatgacaaataactttctttatctccttggaattaaagagggcttttaaaagataaaaaaactgatccat

SEQ ID NO: 63515 - DNA, 3596 bp, Homo sapiens
tgttgtttctgaaagagcacaggttggcccacctggatgtctgggcaccttcctctgaggtgatgcaaaggggccactcaatgggtccttgctcaaaatgctccagccttactggccttcttcccattcctgaatgcaccaagttagtcctgtcccagggcctttgcacgtgctggttttgctgccttgagcttcctacaggaatggtggctggttcctcccttctcatccttcacatttccttagacgccaccttctccgaaagtgccatctcttactaccctaaaggtctttttattttcttatttcagtgtccattcccttatttgtgatcgcctaattattttacttatttcttgttttgtttgcgtcctctttcattctgttagctccatgtaagcaggggtccgttttgctttattcagaactgtatactcaatgcccagtacagagtaggtctcaaaacatatttgttaaatgaatgacgtggcagctccacaattccaagtaaccaatgacacctaaagttgtttccccatgaagtctctgtcttttgggttccgtgcatcgggctgggctcacaggctgcgggaacttccttcccactgcctgttttccttggatcgcggtatctctcttcctggaggaaaaaggctcttatgacctcatggcgcgctctcccgagccgcagtgacgtcattaatgcgctcacgcgtcacagcccaatcatagggcccttcccctccctttagaagtcccgactgtccctgacacattccactccaagcgagccgcgacacttacgtcacgtccgcccgcccgcgcggtgatgacgtcacgacccagggctggcgtcacgtgtcccccccgcggggggcggcccttgagggcggcgcttccggtcggcggagcctggtggccgcagcggcggtggcgacgacggccgagacgtggggatggcgggcgccgggagcgaagcccggttcgccgggctgtcgctggtgcagctcaacgagctgctggaggacgagggccagctgacggagatggtgcagaagatggaggagacacagaatgttcagcttaacaaagaaatgacacttgccagcaaccggagcctggcagaaggaaaccttttgtaccagccccagctggacacgttgaaagcacgcttgacccagaaataccaggaactccaggttctctttgaagcctatcagataaagaagaccaaattagacagacagtctagcagtgcttccttggagaccctgttagcacttcttcaggcagaaggggccaagattgaggaagacactgagaacatggcagagaagtttctggatggagaacttcctctggattccttcattgatgtctatcagagcaaacggaaactggcccacatgcgacgggtgaaaatcgagaagctccaggagatggtcctaaaggggcagagactcccacaggccctggccccgctgccccccaggctgcccgaactggcacctaccgccccccttccctaccctgccccagaggccagtgggcctcctgccgttgcacctcggcgcatcccccccccaccacccccggtgcctgcgggacgcttagccaccccgtttactgcggccatgagttcgggacaggccgtgccgtacccaggattacagtgcccgcccctgcccccccgcgtgggcctccccactcagcaaggattctcttcgcagttcgtgtccccatatccgccacctctccctcagagacccccgccccggctccctccacaccagccgggtttcatcctccagtgagcgccggcgcggtccttcccgggagacttcttccacctggcgtgttgtgctctgctcacgggaaggaggctggaggtccgctctgtgccaagggctctggggccctgggccagcgtgtctgtctgattttagaactgtaggtcagtggtgagtagtaggagcccaggctttgggcatcaaggcagttgtgtgtgccgggttacagcctgacacctgtgcgttgcatcggtttgcattatccgtgtgatttctaagtatcttagcgttgatgaactcatgtttgggaagaaataggcctctcccccagtcccatttagaatcgtggtccttctgttgcagctttatttaatgagcatggttcatgatacttattttattttcgaaagacagtcctatgtgtctcacccaccggccactgcagccctggtgagggcgggtgggcgccggccggcctggaagagcgccgtggctgggccaccacctgtggctgcgttgttgctcactgaatctgttggggagaggtcaccatagtcaccgcctgacctggctgctgctcttgcttcagagccacaagcaaagtttgcactgggcccactgccgagtccagaggccggagaacggccactggtgtgggaggggagcgcacgagtgggactttgcacagcaaattgtgtccccagctcctcctctcccgcctgcctggagccggccctgaaggtttctatgaagaaataatcccccaatatttttactacgtgtgtgattttcctgttttatattgaaaaaacttttttgacactcccaagaccattcagggaaattttataaaaaatgcagatactgtcttgagcagatcgaaatgccgatgaagtggatgcaatttccttttgtgcaagcagtgcacggtgcccccccctcgggtgtccgtgctgtgccttagcttccccaggtgccgggactcacacctgctaggggctgggcaaggccccggctctgctttctctgaagggcttgtccaagttcattgccctgttacaggtggtcaagacgtccggccgccttgacccaggctacccttagccaatatcctctgcccctgggtggctggtggctgggcctcagggtgggcaacgttaggggtttggcgaaagcccgccccatgggattgagggacggggctgcactccaaccgtctgcacctgctcttcccccacccctgtgggacctcatcttcacgtgccatgtgtgctgaaggcccagggcccagcagggggcagtggcacctgttgacggaaaaggccgaggtgcttaccagtggaccttctggcccgcccctcccctgtcacttgtcgggcatccagggccccgacctgtgcctagccgccagggtgacagaaggcagaactgaagcggggtctgggccacgggccaggccactgccttttgtcctcagtgaccatacattcctgctctcggacttgaactctactgtaactgttttcttgaaatgaagctgtacaggacgattcactgccatgccagtcaggcgggcttgccatgttctgtgaatctcgagtgagcggtgccacccgcccccatacctccgccaccggccgctgtcggggatgccacagcctgccacggtcgcagccagacgtgagcttggcattgaagttgcaaagcggcccctggccgggctcgccgtcgctgtccagggccgtgtccggtgctgtggctgtaaagctgtaggaccctttttaataaatagagaattattaataa

SEQ ID NO: 63516 - DNA, 1467 bp, Homo sapiens
ccccagcttttggtcggctttgctcacccaccaacagctaggagctggaaggctcagaagagctggggtgggcatgggagagacagaggaaccccggtggctggaaacacagttccttcccagggtctcttcagcttgctggttggacctcttagcctgcttatgaagcctgaattgacatcatgccaactggtctcctgctgataagtgattccttaacttcctcgggagcagcagaaacttgttttgaaaaaaatcagattctaaatctttacagctgtttacttctgcaagcacaatggccgtagtaaggaattcaagtcacagcgcagcgtggcagggaaggctctgcatggagtcacaggacaaagcctgtcctggaaacgtgctggaaggaagtcggcctcattctttacgacgggcagcagctccaaatgagaaaccaaggggcttggctctggacacagaatgttcagcttaacaaagaaatgacacttgccagcaaccggagcctggcagaaggaaaccttttgtaccagccccagctggacacgttgaaagcacgcttgacccagaaataccaggaactccaggttctctttgaagcctatcagataaagaagaccaaattaggtaactttttaagggtgatcattcgagaataaagagttgagagaaggacacattttcaagctattgccctaccaggaaagaaatattacggaaaaatttcaggttaagatagcgactctactgcaatgaacaaatagcttatgtatattatttatttatttttagagacagggtcttgctctgtcggactggagtgcagtggcgcaaccatggctcagcacgacctcctgggctcaggtgatcctcctgtctcagcctcctgagtggctgggaccacaggtgtgcactaccccaagcaggctagtttttcatttttttgcggagaggttgtcttgctatgttgcccaggctggtcttgaactcaagccatcctcctgcctttgcctcacaaagtgctgctattacagacatgagccactgtattggactagtttatgtatggaatatggagggcccccagacctgcggcctctctgcacttgcggttcgagagggcagggtgtatagcaggactgccccctcctcccagtggccctgactggtggcggtgactgctgaggtcagcccaggtccacacgcacctccagggtctgcagtgtgaagcaggttgcagaaacgtgggtacctcggggcagttaccagaaaaggggctggagattaggaggaagccagccagtttagcagtcaccagtttagaagaggagacttaaccactttttaaattcaagaccccaccttctctaaacagcatagaaaaagctttctgaattatgatattaaacagatgtcttatgacgtttgcccgtttgtcttatgctgtttgttaatggtaaa

SEQ ID NO: 63517 - DNA, 831 bp, Homo sapiens
aaattcaagaccccaccttctctaaacagcatagaaaaagctttctgaattatgatattaaacagatgtcttatgacgtttgcccgtttgtcttatgctgtttgttaatggtaaaaaaaaaaaaaaaaaaagcatcactgaaacactttattttaatggcatactttaatttgcagccattaggaggagacatcagaattaaagattgttgagcatcctaagtgcttttgatagttatcaaagggacatttagataaagtcagactgggaccacaggtgtgcactaccccaagcaggctagtttttcatttttttgcggagaggttgtcttgctatgttgcccaggctggtcttgaactcaagccatcctcctgcctttgcctcacaaagtgctgctattacagacatgagccactgtattggactagtttatgtatggaatatggagggcccccagacctgcggcctctctgcacttgcggttcgagagggcagggtgtatagcaggactgccccctcctcccagtggccctgactggtggcggtgactgctgaggtcagcccaggtccacacgcacctccagggtctgcagtgtgaagcaggttgcagaaacgtgggtacctcggggcagttaccagaaaaggggctggagattaggaggaagccagccagtttagcagtcaccagtttagaagaggagacttaaccactttttaaattcaagaccccaccttctctaaacagcatagaaaaagctttctgaattatgatattaaacagatgtcttatgacgtttgcccgtttgtcttatgctgtttgttaatggtaaa

SEQ ID NO: 63518 - DNA, 3570 bp, Homo sapiens
tgttgtttctgaaagagcacaggttggcccacctggatgtctgggcaccttcctctgaggtgatgcaaaggggccactcaatgggtccttgctcaaaatgctccagccttactggccttcttcccattcctgaatgcaccaagttagtcctgtcccagggcctttgcacgtgctggttttgctgccttgagcttcctacaggaatggtggctggttcctcccttctcatccttcacatttccttagacgccaccttctccgaaagtgccatctcttactaccctaaaggtctttttattttcttatttcagtgtccattcccttatttgtgatcgcctaattattttacttatttcttgttttgtttgcgtcctctttcattctgttagctccatgtaagcaggggtccgttttgctttattcagaactgtatactcaatgcccagtacagagtaggtctcaaaacatatttgttaaatgaatgacgtggcagctccacaattccaagtaaccaatgacacctaaagttgtttccccatgaagtctctgtcttttgggttccgtgcatcgggctgggctcacaggctgcgggaacttccttcccactgcctgttttccttggatcgcggtatctctcttcctggaggaaaaaggctcttatgacctcatggcgcgctctcccgagccgcagtgacgtcattaatgcgctcacgcgtcacagcccaatcatagggcccttcccctccctttagaagtcccgactgtccctgacacattccactccaagcgagccgcgacacttacgtcacgtccgcccgcccgcgcggtgatgacgtcacgacccagggctggcgtcacgtgtcccccccgcggggggcggcccttgagggcggcgcttccggtcggcggagcctggtggccgcagcggcggtggcgacgacggccgagacgtggggatggcgggcgccgggagcgaagcccggttcgccgggctgtcgctggtgcagctcaacgagctgctggaggacgagggccagctgacggagatggtgcagaagatggaggagacacagaatgttcagcttaacaaagaaatgacacttgccagcaaccggagcctggcagaaggaaaccttttgtaccagccccagctggacacgttgaaagcacgcttgacccagaaataccaggaactccaggttctctttgaagcctatcagataaagaagaccaaattagacagacagtctagcagtgcttccttggagaccctgttagcacttcttcaggcagaaggggccaagattgaggaagacactgagaacatggcagagaagtttctggatggagaacttcctctggattccttcattgatgtctatcagagcaaacggaaactggcccacatgcgacgggtgaaaatcgagaagctccaggagatggtcctaaaggggcagagactcccacaggccctggccccgctgccccccaggctgcccgaactggcacctaccgccccccttccctaccctgccccagaggccagtgggcctcctgccgttgcacctcggcgcatcccccccccaccacccccggtgcctgcgggacgcttagccaccccgtttactgcggccatgagttcgggacaggccgtgccgtacccaggattacagtgcccgcccctgcccccccgcgtgggcctccccactcagcaaggattctcttcgcagttcgtgtccccatatccgccacctctccctcagagacccccgccccggctccctccacaccagccgggtttcatcctccagtgagcgccggcgcggtccttcccgggagacttcttccacctggcgtgttgtgctctgctcacgggaaggaggctggaggtccgctctgtgccaagggctctggggccctgggccagcgtgtctgtctgattttagaactgtaggtcagtggtgagtagtaggagcccaggctttgggcatcaaggcagttgtgtgtgccgggttacagcctgacacctgtgcgttgcatcggtttgcattatccgtgtgatttctaagtatcttagcgttgatgaactcatgtttgggaagaaataggcctctcccccagtcccatttagaatcgtggtccttctgttgcagctttatttaatgagcatggttcatgatacttattttattttcgaaagacagtcctatgtgtctcacccaccggccactgcagccctggtgagggcgggtgggcgccggccggcctggaagagcgccgtggctgggccaccacctgtggctgcgttgttgctcactgaatctgttggggagaggtcaccatagtcaccgcctgacctggctgctgctcttgcttcagagccacaagcaaagtttgcactgggcccactgccgagtccagaggccggagaacggccactggtgtgggaggggagcgcacgagtgggactttgcacagcaaattgtgtccccagctcctcctctcccgcctgcctggagccggccctgaaggtttctatgaagaaataatcccccaatatttttactacgtgtgtgattttcctgttttatattgaaaaaacttttttgacactcccaagaccattcagggaaattttataaaaaatgcagatactgtcttgagcagatcgaaatgccgatgaagtggatgcaatttccttttgtgcaagcagtgcacggtgcccccccctcgggtgtccgtgctgtgccttagcttccccaggtgccgggactcacacctgctaggggctgggcaaggccccggctctgctttctctgaagggcttgtccaagttcattgccctgttacaggtggtcaagacgtccggccgccttgacccaggctacccttagccaatatcctctgcccctgggtggctggtggctgggcctcagggtgggcaacgttaggggtttggcgaaagcccgccccatgggattgagggacggggctgcactccaaccgtctgcacctgctcttcccccacccctgtgggacctcatcttcacgtgccatgtgtgctgaaggcccagggcccagcagggggcagtggcacctgttgacggaaaaggccgaggtgcttaccagtggaccttctggcccgcccctcccctgtcacttgtcgggcatccagggccccgacctgtgcctagccgccagggtgacagaaggcagaactgaagcggggtctgggccacgggccaggccactgccttttgtcctcagtgaccatacattcctgctctcggacttgaactctactgtaactgttttcttgaaatgaagctgtacaggacgattcactgccatgccagtcaggcgggcttgccatgttctgtgaatctcgagtgagcgaccggccgctgtcggggatgccacagcctgccacggtcgcagccagacgtgagcttggcattgaagttgcaaagcggcccctggccgggctcgccgtcgctgtccagggccgtgtccggtgctgtggctgtaaagctgtaggaccctttttaataaatagagaattattaataa

SEQ ID NO: 63519 - DNA, 2862 bp, Homo sapiens
tgttgtttctgaaagagcacaggttggcccacctggatgtctgggcaccttcctctgaggtgatgcaaaggggccactcaatgggtccttgctcaaaatgctccagccttactggccttcttcccattcctgaatgcaccaagttagtcctgtcccagggcctttgcacgtgctggttttgctgccttgagcttcctacaggaatggtggctggttcctcccttctcatccttcacatttccttagacgccaccttctccgaaagtgccatctcttactaccctaaaggtctttttattttcttatttcagtgtccattcccttatttgtgatcgcctaattattttacttatttcttgttttgtttgcgtcctctttcattctgttagctccatgtaagcaggggtccgttttgctttattcagaactgtatactcaatgcccagtacagagtaggtctcaaaacatatttgttaaatgaatgacgtggcagctccacaattccaagtaaccaatgacacctaaagttgtttccccatgaagtctctgtcttttgggttccgtgcatcgggctgggctcacaggctgcgggaacttccttcccactgcctgttttccttggatcgcggtatctctcttcctggaggaaaaaggctcttatgacctcatggcgcgctctcccgagccgcagtgacgtcattaatgcgctcacgcgtcacagcccaatcatagggcccttcccctccctttagaagtcccgactgtccctgacacattccactccaagcgagccgcgacacttacgtcacgtccgcccgcccgcgcggtgatgacgtcacgacccagggctggcgtcacgtgtcccccccgcggggggcggcccttgagggcggcgcttccggtcggcggagcctggtggccgcagcggcggtggcgacgacggccgagacgtggggatggcgggcgccgggagcgaagcccggttcgccgggctgtcgctggtgcagctcaacgagctgctggaggacgagggccagctgacggagatggtgcagaagatggaggagacacagaatgttcagcttaacaaagaaatgacacttgccagcaaccggagcctggcagaaggaaaccttttgtaccagccccagctggacacgttgaaagcacgcttgacccagaaataccaggaactccaggttctctttgaagcctatcagataaagaagaccaaattagacagacagtctagcagtgcttccttggagaccctgttagcacttcttcaggcagaaggggccaagattgaggaagacactgagaacatggcagagaagtttctggatggagaacttcctctggattccttcattgatgtctatcagagcaaacggaaactggcccacatgcgacgggtgaaaatcgagaagctccaggagatggtcctaaaggggcagagactcccacaggccctggccccgctgccccccaggctgcccgaactggcacctaccgccccccttccctaccctgccccagaggccagtgggcctcctgccgttgcacctcggcgcatcccccccccaccacccccggtgcctgcgggacgcttagccaccccgtttactgcggccatgagttcgggacaggccgtgccgtacccaggattacagtgcccgcccctgcccccccgcgtgggcctccccactcagcaaggattctcttcgcagttcgtgtccccatatccgccacctctccctcagagacccccgccccggctccctccacaccagccgggtttcatcctccagtgagcgccggcgcggtccttcccgggagacttcttccacctggcgtgttgtgctctgctcacgggaaggaggctggaggtccgctctgtgccaagggctctggggccctgggccagcgtgtctgtctgattttagaactgtaggtcagtggtgagtagtaggagcccaggctttgggcatcaaggcagttgtgtgtgccgggttacagcctgacacctgtgcgttgcatcggtttgcattatccgtgtgatttctaagtatcttagcgttgatgaactcatgtttgggaagaaataggcctctcccccagtcccatttagaatcgtggtccttctgttgcagctttatttaatgagcatggttcatgatacttattttattttcgaaagacagtcctatgtgtctcacccaccggccactgcagccctggtgagggcgggtgggcgccggccggcctggaagagcgccgtggctgggccaccacctgtggctgcgttgttgctcactgaatctgttggggagaggtcaccatagtcaccgcctgacctggctgctgctcttgcttcagagccacaagcaaagtttgcactgggcccactgccgagtccagaggccggagaacggccactggtgtgggaggggagcgcacgagtgggactttgcacagcaaattgtgtccccagctcctcctctcccgcctgcctggagccggccctgaaggtttctatgaagaaataatcccccaatatttttactacgtgtgtgattttcctgttttatattgaaaaaacttttttgacactcccaagaccattcagggaaattttataaaaaatgcagatactgtcttgagcagatcgaaatgccgatgaagtggatgcaatttccttttgtgcaagcagtgcacggtgcccccccctcgggtgtccgtgctgtgccttagcttccccaggtgccgggactcacacctgctagggtttgatgacagggtattgatgagggtttagatgagcagggtttgatgaggggtgttgatgaagggtttgatgaa

SEQ ID NO: 63520 - DNA, 2388 bp, Homo sapiens
tgttgtttctgaaagagcacaggttggcccacctggatgtctgggcaccttcctctgaggtgatgcaaaggggccactcaatgggtccttgctcaaaatgctccagccttactggccttcttcccattcctgaatgcaccaagttagtcctgtcccagggcctttgcacgtgctggttttgctgccttgagcttcctacaggaatggtggctggttcctcccttctcatccttcacatttccttagacgccaccttctccgaaagtgccatctcttactaccctaaaggtctttttattttcttatttcagtgtccattcccttatttgtgatcgcctaattattttacttatttcttgttttgtttgcgtcctctttcattctgttagctccatgtaagcaggggtccgttttgctttattcagaactgtatactcaatgcccagtacagagtaggtctcaaaacatatttgttaaatgaatgacgtggcagctccacaattccaagtaaccaatgacacctaaagttgtttccccatgaagtctctgtcttttgggttccgtgcatcgggctgggctcacaggctgcgggaacttccttcccactgcctgttttccttggatcgcggtatctctcttcctggaggaaaaaggctcttatgacctcatggcgcgctctcccgagccgcagtgacgtcattaatgcgctcacgcgtcacagcccaatcatagggcccttcccctccctttagaagtcccgactgtccctgacacattccactccaagcgagccgcgacacttacgtcacgtccgcccgcccgcgcggtgatgacgtcacgacccagggctggcgtcacgtgtcccccccgcggggggcggcccttgagggcggcgcttccggtcggcggagcctggtggccgcagcggcggtggcgacgacggccgagacgtggggatggcgggcgccgggagcgaagcccggttcgccgggctgtcgctggtgcagctcaacgagctgctggaggacgagggccagctgacggagatggtgcagaagatggaggagacacagaatgttcagcttaacaaagaaatgacacttgccagcaaccggagcctggcagaaggaaaccttttgtaccagccccagctggacacgttgaaagcacgcttgacccagaaataccaggaactccaggttctctttgaagcctatcagataaagaagaccaaattagacagacagtctagcagtgcttccttggagaccctgttagcacttcttcaggcagaaggggccaagattgaggaagacactgagaacatggcagagaagtttctggatggagaacttcctctggattccttcattgatgtctatcagagcaaacggaaactggcccacatgcgacgggtgaaaatcgagaagctccaggagatggtcctaaaggggcagagactcccacaggccctggccccgctgccccccaggctgcccgaactggcacctaccgccccccttccctaccctgccccagaggccagtgggcctcctgccgttgcacctcggcgcatcccccccccaccacccccggtgcctgcgggacgcttagccaccccgtttactgcggccatgagttcgggacaggccgtgccgtacccaggattacagtgcccgcccctgcccccccgcgtgggcctccccactcagcaaggattctcttcgcagttcgtgtccccatatccgccacctctccctcagagacccccgccccggctccctccacaccagccgggtttcatcctccagtgagcgccggcgcggtccttcccgggagacttcttccacctggcgtgttgtgctctgctcacgggaaggaggctggaggtccgctctgtgccaagggctctggggccctgggccagcgtgtctgtctgattttagaactgtaggtcagtggtgagtagtaggagcccaggctttgggcatcaaggcagttgtgtgtgccgggttacagcctgacacctgtgcgttgcatcggtttgcattatccgtgtgatttctaagtatcttagcgttgatgaactcatgtttgggaagaaataggcctctcccccagtcccatttagaatcgtggtccttctgttgcagctttatttaatgagcatggttcatgatacttattttattttcgaaagacagtcctatgtgtaccggccgctgtcggggatgccacagcctgccacggtcgcagccagacgtgagcttggcattgaagttgcaaagcggcccctggccgggctcgccgtcgctgtccagggccgtgtccggtgctgtggctgtaaagctgtaggaccctttttaataaatagagaattattaataa

SEQ ID NO: 63521 - DNA, 342 bp, Homo sapiens
ccagtgaggtggcagcagctgcactgggctcctggggtgtgcgtggggacctcaggggtttaggagctgatatacttttggttctcatcatcttgtgtgttccttgcagacacagaatgttcagcttaacaaagaaatgacacttgccagcaaccggagcctggcagaaggaaaccttttgtaccagccccagctggacacgttgaaagcacgcttgacccagaaataccaggaactccaggttctctttgaagcctatcagataaagaagaccaaattaggtaactttttaagggtgatcattcgagaataaagagttgagagaaggacacattttcaagc

SEQ ID NO: 63522 - DNA, 2723 bp, Homo sapiens
tcttaggctaggtacgaggctgggtgtttaattcggccgagggtggccgcagcggcggtggcgacgacggccgagacgtggggatggcgggcgccgggagcgaagcccggttcgccgggctgtcgctggtgcagctcaacgagctgctggaggacgagggccagctgacggagatggtgcagaagatggaggagacacagaatgttcagcttaacaaagaaatgacacttgccagcaaccggagcctggcagaaggaaaccttttgtaccagccccagctggacacgttgaaagcacgcttgacccagaaataccaggaactccaggttctctttgaagcctatcagataaagaagaccaaattagacagacagtctagcagtgcttccttggagaccctgttagcacttcttcaggcagaaggggccaagattgaggaagacactgagaacatggcagagaagtttctggatggagaacttcctctggattccttcattgatgtctatcagagcaaacggaaactggcccacatgcgacgggtgaaaatcgagaagctccaggagatggtcctaaaggggcagagactcccacaggccctggccccgctgccccccaggctgcccgaactggcacctaccgccccccttccctaccctgccccagaggccagtgggcctcctgccgttgcacctcggcgcatcccccccccaccacccccggtgcctgcgggacgcttagccaccccgtttactgcggccatgagttcgggacaggccgtgccgtacccaggattacagtgcccgcccctgcccccccgcgtgggcctccccactcagcaaggattctcttcgcagttcgtgtccccatatccgccacctctccctcagagacccccgccccggctccctccacaccagccgggtttcatcctccagtgagcgccggcgcggtccttcccgggagacttcttccacctggcgtgttgtgctctgctcacgggaaggaggctggaggtccgctctgtgccaagggctctggggccctgggccagcgtgtctgtctgattttagaactgtaggtcagtggtgagtagtaggagcccaggctttgggcatcaaggcagttgtgtgtgccgggttacagcctgacacctgtgcgttgcatcggtttgcattatccgtgtgatttctaagtatcttagcgttgatgaactcatgtttgggaagaaataggcctctcccccagtcccatttagaatcgtggtccttctgttgcagctttatttaatgagcatggttcatgatacttattttattttcgaaagacagtcctatgtgtctcacccaccggccactgcagccctggtgagggcgggtgggcgccggccggcctggaagagcgccgtggctgggccaccacctgtggctgcgttgttgctcactgaatctgttggggagaggtcaccatagtcaccgcctgacctggctgctgctcttgcttcagagccacaagcaaagtttgcactgggcccactgccgagtccagaggccggagaacggccactggtgtgggaggggagcgcacgagtgggactttgcacagcaaattgtgtccccagctcctcctctcccgcctgcctggagccggccctgaaggtttctatgaagaaataatcccccaatatttttactacgtgtgtgattttcctgttttatattgaaaaaacttttttgacactcccaagaccattcagggaaattttataaaaaatgcagatactgtcttgagcagatcgaaatgccgatgaagtggatgcaatttccttttgtgcaagcagtgcacggtgcccccccctcgggtgtccgtgctgtgccttagcttccccaggtgccgggactcacacctgctaggggctgggcaaggccccggctctgctttctctgaagggcttgtccaagttcattgccctgttacaggtggtcaagacgtccggccgccttgacccaggctacccttagccaatatcctctgcccctgggtggctggtggctgggcctcagggtgggcaacgttaggggtttggcgaaagcccgccccatgggattgagggacggggctgcactccaaccgtctgcacctgctcttcccccacccctgtgggacctcatcttcacgtgccatgtgtgctgaaggcccagggcccagcagggggcagtggcacctgttgacggaaaaggccgaggtgcttaccagtggaccttctggcccgcccctcccctgtcacttgtcgggcatccagggccccgacctgtgcctagccgccagggtgacagaaggcagaactgaagcggggtctgggccacgggccaggccactgccttttgtcctcagtgaccatacattcctgctctcggacttgaactctactgtaactgttttcttgaaatgaagctgtacaggacgattcactgccatgccagtcaggcgggcttgccatgttctgtgaatctcgagtgagcggtgccacccgcccccatacctccgccaccggccgctgtcggggatgccacagcctgccacggtcgcagccagacgtgagcttggcattgaagttgcaaagcggcccctggccgggctcgccgtcgctgtccagggccgtgtccggtgctgtggctgtaaagctgtaggaccctttttaataaatagagaattattaataa

SEQ ID NO: 63523 - DNA, 3476 bp, Homo sapiens
tgttgtttctgaaagagcacaggttggcccacctggatgtctgggcaccttcctctgaggtgatgcaaaggggccactcaatgggtccttgctcaaaatgctccagccttactggccttcttcccattcctgaatgcaccaagttagtcctgtcccagggcctttgcacgtgctggttttgctgccttgagcttcctacaggaatggtggctggttcctcccttctcatccttcacatttccttagacgccaccttctccgaaagtgccatctcttactaccctaaaggtctttttattttcttatttcagtgtccattcccttatttgtgatcgcctaattattttacttatttcttgttttgtttgcgtcctctttcattctgttagctccatgtaagcaggggtccgttttgctttattcagaactgtatactcaatgcccagtacagagtaggtctcaaaacatatttgttaaatgaatgacgtggcagctccacaattccaagtaaccaatgacacctaaagttgtttccccatgaagtctctgtcttttgggttccgtgcatcgggctgggctcacaggctgcgggaacttccttcccactgcctgttttccttggatcgcggtatctctcttcctggaggaaaaaggctcttatgacctcatggcgcgctctcccgagccgcagtgacgtcattaatgcgctcacgcgtcacagcccaatcatagggcccttcccctccctttagaagtcccgactgtccctgacacattccactccaagcgagccgcgacacttacgtcacgtccgcccgcccgcgcggtgatgacgtcacgacccagggctggcgtcacgtgtcccccccgcggggggcggcccttgagggcggcgcttccggtcggcggagcctggtggccgcagcggcggtggcgacgacggccgagacgtggggatggcgggcgccgggagcgaagcccggttcgccgggctgtcgctggtgcagctcaacgagctgctggaggacgagggccagctgacggagatggtgcagaagatggaggagacacagaatgttcagcttaacaaagaaatgacacttgccagcaaccggagcctggcagaaggaaaccttttgtaccagccccagctggacacgttgaaagcacgcttgacccagaaataccaggaactccaggttctctttgaagcctatcagataaagaagaccaaattagacagacagtctagcagtgcttccttggagaccctgttagcacttcttcaggcagaaggggccaagattgaggaagacactgagaacatggcagagaagtttctggatggagaacttcctctggattccttcattgatgtctatcagagcaaacggaaactggcccacatgcgacgggtgaaaatcgagaagctccaggagatggtcctaaaggggcagagactcccaccacccccggtgcctgcgggacgcttagccaccccgtttactgcggccatgagttcgggacaggccgtgccgtacccaggattacagtgcccgcccctgcccccccgcgtgggcctccccactcagcaaggattctcttcgcagttcgtgtccccatatccgccacctctccctcagagacccccgccccggctccctccacaccagccgggtttcatcctccagtgagcgccggcgcggtccttcccgggagacttcttccacctggcgtgttgtgctctgctcacgggaaggaggctggaggtccgctctgtgccaagggctctggggccctgggccagcgtgtctgtctgattttagaactgtaggtcagtggtgagtagtaggagcccaggctttgggcatcaaggcagttgtgtgtgccgggttacagcctgacacctgtgcgttgcatcggtttgcattatccgtgtgatttctaagtatcttagcgttgatgaactcatgtttgggaagaaataggcctctcccccagtcccatttagaatcgtggtccttctgttgcagctttatttaatgagcatggttcatgatacttattttattttcgaaagacagtcctatgtgtctcacccaccggccactgcagccctggtgagggcgggtgggcgccggccggcctggaagagcgccgtggctgggccaccacctgtggctgcgttgttgctcactgaatctgttggggagaggtcaccatagtcaccgcctgacctggctgctgctcttgcttcagagccacaagcaaagtttgcactgggcccactgccgagtccagaggccggagaacggccactggtgtgggaggggagcgcacgagtgggactttgcacagcaaattgtgtccccagctcctcctctcccgcctgcctggagccggccctgaaggtttctatgaagaaataatcccccaatatttttactacgtgtgtgattttcctgttttatattgaaaaaacttttttgacactcccaagaccattcagggaaattttataaaaaatgcagatactgtcttgagcagatcgaaatgccgatgaagtggatgcaatttccttttgtgcaagcagtgcacggtgcccccccctcgggtgtccgtgctgtgccttagcttccccaggtgccgggactcacacctgctaggggctgggcaaggccccggctctgctttctctgaagggcttgtccaagttcattgccctgttacaggtggtcaagacgtccggccgccttgacccaggctacccttagccaatatcctctgcccctgggtggctggtggctgggcctcagggtgggcaacgttaggggtttggcgaaagcccgccccatgggattgagggacggggctgcactccaaccgtctgcacctgctcttcccccacccctgtgggacctcatcttcacgtgccatgtgtgctgaaggcccagggcccagcagggggcagtggcacctgttgacggaaaaggccgaggtgcttaccagtggaccttctggcccgcccctcccctgtcacttgtcgggcatccagggccccgacctgtgcctagccgccagggtgacagaaggcagaactgaagcggggtctgggccacgggccaggccactgccttttgtcctcagtgaccatacattcctgctctcggacttgaactctactgtaactgttttcttgaaatgaagctgtacaggacgattcactgccatgccagtcaggcgggcttgccatgttctgtgaatctcgagtgagcggtgccacccgcccccatacctccgccaccggccgctgtcggggatgccacagcctgccacggtcgcagccagacgtgagcttggcattgaagttgcaaagcggcccctggccgggctcgccgtcgctgtccagggccgtgtccggtgctgtggctgtaaagctgtaggaccctttttaataaatagagaattattaataa

SEQ ID NO: 63524 - DNA, 3642 bp, Homo sapiens
tgttgtttctgaaagagcacaggttggcccacctggatgtctgggcaccttcctctgaggtgatgcaaaggggccactcaatgggtccttgctcaaaatgctccagccttactggccttcttcccattcctgaatgcaccaagttagtcctgtcccagggcctttgcacgtgctggttttgctgccttgagcttcctacaggaatggtggctggttcctcccttctcatccttcacatttccttagacgccaccttctccgaaagtgccatctcttactaccctaaaggtctttttattttcttatttcagtgtccattcccttatttgtgatcgcctaattattttacttatttcttgttttgtttgcgtcctctttcattctgttagctccatgtaagcaggggtccgttttgctttattcagaactgtatactcaatgcccagtacagagtaggtctcaaaacatatttgttaaatgaatgacgtggcagctccacaattccaagtaaccaatgacacctaaagttgtttccccatgaagtctctgtcttttgggttccgtgcatcgggctgggctcacaggctgcgggaacttccttcccactgcctgttttccttggatcgcggtatctctcttcctggaggaaaaaggctcttatgacctcatggcgcgctctcccgagccgcagtgacgtcattaatgcgctcacgcgtcacagcccaatcatagggcccttcccctccctttagaagtcccgactgtccctgacacattccactccaagcgagccgcgacacttacgtcacgtccgcccgcccgcgcggtgatgacgtcacgacccagggctggcgtcacgtgtcccccccgcggggggcggcccttgagggcggcgcttccggtcggcggagcctggtggccgcagcggcggtggcgacgacggccgagacgtggggatggcgggcgccgggagcgaagcccggttcgccgggctgtcgctggtgcagctcaacgagctgctggaggacgagggccagctgacggagatggtgcagaagatggaggagacacagaatgttcagcttaacaaagaaatgacacttgccagcaaccggagcctggcagaaggaaaccttttgtaccagccccagctggacacgttgaaagcacgcttgacccagaaataccaggaactccaggttctctttgaagcctatcagataaagaagaccaaattagacagacagtctagcagtgcttccttggagaccctgttagcacttcttcaggcagaaggggccaagattgaggaagacactgagaacatggcagagaagtttctggatggagaacttcctctggattccttcattgatgtctatcagagcaaacggaaactggcccacatgcgacgggtgaaaatcgagaagctccaggagatggtcctaaaggggcagagactcccacaggccctggccccgctgccccccaggctgcccgaactggcacctaccgccccccttccctaccctgccccagaggccagtgggcctcctgccgttgcacctcggcgcatcccccccccaccacccccggtgcctgcgggacgcttagccaccccgtttactgcggccatgagttcgggacaggccgtgccgtacccaggattacagtgcccgcccctgcccccccgcgtgggcctccccactcagcaaggattctcttcgcagttcgtgtccccatatccgccacctctccctcagagacccccgccccggctccctccacaccagccgggtttcatcctccagtgagcgccggcgcggtccttcccgggagacttcttccacctggcgtgttgtgctctgctcacgggaaggaggctggaggtccgctctgtgccaagggctctggggccctgggccagcgtgtctgtctgattttagaactgtaggtcagtggtgagtagtaggagcccaggctttgggcatcaaggcagttgtgtgtgccgggttacagcctgacacctgtgcgttgcatcggtttgcattatccgtgtgatttctaagtatcttagcgttgatgaactcatgtttgggaagaaataggcctctcccccagtcccatttagaatcgtggtccttctgttgcagctttatttaatgagcatggttcatgatacttattttattttcgaaagacagtcctatgtgtctcacccaccggccactgcagccctggtgagggcgggtgggcgccggccggcctggaagagcgccgtggctgggccaccacctgtggctgcgttgttgctcactgaatctgttggggagaggtcaccatagtcaccgcctgacctggctgctgctcttgcttcagagccacaagcaaagtttgcactgggcccactgccgagtccagaggccggagaacggccactggtgtgggaggggagcgcacgagtgggactttgcacagcaaattgtgtccccagctcctcctctcccgcctgcctggagccggccctgaaggtttctatgaagaaataatcccccaatatttttactacgtgtgtgattttcctgttttatattgaaaaaacttttttgacactcccaagaccattcagggaaattttataaaaaatgcagatactgtcttgagcagatcgaaatgccgatgaagtggatgcaatttccttttgtgcaagcagtgcacggtgcccccccctcgggtgtccgtgctgtgccttagcttccccaggtgccgggactcacacctgctaggggctgggcaaggccccggctctgctttctctgaagggcttgtccaagttcattgccctgttacaggtggtcaagacgtccggccgccttgacccaggctacccttagccaatatcctctgcccctgggtggctggtggctgggcctcagggtgggcaacgttaggggtttggcgaaagcccgccccatgggattgagggacggggctgcactccaaccgtctgcacctgctcttcccccacccctgtgggacctcatcttcacgtgccatgtgtgctgaaggcccagggcccagcagggggcagtggcacctgttgacggaaaaggccgaggtgcttaccagtggaccttctggcccgcccctcccctgtcacttgtcgggcatccagggccccgacctgtgcctagccgccagggtgacagaaggcagaactgaagcggggtctgggccacgggccaggccactgccttttgtcctcagtgaccatacattcctgctctcggacttgaactctactgtaactgttttcttgaaatgaagctgtacaggacgattcactgccatgccagtcaggcgggcttgccatgttctgtgaatctcgagtgagcggtgccacccgcccccatacctccgccaccggccgctgtcggggatgccacagcctgccacggtcgcagccagacgtgagcttggcattgaagttgcaaagcggcccctggccgggctcgccgtcgctgtccagggccgtgtccggtgctgtggctgtaaagctgtaggaccctttttaataaatagagaattattaataaaaaaaaaaaaacggccaccaaaatactgaagacacactgcgagcac

SEQ ID NO: 63525 - DNA, 3047 bp, Homo sapiens
tgttgtttctgaaagagcacaggttggcccacctggatgtctgggcaccttcctctgaggtgatgcaaaggggccactcaatgggtccttgctcaaaatgctccagccttactggccttcttcccattcctgaatgcaccaagttagtcctgtcccagggcctttgcacgtgctggttttgctgccttgagcttcctacaggaatggtggctggttcctcccttctcatccttcacatttccttagacgccaccttctccgaaagtgccatctcttactaccctaaaggtctttttattttcttatttcagtgtccattcccttatttgtgatcgcctaattattttacttatttcttgttttgtttgcgtcctctttcattctgttagctccatgtaagcaggggtccgttttgctttattcagaactgtatactcaatgcccagtacagagtaggtctcaaaacatatttgttaaatgaatgacgtggcagctccacaattccaagtaaccaatgacacctaaagttgtttccccatgaagtctctgtcttttgggttccgtgcatcgggctgggctcacaggctgcgggaacttccttcccactgcctgttttccttggatcgcggtatctctcttcctggaggaaaaaggctcttatgacctcatggcgcgctctcccgagccgcagtgacgtcattaatgcgctcacgcgtcacagcccaatcatagggcccttcccctccctttagaagtcccgactgtccctgacacattccactccaagcgagccgcgacacttacgtcacgtccgcccgcccgcgcggtgatgacgtcacgacccagggctggcgtcacgtgtcccccccgcggggggcggcccttgagggcggcgcttccggtcggcggagcctggtggccgcagcggcggtggcgacgacggccgagacgtggggatggcgggcgccgggagcgaagcccggttcgccgggctgtcgctggtgcagctcaacgagctgctggaggacgagggccagctgacggagatggtgcagaagatggaggagacacagaatgttcagcttaacaaagaaatgacacttgccagcaaccggagcctggcagaaggaaaccttttgtaccagccccagctggacacgttgaaagcacgcttgacccagaaataccaggaactccaggttctctttgaagcctatcagataaagaagaccaaattagacagacagtctagcagtgcttccttggagaccctgttagcacttcttcaggcagaaggggccaagattgaggaagacactgagaacatggcagagaagtttctggatggagaacttcctctggattccttcattgatgtctatcagagcaaacggaaactggcccacatgcgacgggtgaaaatcgagaagctccaggagatggtcctaaaggggcagagactcccacaggccctggccccgctgccccccaggctgcccgaactggcacctaccgccccccttccctaccctgccccagaggccagtgggcctcctgccgttgcacctcggcgcatcccccccccaccacccccggtgcctgcgggacgcttagccaccccgtttactgcggccatgagttcgggacaggccgtgccgtacccaggattacagtgcccgcccctgcccccccgcgtgggcctccccactcagcaaggattctcttcgcagttcgtgtccccatatccgccacctctccctcagagacccccgccccggctccctccacaccagccgggtttcatcctccagtgagcgccggcgcggtccttcccgggagacttcttccacctggcgtgttgtgctctgctcacgggaaggaggctggaggtccgctctgtgccaagggctctggggccctgggccagcgtgtctgtctgattttagaactgtaggtcagtggtgagtagtaggagcccaggctttgggcatcaaggcagttgtgtgtgccgggttacagcctgacacctgtgcgttgcatcggtttgcattatccgtgtgatttctaagtatcttagcgttgatgaactcatgtttgggaagaaataggcctctcccccagtcccatttagaatcgtggtccttctgttgcagctttatttaatgagcatggttcatgatacttattttattttcgaaagacagtcctatgtgtctcacccaccggccactgcagccctggtgagggcgggtgggcgccggccggcctggaagagcgccgtggctgggccaccacctgtggctgcgttgttgctcactgaatctgttggggagaggtcaccatagtcaccgcctgacctggctgctgctcttgcttcagagccacaagcaaagtttgcactgggcccactgccgagtccagaggccggagaacggccactggtgtgggaggggagcgcacgagtgggactttgcacagcaaattgtgtccccagctcctcctctcccgcctgcctggagccggccctgaaggtttctatgaagaaataatcccccaatatttttactacgtgtgtgattttcctgttttatattgaaaaaacttttttgacactcccaagaccattcagggaaattttataaaaaatgcagatactgtcttgagcagatcgaaatgccgatgaagtggatgcaatttccttttgtgcaagcagtgcacggtgcccccccctcgggtgtccgtgctgtgccttagcttccccaggtgccgggactcacacctgctaggggctgggcaaggccccggctctgctttctctgaagggcttgtccaagttcattgccctgttacaggtggtcaagacgtccggccgcaccggccgctgtcggggatgccacagcctgccacggtcgcagccagacgtgagcttggcattgaagttgcaaagcggcccctggccgggctcgccgtcgctgtccagggccgtgtccggtgctgtggctgtaaagctgtaggaccctttttaataaatagagaattattaataa

SEQ ID NO: 63526 - DNA, 1295 bp, Homo sapiens
cgcgagacctttattctaaccgcaaggagtagcggaggggaggtcgtgatggcggcgccggaggcggaggttctgtcctcagccgcagtccctgatttggagtggtatgagaagtccgaagaaactcacgcctcccagatagaactacttgagacaagctctacgcaggaacctctcaacgcttcggaggccttttgcccaagagactgcatggtaccagtggtgtttcctgggcctgtgagccaggaaggctgctgtcagtttacttgtgaacttctaaagcatatcatgtatcaacgccagcagctccctctgccctatgaacagcttaagcacttttaccgaaaaccttctccccaggcagaggagatgctgaagaagaaacctcgggccaccactgaggtgagcagcaggaaatgccaacaagccctggcagaactggagagtgtcctcagccacctggaggacttctttgcacggacactagtaccgcgagtgctgattctccttgggggcaatgccctaagccccaaggagttctatgaactcgacttgtctctgctggccccctacagcgtggaccagagcctgagcacagcagcttgtttgcgccgtctcttccgagccatattcatggctgatgcctttagcgagcttcaggctcctccactcatgggcaccgtcgtcatggcacagggacaccgcaactgtggagaagattggtttcgacccaagctcaactatcgagtgcccagccggggccataaactgactgtgaccctgtcatgtggcagaccttccatccgaaccacggcttgggaagactacatttggttccaggcaccagtgacatttaaaggcttccgcgagtgaatgagtgcttcttaatcctaaaaacacaatggctgaattatctttctccatgtggcgctgaatcacccatctggtttggagctagagttgcttcctggtgagagaggaagcaactctccttctggttgtctgcctcccctcagatttcctgataggctgatggcatgtggctgtgactgtgactgtaatcattgctgaacaacatctctttgaatcaaaggttgattttcccagagggtgctgggtcaggcatttctattaggagttggaaagcaaaaatgggtccatagacactctatggaggtgtccctttctgctctttgctgtgtcctttcagaatttttaccaggaacataatgtggatgtgacttatgaacttaaatataaaataaatagattcttattatattttcctgaaattg

SEQ ID NO: 63527 - DNA, 1785 bp, Homo sapiens
tccgggtcgcgtcagaaacagccgcggggcaccacgggatatagagtccccaggcctgggaattcacttaaatgacacgtcgccgccctacaactcccaggaggcatcgcggcgcaagtggccgcgggagtcgtcggaggcgtggggaaggagcgcgccttggcgcgcaaaggcttaagggagctgtagtctgacttccagtcctcgcgctatgttctttttctaggacttggggggaatttagagcctcgaggcctggggtggggacgcgaggacaccagcgtagaagagcttacatcagaatcgagctttgtgggcgctccgggatttggccctttagcgcggatcctagacaacaggttttggacctcgagagctgcagaactgaggctactggtgccgccagcctgctggctccgcctctgcctcagtttcttcccctatggcccgcgtgccgctggggcggagtctcactctgtcacccaggctggagcacaatggcatgacctcagctcaccacaacttccgcctcccaggttcaagggattctcctgcctcagcctcccaagtagctgagattatagatttggagtggtatgagaagtccgaagaaactcacgcctcccagatagaactacttgagacaagctctacgcaggaacctctcaacgcttcggaggccttttgcccaagagactgcatggtaccagtggtgtttcctgggcctgtgagccaggaaggctgctgtcagtttacttgtgaacttctaaagcatatcatgtatcaacgccagcagctccctctgccctatgaacagcttaagcacttttaccgaaaaccttctccccaggcagaggagatgctgaagaagaaacctcgggccaccactgaggtgagcagcaggaaatgccaacaagccctggcagaactggagagtgtcctcagccacctggaggacttctttgcacggacactagtaccgcgagtgctgattctccttgggggcaatgccctaagccccaaggagttctatgaactcgacttgtctctgctggccccctacagcgtggaccagagcctgagcacagcagcttgtttgcgccgtctcttccgagccatattcatggctgatgcctttagcgagcttcaggctcctccactcatgggcaccgtcgtcatggcacagggacaccgcaactgtggagaagattggtttcgacccaagctcaactatcgagtgcccagccggggccataaactgactgtgaccctgtcatgtggcagaccttccatccgaaccacggcttgggaagactacatttggttccaggcaccagtgacatttaaaggcttccgcgagtgaatgagtgcttcttaatcctaaaaacacaatggctgaattatctttctccatgtggcgctgaatcacccatctggtttggagctagagttgcttcctggtgagagaggaagcaactctccttctggttgtctgcctcccctcagatttcctgataggctgatggcatgtggctgtgactgtgactgtaatcattgctgaacaacatctctttgaatcaaaggttgattttcccagagggtgctgggtcaggcatttctattaggagttggaaagcaaaaatgggtccatagacactctatggaggtgtccctttctgctctttgctgtgtcctttcagaatttttaccaggaacataatgtggatgtgacttatgaacttaaatataaaataaatagattcttattatattttcctgaaattg

SEQ ID NO: 63528 - DNA, 455 bp, Homo sapiens
gactacatagtaagacctcatccctattaaaaatcaaaaaaattagccaggcatggtgatgcgtgcctgtagtctcagctcctcaggaggcgaggcaggaagatggcttgagtctgggagatcgaggctgcagtaagctaagatcataccactgcactccagcctgggcaacagagtgagaccctgtctcaaaaaacaaaaagcatgctgagcaaaagaaaccagacacaagagtgcatgccatatgatcccatgtgtgtgaaactacagaaagataaattgtagtctaaaatgagaaaaagggccgggtgcggcagctcaagcctgtaatcccagcactttgggaggccaaggcaggcggatcacctgaggtcaggagtccgagaccagcctggccaactttagttggccatgtttttagtagagatggcaaaacttcatctctactaaaaata

SEQ ID NO: 63529 - DNA, 338 bp, Homo sapiens
cactctgaatgtgttatcccactccctcctggcttgtgtggtttcctctatgcacctgggtatatctttctctaggtttggcaagttttgtgttatcatttctttgaataagatgccttggataatcctttgaaggaagataatttagtccaacttaatgaaaccgatatccttcgtgtactgacggaaacactggcggcacatattgaggccctatttccagatcagaccgtgccggtttgaacagacgcgacaagagggagaaccctggccgaattttcgcaggtggctccagtacaactgctggtgacccatcttgctctcaggagtgcaacgag

SEQ ID NO: 63530 - DNA, 206 bp, Homo sapiens
ttatccctttctttttttatggtttatctgtttaaaaaaacccagaccatgtgatctgcacattccctgaatctggagtttttgaactgcatattcatgacactgatcacatggcgctcatcctctgtgcttcctgtaaggtgacagctacatccaggggcctggtccgcctcttggtaggtctctggaaacaccacccggggggc

SEQ ID NO: 63531 - DNA, 151 bp, Homo sapiens
tggattcctttttctcttcagcttgtgcgagctggatttctgtcatttttaactgaaagataggttttcttacaagatttttcttcagagttgtttatcgggcttaggaactgttatttatgtctctctgtgcttaatttttctatttaaa

SEQ ID NO: 63532 - DNA, 1566 bp, Homo sapiens
  misc_feature (574)..(574): n is a, c, g, or t
  misc_feature (1212)..(1212): n is a, c, g, or t
  misc_feature (1267)..(1267): n is a, c, g, or t
  misc_feature (1376)..(1376): n is a, c, g, or t
  misc_feature (1561)..(1566): n is a, c, g, or t
ccattatcatctatgggataactccaaaatcccatattcactttaggtttaccatcagcttttgactggatactggcaaaaccaccttggtcacaatagtgctttgtgacataccatctcttacctgaatacctgcaaaaacccatggtcttcataaggtttgaaaacctaacatctgttacatggctatccacaaactgcccaggtaactgccatagctgggcatacaacatcttccggcatacctacagaaactcacggatacaattaacatggatttcatctttcatgagaaacaggaaggtttcctgtgtgctcagcactgtctgaacaatctattgcaaggagaatattttagccctgtggaattagcctcaattgcacatcagctagatgaagaagagaggatgagaatggcagaaggaggagtcaccagtgaagagtatcttgcatttttacagcagccttcagaaaacatggatgataccggtttcttctccattcaggtaataagcaatgccttgaagttctggggtttagagatcatccatttcaataatcctgaatatcagangctcggcattgatcctataaatgaaagatcttttatatgtaattataaacaacactggtttactattagaaaatttggaaaacactggtttaacttgaattctctcttggcgggtccagaattaatatcagatacatgccttgcaaatttcttggctcgattacaacaacaagcatattctgtatttgttgtcaagggtgatctgccagactgtgaagctgaccaactcctgcagatcatcagtgtcgaagagatggatacaccaaaacttaatggaaaaaaattagtaaaacaaaaagagcatagagtctataaaacagtccttgaaaaagtatcagaagaaagtgatgagtctggaacatcagaccaagatgaggaggattttcagagggcccttgaactaagccgccaagaaaccaatagagaagatgaacatctccgcagtactattgagttaagcatgcaaggtagttccggaaacacatcgcaagatcttccaaagacatcatgtgtaactcctgcttcagaacagccgaagaaaataaaagaagactattttgaaaagcatcagcaggaacagaagcagcagcaacaacagtcagatctgccgggccacagttcatacctacacgaaaggncaacaacaagttcgagagcaattgagagtgatctcagtgatgacatcagtgaagncacagtacaggccgctgtcgacaccattttagaaattatgagaaagaatttgaaaatcaaaggggaaaaataatgcctttaaaaataatttagatagtcatactttccnacattatcctgtgtgattatactgtaggatccattttggtcatctgtcaaagagatgaggaaataaggcttttagacagtttgcaaacaaaatgacgagagagatgtgggactaaataatgatcgttcaactactagccaaggagacattcagcaattaattaaatttaaattagctttcaaaannnnnn

SEQ ID NO: 63533 - DNA, 728 bp, Homo sapiens
ctgcctccctggcagactcctgggagccatgcgtgggcaccaccacccagtcctggctagggttaagtcaggcacaggctcccagcccacactgattcaacagtcctttaactagggacttgagatagagaccaagagcttccagcctcagtcttgtcgatgcctgaagtgaagcaggcgagagtctggaatgagccacactgtattatagaatagtcttaggagctgagatgagaggtctgcagtgaaggagtagaaggagggcaatgagagagaattttggagttgattcctacaccaaagtcacatcttaccctcgagttctcaaagtatccttatggcaaacctcccttttccaaatcaactagatggaaagggtttctgttacatgcagccaagggtcttgtggcaagtggcaggaaaaaaaaaaacccaaccataaagacattcatttatttaccaaaatgcctggtgaaaggtagttctggaaggtagttccaggatggttccgtgttaccaaaggcataggtacttaactatctttttgtcctgccttccctggtgtgtaggcaaggattcctctcgtggtgacaagatggctgccgcagctctgagaatcacatcctcacaagatagcatccagatccaggaagggaagacagccaaagcaggaaaggcactttctctgcatgtaccactcttttattaaagggactgtgaagattacc

SEQ ID NO: 63534 - DNA, 384 bp, Homo sapiens
gtgtcttgggcattgtttcatctgactgaaaaaatgaattttggacaaatgagaaataaatgctaagacccagtcagagttcaattatcaattttatattacttaaaagcctcttctgtctagatttagcttagtatatgtcacagccagtgacaagtcactcatatggagaggactgccaagtcaccacgctactcaactgttgtacaagttttgctcctaacaccttgccaagttgttggtgactgtgcaatttatactccagagaaaatttcgtttgtcattcttacttggttaacttgcccatgaagtttgtcattaataacttgaattctctggatctaataccattaaaaatagaagcaagaatcccaggatgctaat

SEQ ID NO: 63535 - DNA, 330 bp, Homo sapiens
tgttgttgttgttcattactagtgttacatagtttcttcacatacattttgcacatttcttattaggtttcctgtgtataagtcagagtcccagcaagaaaggtatagcaaatattccaatgggctaatggaggggagtttgatgaagggattattttcaaaggtgaggaaagggttaaggagactcaacaagggacagtgtaaaggctaattttaggtgtacacttgactgcattaagtaatatccagagagccggtaaagcattatttctgggtctatgagggcgattttggaaaagattgacatttgagccagcagactacgtaagg

SEQ ID NO: 63536 - DNA, 495 bp, Homo sapiens
acttcttgaaataaaggctaaatcctttatggttatgaatgtaccttttctttccgttaattttaatctgtttttcccctttgctctcacccctccttctttcttcatttcttcctataagtcacacctctaaaattgttgtaacaaaaaattcaaaggctctttgtgtttggtgaatagagttatatagtcgtctcctggtgtctgtgggtgattattattccaaggtccctgtggatacaaaaatctgcagatataaaaggatgtactattttcacgtaacccacacgcatcctccctatataatactgtaaatccttctagattacctatacctaatatagtgcacatgctatatagttgttatactatattgtttttaatttgtattatttttattatttttattgtttttttatttttattttcacttatttacttatttttttgagatggaatctcactccagcctgggcgacagagcaagactgtctc

SEQ ID NO: 63537 - DNA, 579 bp, Homo sapiens
cactagggggaagactaggatgatacctggacggcagagacagcagtgatccagttccagtcccacttcctcaactgccggctggtggtttccacctgcatgtgctcatctctttactcatgccctaaggactcaacaccagtgcctgataggatctactgaggatgctgaaactcacttgatagatgttcaagctccccacgccttctccagctggtggtcagtattcttaggtccagcataccacccaccaagcatccttgcccgactgactaagtgttttgtacctggacaattcaaaagggaatgcggaggttgctctagcctgtatctcctcctctgggcagacccatatctctgggattccaccagctcttctgactatgcctcctgtgttccccactccccgctgtcaggaagcccttccttttgcccactttacatcactcacattgacgtttgacctccacatggaattccaatgtgcccccgttttgtgaccaggactaggcccccttgacatctacgagctcatgtgtacatggggtaactctgataaagccagcattattatgcttc

SEQ ID NO: 63538 - DNA, 462 bp, Homo sapiens
tctcaagtagataaaatcctgtgatcacatttagaacttttaaagaatagttgagattgaaaatacttactctgggggaaaaaggtaactggaacacagtgcttcagaaaagtccagacaccttgattttactaatttagaacagtttagaagaaatccaaggtaagtcaaagttgggaattataggaagcaatgaaatagtcaatttcagtgggtgtggtggcttacgcctgtaatcccagcactttgggaggccaaagtagaaggatcgcttgagcccaagagttctagaccagcctgggcaacatagtgggaccccgtctctacccctaaaaattaaccgggctaagtggcacacacttgaaatcccagccacttaggaggctgagggaggaggattggttgagcccaggaggttgaggcttcagtgagctatgatggcctgggtgacagagtgagacc

SEQ ID NO: 63539 - DNA, 584 bp, Homo sapiens
atcacattagctgacatcaggaactgagccaggcagtgtggttgtgatgtcactatctcacctcacccccacctaagagattgtggtggggaatctcagacactctaaccctctgggcccaagtcacctttctatcaggggagggaggctgtgctctcactggcttcttgttagaagttctgcctgccctacagcctgcactgagggctctcatcactgcttctgagatcttaatgggggtcaacgaagatgtgggcttctctgagtttagaccatccatctgccaaggaaaaccaagccctgagactgatagagatgagagaagagaatggtaatgtccccaagacagagcaggcaggaagtttgaagcctctgagggatacaggaaaatctaacctcaaagagaagaagatgaatatcaacaagttgtgtccgggcttgggtggtgagtgtatgactccagatgttatgctgctccagcagaaccagtcactcttgtggaagccaaggaatgggaacagaagaatatgaaatctgtggtactgatcatcagtcttaatatccaaatgaatatcatggtacat

SEQ ID NO: 63540 - DNA, 1137 bp, Homo sapiens
atcacattagctgacatcaggaactgagccaggcagtgtggttgtgatgtcactatctcacctcacccccacctaagagattgtggtggggaatctcagacactctaaccctctgggcccaagtcacctttctatcaggggagggaggctgtgctctcactggcttcttgttagaagttctgcctgccctacagcctgcactgagggctctcatcactgcttctgagatcttaatgggggtcaacgaagatgtgggcttctctgagtttagaccatccatctgccaaggaaaaccaagccctgagactgatagagatgagagaagagaatggtaatgtccccaagacagagcaggcaggaagtttgaagcctctgagggatacaggaaaatctaacctcaaagagaagaaggagaaattttgtgtcgatatggggcttcaaacatacgtgttgagttttacaagatgaattagaaaaccgttctaatcaggtgcgatgtgcagagaaaaaattacaacacaaagaattggagtcacaggaacagataacttacatacgacaagaatatgaaacaaaattgaaaggattgatgccagcatccctaagacaagaacttgaagacaccatttcctccctaaaatcacaggttaattttctgcaaaagagagcttccatccttcaggaagaactgactacatatcaaggcagaaggtaactgcacgagagaatgcaacggatgcaatttccaggctgtgctgtggacttcttccagcaggtttgaagatttggatattgtaaactgtgagatcagtggcattttttaaatccttaaatgtaattaagatcataaaaacatgcatcattcatacactagtggggtggttttatttgtgtctgcctaagttatttttttaacattcctttatttccgattttcatgtttgtgtgcatttgagtatgtgctgagaactgcttatattgggcaaagtgatttcctatgatatgccttgttaatccttttgcatagaattttaccagttgcgtacgatcaaaatcacgtttgtagtatcatatcaaaaattctaacctgtttacattgttttcatgttcatgttcctatgttattaaaatattatt

SEQ ID NO: 63541 - DNA, 777 bp, Homo sapiens
cgtcatactggattaagagcccactctactccagggtgacctcgtctgattatgtctgcaaggatcctatttccaaataaggccacgttctgaggttttacaagatgaattagaaaaccgttctaatcaggtgcgatgtgcagagaaaaaattacaacacaaagaattggagtcacaggaacagataacttacatacgacaagaatatgaaacaaaattgaaaggattgatgccagcatccctaagacaagaacttgaagacaccatttcctccctaaaatcacaggttaattttctgcaaaagagagcttccatccttcaggaagaactgactacatatcaaggcagaaggtaactgcacgagagaatgcaacggatgcaatttccaggctgtgctgtggacttcttccagcaggtttgaagatttggatattgtaaactgtgagatcagtggcattttttaaatccttaaatgtaattaagatcataaaaacatgcatcattcatacactagtggggtggttttatttgtgtctgcctaagttatttttttaacattcctttatttccgattttcatgtttgtgtgcatttgagtatgtgctgagaactgcttatattgggcaaagtgatttcctatgatatgccttgttaatccttttgcatagaattttaccagttgcgtacgatcaaaatcacgtttgtagtatcatatcaaaaattctaacctgtttacattgttttcatgttcatgttcctatgttattaaaatattatt

SEQ ID NO: 63542 - DNA, 1452 bp, Homo sapiens
  misc_feature (27)..(27): n is a, c, g, or t
tctcctcttctgaatcgctgaaatganagagcagatggaaaaagtggaggcagatctaactagatccaaatctcttcgtgagaaacaatcaaaggagtttttatggcaactggaggacatcagacagcggtatgaacaacagatagtagagctgaagctggagcatgaacaggagaagacgcacctattacagcagcataacgcagagaaggatagcctagtccgagaccatgaacgggaaattgaaaacctggaaaaacagcttcgcgctgccaatatggagcacgaaaatcaaattcaggagttcaagaaacgagatgcacaggttattgccgacatggaggcccaggttcacaagttgagagaagaattgatcaatgtgaactcacagcggaaacagcagctggtagagcttggtcttcttcgtgaagaggaaaagcaaagggctacaagggaacatgagattgtcgtcaataaactgaaggctgaatcagaaaagatgaaaatagagctgaaaaagactcatgctgctgagacagagatgacactggaaaaggccaacagcaagctgaagcagattgagaaggaatacactcagaagcttgccaaatcttcacagatcatagcagaacttcagacaaccatttcctctctgaaagaagagaacagccagcagcagcttgctgcagaaaggcggctccaggatgttagacaaaagtttgaagatgagaagaagcagctgattagagataatgaccaagcaatcaaggttttacaagatgaattagaaaaccgttctaatcaggtgcgatgtgcagagaaaaaattacaacacaaagaattggagtcacaggaacagataacttacatacgacaagaatatgaaacaaaattgaaaggattgatgccagcatccctaagacaagaacttgaagacaccatttcctccctaaaatcacaggttaattttctgcaaaagagagcttccatccttcaggaagaactgactacatatcaaggcagaaggtaactgcacgagagaatgcaacggatgcaatttccaggctgtgctgtggacttcttccagcaggtttgaagatttggatattgtaaactgtgagatcagtggcattttttaaatccttaaatgtaattaagatcataaaaacatgcatcattcatacactagtggggtggttttatttgtgtctgcctaagttatttttttaacattcctttatttccgattttcatgtttgtgtgcatttgagtatgtgctgagaactgcttatattgggcaaagtgatttcctatgatatgccttgttaatccttttgcatagaattttaccagttgcgtacgatcaaaatcacgtttgtagtatcatatcaaaaattctaacctgtttacattgttttcatgttcatgttcctatgttattaaaatattatt

SEQ ID NO: 63543 - DNA, 1307 bp, Homo sapiens
atcacattagctgacatcaggaactgagccaggcagtgtggttgtgatgtcactatctcacctcacccccacctaagagattgtggtggggaatctcagacactctaaccctctgggcccaagtcacctttctatcaggggagggaggctgtgctctcactggcttcttgttagaagttctgcctgccctacagcctgcactgagggctctcatcactgcttctgagatcttaatgggggtcaacgaagatgtgggcttctctgagtttagaccatccatctgccaaggaaaaccaagccctgagactgatagagatgagagaagagaatggtaatgtccccaagacagagcaggcaggaagtttgaagcctctgagggatacaggaaaatctaacctcaaagagaagaaggccaacagcaagctgaagcagattgagaaggaatacactcagaagcttgccaaatcttcacagatcatagcagaacttcagacaaccatttcctctctgaaagaagagaacagccagcagcagcttgctgcagaaaggcggctccaggatgttagacaaaagtttgaagatgagaagaagcagctgattagagataatgaccaagcaatcaaggttttacaagatgaattagaaaaccgttctaatcaggtgcgatgtgcagagaaaaaattacaacacaaagaattggagtcacaggaacagataacttacatacgacaagaatatgaaacaaaattgaaaggattgatgccagcatccctaagacaagaacttgaagacaccatttcctccctaaaatcacaggttaattttctgcaaaagagagcttccatccttcaggaagaactgactacatatcaaggcagaaggtaactgcacgagagaatgcaacggatgcaatttccaggctgtgctgtggacttcttccagcaggtttgaagatttggatattgtaaactgtgagatcagtggcattttttaaatccttaaatgtaattaagatcataaaaacatgcatcattcatacactagtggggtggttttatttgtgtctgcctaagttatttttttaacattcctttatttccgattttcatgtttgtgtgcatttgagtatgtgctgagaactgcttatattgggcaaagtgatttcctatgatatgccttgttaatccttttgcatagaattttaccagttgcgtacgatcaaaatcacgtttgtagtatcatatcaaaaattctaacctgtttacattgttttcatgttcatgttcctatgttattaaaatattatt

SEQ ID NO: 63544 - DNA, 935 bp, Homo sapiens
tgactctagcggatccttaggaggcaggacactggaaaagccaacagcaagctgaagcagattgagaaggaatacactcagaagcttgccaaatcttcacagatcatagcagaacttcagacaaccatttcctctctgaaagaagagaacagccagcagcagcttgctgcagaaaggcggctccaggatgttagacaaaagtttgaagatgagaagaagcagctgattagagataatgaccaagcaatcaaggttttacaagatgaattagaaaaccgttctaatcaggtgcgatgtgcagagaaaaaattacaacacaaagaattggagtcacaggaacagataacttacatacgacaagaatatgaaacaaaattgaaaggattgatgccagcatccctaagacaagaacttgaagacaccatttcctccctaaaatcacaggttaattttctgcaaaagagagcttccatccttcaggaagaactgactacatatcaaggcagaaggtaactgcacgagagaatgcaacggatgcaatttccaggctgtgctgtggacttcttccagcaggtttgaagatttggatattgtaaactgtgagatcagtggcattttttaaatccttaaatgtaattaagatcataaaaacatgcatcattcatacactagtggggtggttttatttgtgtctgcctaagttatttttttaacattcctttatttccgattttcatgtttgtgtgcatttgagtatgtgctgagaactgcttatattgggcaaagtgatttcctatgatatgccttgttaatccttttgcatagaattttaccagttgcgtacgatcaaaatcacgtttgtagtatcatatcaaaaattctaacctgtttacattgttttcatgttcatgttcctatgttattaaaatattatt

SEQ ID NO: 63545 - DNA, 1180 bp, Homo sapiens
  misc_feature (27)..(27): n is a, c, g, or t
tctcctcttctgaatcgctgaaatganagagcagatggaaaaagtggaggcagatctaactagatccaaatctcttcgtgagaaacaatcaaaggagtttttatggcaactggaggacatcagacagcggtatgaacaacagatagtagagctgaagctggagcatgaacaggagaagacgcacctattacagcagcataacgcagagaaggatagcctagtccgagaccatgaacgggaaattgaaaacctggaaaaacagcttcgcgctgccaatatggagcacgaaaatcaaattcaggagttcaagaaacgagatgcacaggttattgccgacatggaggcccaggttcacaagttgagagaagaattgatcaatgtgaactcacagcggaaacagcagctggtagagcttggtcttcttcgtgaagaggaaaagcaaagggctacaagggaacatgagattgtcgtcaataaactgaaggctgaatcagaaaagatgaaaatagagctgaaaaagactcatgctgctgagacagagatgacactggaaaaggccaacagcaagctgaagcagattgagaaggaatacactcagaagcttgccaaatcttcacagatcatagcagaacttcagacaaccatttcctctctgaaagaagagaacagccagcagcagcttgctgcagaaaggcggctccaggatgttagacaaaagtttgaagatgagaagaagcagctgattagagataatgaccaagcaatcaaggttttacaagatgaattagaaaaccgttctaatcaggtgcgatgtgcagagaaaaaattacaacacaaagaattggagtcacaggaacagataacttacatacgacaagaatatgaaacaaaattgaaaggattgatgccagcatccctaagacaagaacttgaagacaccatttcctccctaaaatcacaggttaattttctgcaaaagagagcttccatccttcaggaagaactgactacatatcaaggcagaaggtaactgcacgagagaatgcaacggatgcaatttccaggctgtgctgtggacttcttccagcaggtttgaagatttggatattgtaaactgtgagatcagtggcattttttaaatccttaaatgtaattaagatcataaaaacatgcatcattc

SEQ ID NO: 63546 - DNA, 541 bp, Homo sapiens
cggtttgatcggtctgacgtggtccaagagtctgacccaagggtttgcgactgggagaggaaatctgtgtcctggacaagattggattatggaagtgggaagtgaagaagaaaaatgggagaagctggatgcagaatttgatcactttgtggttgatatgaagccctttgttctaaaattacctcataggacagaacggcagaggtgtgctctttggattagaaagctgtgcgaaccttcaggaacaggtgcaggaataatggggaggaagaatcggaacctgtatgcaaaattgttattgcatatgcttaaacgaggtgcgcttgaaggcccttttacacaccgacctgaacccgggacactaaaaattctaccttcatacatgtccatctattttgatgaaccaaatccagcacgagcaaaaggttcaagcccagagggattaccagcctgggtactgggtgagctggagacaagtgaacacaaattaaatgaatcatggaactctcttctggagaagataacactttagtacagtcgc

SEQ ID NO: 63547 - DNA, 787 bp, Homo sapiens
cggtttgatcggtctgacgtggtccaagagtctgacccaagggtttgcgactgggagaggaaatctgtgtcctggacaagattggattatggaagtgggaagtgaagaagaaaaatgggagaagctggatgcagaatttgatcactttgtggttgatatgaagccctttgttctaaaattacctcataggacagataacttacatacgacaagaatatgaaacaaaattgaaaggattgatgccagcatccctaagacaagaacttgaagacaccatttcctccctaaaatcacaggttaattttctgcaaaagagagcttccatccttcaggaagaactgactacatatcaaggcagaaggtaactgcacgagagaatgcaacggatgcaatttccaggctgtgctgtggacttcttccagcaggtttgaagatttggatattgtaaactgtgagatcagtggcattttttaaatccttaaatgtaattaagatcataaaaacatgcatcattcatacactagtggggtggttttatttgtgtctgcctaagttatttttttaacattcctttatttccgattttcatgtttgtgtgcatttgagtatgtgctgagaactgcttatattgggcaaagtgatttcctatgatatgccttgttaatccttttgcatagaattttaccagttgcgtacgatcaaaatcacgtttgtagtatcatatcaaaaattctaacctgtttacattgttttcatgttcatgttcctatgttattaaaatattatt

SEQ ID NO: 63548 - DNA, 1531 bp, Homo sapiens
agcggatcgatggcaactgagaacgctgtgtttttctacaaagtgtttgtaagatgatttttgaatttttgttatattgtgaaaggagaatggaatggggtctggcattttcgatggaaaaagtggaggcagatctaactagatccaaatctcttcgtgagaaacaatcaaaggagtttttatggcaactggaggacatcagacagcggtatgaacaacagatagtagagctgaagctggagcatgaacaggagaagacgcacctattacagcagcataacgcagagaaggatagcctagtccgagaccatgaacgggaaattgaaaacctggaaaaacagcttcgcgctgccaatatggagcacgaaaatcaaattcaggagttcaagaaacgagatgcacaggttattgccgacatggaggcccaggttcacaagttgagagaagaattgatcaatgtgaactcacagcggaaacagcagctggtagagcttggtcttcttcgtgaagaggaaaagcaaagggctacaagggaacatgagattgtcgtcaataaactgaaggctgaatcagaaaagatgaaaatagagctgaaaaagactcatgctgctgagacagagatgacactggaaaaggccaacagcaagctgaagcagattgagaaggaatacactcagaagcttgccaaatcttcacagatcatagcagaacttcagacaaccatttcctctctgaaagaagagaacagccagcagcagcttgctgcagaaaggcggctccaggatgttagacaaaagtttgaagatgagaagaagcagctgattagagataatgaccaagcaatcaaggttttacaagatgaattagaaaaccgttctaatcaggtgcgatgtgcagagaaaaaattacaacacaaagaattggagtcacaggaacagataacttacatacgacaagaatatgaaacaaaattgaaaggattgatgccagcatccctaagacaagaacttgaagacaccatttcctccctaaaatcacaggttaattttctgcaaaagagagcttccatccttcaggaagaactgactacatatcaaggcagaaggtaactgcacgagagaatgcaacggatgcaatttccaggctgtgctgtggacttcttccagcaggtttgaagatttggatattgtaaactgtgagatcagtggcattttttaaatccttaaatgtaattaagatcataaaaacatgcatcattcatacactagtggggtggttttatttgtgtctgcctaagttatttttttaacattcctttatttccgattttcatgtttgtgtgcatttgagtatgtgctgagaactgcttatattgggcaaagtgatttcctatgatatgccttgttaatccttttgcatagaattttaccagttgcgtacgatcaaaatcacgtttgtagtatcatatcaaaaattctaacctgtttacattgttttcatgttcatgttcctatgttattaaaatattatt

SEQ ID NO: 63549 - DNA, 677 bp, Homo sapiens
agcggatcgatggcaactgagaacgctgtgtttttctacaaagtgtttgtaagatgatttttgaatttttgttatattgtgaaaggagaatggaatggggtctggcattttcgatggaaaaagtggaggcagatctaactagatccaaatctcttcgtgagaaacaatcaaaggagtttttatggcaactggaggacatcagacagcggtatgaacaacaggtgctggagaagtgttttgaagtgttaaatgggaagataaccacaggagatagcgcctgcttccagccttgcttcatctatcagcttgctaatcacagctgtgtttccagccttctgctctccctgtatcatgagcttcgggagcttcagcaggcagtagtcctggctgttgatggttggctggagaggaaaaggaataaagaagcagtgtatgctggcaggccctggtaccatctctaacagcggttatcacagcaacattaaacttttaaataaggagaacttccatgcgtaaactgaactgttgattgacagatttcatggatgtagcaaacatctaatctgggagccacatggccatccccaaatgacacattctatttctgttcttgacacactgcctgctttttacaatttttttgtgcctatttctattaaagtgttcagaaagtaaaa

SEQ ID NO: 63550 - DNA, 397 bp, Homo sapiens
aatggaaggagactggttggtatgtctttaaccatttgtttgaatcacttgaaatgaattcaagttggtaaggtatgttgccaacttatatgtttttataatttttaaaaattgtttggatataggcctgtaacttgccaaataactaaggagaaatgacagaatttaaaaaatataaatcaagacaactaacttttctttttgctctagtagggaatgaggactggtaaggaatacttgaccaagaaatgaaatattgtattttattcttgcttataaatgtttagcaatgctctctgaaggaaatgcatagcaagctatgttaggatcattttaaagttctatacggtgctgttatatcctactgatactttgaatttagtcttgaacagctcag

SEQ ID NO: 63551 - DNA, 429 bp, Homo sapiens
  misc_feature (104)..(104): n is a, c, g, or t
  misc_feature (135)..(136): n is a, c, g, or t
tgtgatgggccacaaaacaagtctcaacaaattaaaaaaaaatgaaatcataccaaacacaacattcaaccacagtgcaataaaaatagaaatcaatactaagnaaatcattcaaaaaccatacaattacatggnntttaaacaacctgctcccgaatgccatttgggcaaacaacattaagatgtgttggctattacagtgtaccaggcaataggataggcacttctgcatctaatctcacctcatcttccattaaactcagaagaaaggtggttattattattattatcatcactattactattactcccattttacaaactaggaaactaacaggaagagaggagagaggttaaataccttgatcaaagttacagacagtaagtggtagaggttacttaccctgcagccaaagttagcctaatttg

SEQ ID NO: 63552 - DNA, 400 bp, Homo sapiens
caagaacctgtggatgacatcgaggacttgttgtattttcaattcgtcctcttgtttaatccacattattactccatggagtagatacagtaatttttatttatatttcatatatgagactcagttattgagtagggggaaggtataacccaagacttctgacttggattctaatgctctttctttcaccctctacctcatttggaggtctaaaaattggaaaacaagacaaagaggatataaaagatagtgtaagacttttcttacataaaaaaaaaagagtcagaaacaaaaccttcatttttcaatgtgaaggaagttttttttgtgtgtttgttgttttgtttccccatggttttgagttttccaactttcttgctttccctcctgggctaaaaat

SEQ ID NO: 63553 - DNA, 815 bp, Homo sapiens
agctggctggagggagcgggacagagcagaggggagggggatcccactggtagcatggatggggcctatcgcccccgacacaaaccagggtctgcccagggacaggtgtgggctgtgtggaggcagaggctggagtcctcagtcctgcatgaggccccactgtttgctgtccttgccgggcggccgggcagcatgttctgtggctcagcctggctgcaacgcctgcccggcttctgagtccctgaaacctcgggcagagcctgggctctcggccctggtgagggagaggggttatggaccccaccaccacctcgggcagtggatgggacactctgaggctggcctggctcacaccgtgttggtaggaagcctgacccccactctgttcccacccccacctagggcctgttttttcaaaagtaaccgttttactgagatgtgattcatatactgtacaattcagcctttaaagtgtgcagtaaatgacttttagtacatatgcagagttgtgcagccgtcacctctaattccagaacattgcatcagctcaaatagcaactctgtccctgttagcagtcacccccatcccgactcccagccctggcacccacatccctttcctgcgtctgtggatcagcctgtcctggacgtgtcatagaagtggaatcacacactgtgtggctttctgtgtctggcgtctctcactgagtgtagcgtcctcagggttcattcgcactggggcccgtgtcagagccttgctcctgttcatggctgagtcgtgttctggtgcgtggggcgcccgtgctgcacttgtc

SEQ ID NO: 63554 - DNA, 590 bp, Homo sapiens
ctcagagaaaataacaatatgctgttactttcagagataggtatgggaatgggtgtggggagtagtaatgtagcttttgataacaacattgcccatttattaaaagaagtctgagaagccactgagaaaagccaagtaagaattctggtggagtttggatatgggtaaaaatcatgttgtatagatgtgagtgccagccagtcacatctttctggtacaaagtaggtacttaatgtttgctgagtgaatttacagatcagattaatgaagacattaattataattttcaatttactactcaaacctgtcatcattccttagctggccatatcactgttacccaatgacattaattaatttactcagttattatttagttcattcaattaataggtcagttaatctatcagtcaacaaatatttattaagtgcctattaaatgccaaaagttatgacagaccctgggaactgaaatggaaaagccatagtcaggattaaaggtatttttggtaagtcaaagagacagataagaaataataaatcccaacaacaacaacaaaaagatgctgctacaggtacagcaaaaactc

SEQ ID NO: 63555 - DNA, 572 bp, Homo sapiens
cagagagagctttccaaactacaaccctaaccagaggaagccccctcgtgactttccacatatccctaggataaaggacacactgtaacccagaaataccttaatcattgccatcttcttcaaggttttccttgctactttggccatgcaggatgaaactcttctaatgagtcatgctcttccaaaagtccatatcctttgtatatacttttccctctgcccggaatactgcatcttattccccttttccttcactgcctggatacctagagaggccatgaaacctgtaactgggagcacaggtttcaaaggcagacagactctggttccaatcccagctctgccacttactcatgtaatatctatgagagttggggtggcttattcaacctccgtgcctcagtttcctcatctgtaaaacaggaataaaaaataacggctactttacaaattgatatgaacactgaatgagataactgatgtgacacagtgcaaggcctgacatgtcaggcactacatgtactagctcctgctgttatttatttattacagttgattttcttgttgttaaa

SEQ ID NO: 63556 - DNA, 345 bp, Homo sapiens
ggtctacaaggagttcttggggaaagcgtaacacatttttgcaatctagaatctgttacatataattatagtatttaacaaattaagcatgatattttattgacggaaaattcaaaataattagttttttctatgcaaagattaacatttatgtttaaatgggaaactatagatttaaagaatgtcttcctttctgatttgtgaatattcagtattttactattttagaaatacgaacttataaaagcacaagccattcttccttagatactttatttttggaatagtttcagaataaattacgaatgtcatcttctttaaagtatttactgttcttgatgattt

SEQ ID NO: 63557 - DNA, 862 bp, Homo sapiens
tcctgggcctctcaaagtctgagccccgctccgctgatgcctgtctgcagaatccgcaccaaccagcaccatgcccatgactctggggtactgggacatccgtgggctggcccacgccatccgcttgctcctggaatacacagactcaagctatgtggaaaagaagtacacgctgggggacgctcctgactatgacagaagccagtggctgaatgaaaaattcaagctgggcctggactttcccaatctgccctacttgattgatggggctcacaagatcacccagagcaatgccatcctgcgctacattgcccgcaagcacaacctgtgtggggagacagaagaggagaagattcgtgtggacattttggagaaccaggttatggataaccacatggagctggtcagactgtgctatgacccagattttgagaaactgaagccaaaatacttggaggaactccctgaaaagctaaagctctactcagagtttctggggaagcggccatggtttgcaggagacaagatcacctttgtggatttccttgcctatgatgtccttgacatgaagcgtatatttgagcccaagtgcttggacgccttcctaaacttgaaggacttcatctcccgctttgaggtgatgcccccatcctcctttctctttgatgccccttgttcctttctctcctttcagatgctttcccagtcctggagctacacaaagaataactcgtatgtattgagtacgggcttcatgccaggaatcatgcccagcacattatacctatcgtgtagaatttgaaatttccaacattcctacagggtgacagaattatcttgcccattttagagataagaaaac

SEQ ID NO: 63558 - DNA, 1621 bp, Homo sapiens
tcctgggcctctcaaagtctgagccccgctccgctgatgcctgtctgcagaatccgcaccaaccagcaccatgcccatgactctggggtactgggacatccgtgggctggcccacgccatccgcttgctcctggaatacacagactcaagctatgtggaaaagaagtacacgctgggggacgctcctgactatgacagaagccagtggctgaatgaaaaattcaagctgggcctggactttcccaatctgccctacttgattgatggggctcacaagatcacccagagcaatgccatcctgcgctacattgcccgcaagcacaacctgtgtggggagacagaagaggagaagattcgtgtggacattttggagaaccaggttatggataaccacatggagctggtcagactgtgctatgacccagattttgagaaactgaagccaaaatacttggaggaactccctgaaaagctaaagctctactcagagtttctggggaagcggccatggtttgcaggagacaagatcacctttgtggatttccttgcctatgatgtccttgacatgaagcgtatatttgagcccaagtgcttggacgccttcctaaacttgaaggacttcatctcccgctttgagggtttgaagaagatctctgcctacatgaagtccagccaattcctccgaggtcttttgtttggaaagtcagctacatggaacagcaaatagggcccagtgatgccagaagatgggagggaggagccaaccttgctgcctgcgaccctggaggacagcctgactccctggacctgccttcttcctttttccttctttctactctcttctcttccccaaggcctcattggcttcctttcttctaacatcatccctccccgcatcgaggctctttaaagcttcagctccccactgtcctccatcaaagtccccctcctaacgtcttcctttccctgcactaacgccaacctgactgcttttcctgtcagtgcttttctcttctttgagaagccagactgatctctgagctccctagcactgtcctcaaagaccatctgtatgccctgctccctttgctgggtccctaccccagctccgtgtgatgcccagtaaagcctgaaccatgcctgccatgtcttgtcttattccctgaggctcccttgactcaggactgtgctcgaattgtgggtggttttttgtcttctgttgtccacagccagagcttagtggatgggtgtgtgtgtgtgtgtgttgggggtggtgatcaggcaggttcataaatttccttggtcatttctgccctctagccacatccctctgttcctcactgtggggattactacagaaaggtgctctgtgccaagttcctcactcattcgcgctcctgtaggccgtctagaactggcatggttcaaagaggggctaggctgatggggaagggggctgagcagctcccaggcagactgccttctttcaccctgtcctgatagacttccctgatctagatatccttcgtcatgacacttctcaataaaacgtatcccaccgtattgtaatcatggtacttgtttttcacccaaactcaatcataaatttattgaagagaaa

SEQ ID NO: 63559 - DNA, 1144 bp, Homo sapiens
tcctgggcctctcaaagtctgagccccgctccgctgatgcctgtctgcagaatccgcaccaaccagcaccatgcccatgactctggggtactgggacatccgtgggctggcccacgccatccgcttgctcctggaatacacagactcaagctatgtggaaaagaagtacacgctgggggacgctcctgactatgacagaagccagtggctgaatgaaaaattcaagctgggcctggactttcccaatctgccctacttgattgatggggctcacaagatcacccagagcaatgccatcctgcgctacattgcccgcaagcacaacctgtgtggggagacagaagaggagaagattcgtgtggacattttggagaaccaggttatggataaccacatggagctggtcagactgtgctatgacccagattttgagaaactgaagccaaaatacttggaggaactccctgaaaagctaaagctctactcagagtttctggggaagcggccatggtttgcaggagacaagatcacctttgtggatttccttgcctatgatgtccttgacatgaagcgtatatttgagcccaagtgcttggacgccttcctaaacttgaaggacttcatctcccgctttgagggtttgaagaagatctctgcctacatgaagtccagccaattcctccgaggtcttttgtttggaaagtcagctacatggaacagcaaatagggcccagtgatgccagaagatgggagggaggagccaaccttgctgcctgcgaccctggaggacagcctgactccctggacctgccttcttcctttttccttctttctactctcttctcttccccaaggcctcattggcttcctttcttctaacatcatccctccccgcatcgaggctctttaaagcttcagctccccactgtcctccatcaaagtccccctcctaacgtcttcctttccctgcactaacgccaacctgactgcttttcctgtcagtgcttttctcttctttgagaagccagactgatctctgagctccctagcactgtcctcaaagaccatctgtatgccctgctccctttgctgggtccctaccccagctccgtgtgatgcccagtaaagcctgaaccatgcctgc

SEQ ID NO: 63560 - DNA, 3279 bp, Homo sapiens
  misc_feature (1)..(1): n is a, c, g, or t
  misc_feature (123)..(123): n is a, c, g, or t
  misc_feature (2290)..(2290): n is a, c, g, or t
  misc_feature (2817)..(2817): n is a, c, g, or t
ngttttttctaaaggaccaaggctctcaataagcttccctagcccctggcaagccggctaattgcatgagggagttgacttgtacttcccagccaccaataataccgtcaattgaggagcccntggtcagctgtgacggctggggagctacggtggctccggaggcatccggaaagggcagaaatccacctgtagctctgggacctcgagggaactctctgcttgatgctgtgccgtggcatccccaaaccccatatgttgtcatctctggtccacaggtgtcacaggtggcctcccacacgccccctcctatgccttcaggcaaatggagaagctgtggcaatcgtccccgttctgtggcagatatatcgtgaggaacgcaggcgccacgctcactcgtgggagagaccaggccccaccgtggatctacacatccagactccctggcacctcgacgctacccaaatgctttcctcatcaaggcctcctcgctcctgagacctggccctgccacacgctccaagaccaccgacccctctgcccccgtcctcccttcctgggcacacggccaccccgacatccctgagcaggcaaggagctcttgcatttgctgtctcctctgctcaccaggatggcagacactgcttcttctcagggaggccctggcgcggggtcccctccccaccttctctggagctggtcctcatcccgatgggaaactgttttgcctggcgctgctgccccactgcacagagcgcacaaggtgtggggggaggggtgggcacagacactcacagccccacctagcccaaggaaggtgcatgtcaacctgtcagatgacagatggccactttgacctggggctggacgtcgctggagcccccagccagatgtggcctcagtcacaggcctggggcttgtgtggctcagggctgccggggagaccccaagaggacatgggcagctggagctcaggactagcggagcggccagacgtcctgcccatgcaggctgcatctgtgccctggctgcccacccaccaacgtcctgcccacgctcaccagggccttgcttggccagatgtccagtaggctttgggcggggccatccagccttggcaaggcccatggactgtcacagccctccccaccccacatccaggacaaggtcatctagcgccacaccaggtggatggttcagaaaggctgggttctccaagctgcacaccagaggctgcacagagctgaagtccggcgagtcccaaggctcccagggcggcccgctgccccacaccctccggcaaacacgaaggcgccaccctcggcacccagcagcatctgcctcagcccctgcagagggcggcgctggtgtgggctgcagagagtatggcccgcaggcagccgccatgggcctgcccgagctgagtggctttcagcagaccaggcggccactcaggcctgcgtggactggatgtgtccccagaatccacatgctgaaaccctcactccagtgtgatggtgttaggagagggggcctttgggggtgactgggtcaggagggtggagccctcggaagaggaccagcaccctcaggggaagagacacgggcgctgggttcccttctctgcttcgtgccatgtggggacatgggaaggcatcgtctgcaagccaggaagccggccctcacagaaccgagtctgcccgctccttgatcttgacctctggcttccagaactgtgagaaataaatttctgttgtttaaggcaccaagtcaaagttactctgttgtagttgcccaagtgagacagaacctcatgctacccagacaagtggagagagtcagcccccaccccacgggagggtggggatgggagcgagacagcgagagccttattctgagagggcgtcaggaggagggcaggaaggtgcccaggtgagtcaatttcccggcttggacacgcccctcttccctggtctcacacaggaaggtgcccaggtgagtccagttcccggctcggacacgcccctcttccctggtctctctcgggaaggtgcccaggtgagtccagttcccggctcggacacgcccctcttccctggtctcgcacgggaagtcgcccaggtgagtccagttcccggctcggacacgcccctcttccctggtctcgcacgggaagtcgcccaggtgagtccagttcccggctcggacacgcccctcttccctggtctcgtgcgggaagttgcccaggtgagtccagttcctggctcggacacgcccctcttccctggtntctcacagatcctcccactggttgaattgaagagagcatgatgtgtccatccctgcggctcggacgagctggccccatcctggagaccagccttttgcttaatcacacttcctggcatcccacctacagagatgaaatccatttaggtcaattgctctcacccaggggttttgttcccaagggagcatctagagagtctggagacagttttggtcgtcacagcagaggggcagatggtatggcatccagtgggtggaggccaggggggtgggggggcaccaagcaccctgcagggcacagggcagcccccacagagcacagcgtcatccagccccaatgccagtcatgctgacattaagaaaacatggtgtaaggccagtcacggtggctcacacctgtaatcccagcactttgggaggctgaggtgggcgaatcacaaggtcaggagttcgagaccagcctggccaacataatgaaaccccatctctactaaaaatacaataaattagctgggcatggtggtgggngcctgtaatcccagctactcgggagactgaggcagaagaatcgcttgaacccagaaggcggaagttgcagtgagccgagatcgcgccactgcacagccagggcgacggtgcaagactccgtctcaaaaaaaaaagaaaacatggtgtaagttaacaatgtcctttcttaaaatgcaaataggacgggtgaggtagctcacacctgtaatcccagcacttcgggaggtcaaggtaggtggatcacctaaggtcaggagttgaagaccagcctggccaacatggcaaaaacctgtctctactaaaaatacaaaaattagccgggcgtggtggtgggcacctattatcccagctactcgggaggccaaggcaggaagatggcttgaaccctgggagcggagattgcagtgagctgagatcgtgccattgcactccagcctggcgacaagagcgagactccgtctc

SEQ ID NO: 63561 - DNA, 626 bp, Homo sapiens
aaaatacttgtagttcagttcaatacattaagcttctactatgagtcaaatattgttctaggatttagggatataaagaaaaggccaagatgtaattctcttagccaaactggagctttgaacaataaaataggagtctgtgaggcaaacagaggagggatgggaattacaggtagagggaacagcctgtgcaaaggcactgagacagtgcctgggaaactgaaataatttaatattactggagcagagtattggcatagacaaactcagagactaggcagggcctaggtcataaaggtttatgccaagtcctataaggaataaggagcctttgaagcattttaagtaagagaataacagttgtatttgcaaaaaataactttttacttcctgattataaaatcaactatattccttatagaaaatttggaaagtacagaaaggtttttaatacagacatacacccaaattgtaataaaggtaggtacatgtatgtgtgtgtatatttctatgcatttttatcaaaggaagagaacatcttcccatatcattaaatagccttcaaaagcaggttaagttccctcagaggtttaaacgtagagttaccacatgacccaggaattggt

SEQ ID NO: 63562 - DNA, 322 bp, Homo sapiens
cccctcccagaactactgttctgtggctgccaatatgaatgcctagaataagttaagaggaagatcagtacaggtggaatagcaggagatattttagtaacagtttaattattaatttttgataaaaggttctgattggtcatttctcctacgaaagtcataattacaaggacttatacttttccaaaagtacctttttaaaaggtagagacagtccaggctgttcttgaactcctgacctcgtgatccacccccctcggcctcccaaagtgttgggaaatacaggcgtgagccaccgcgcccggcgagaccctgtcttaaa

SEQ ID NO: 63563 - DNA, 841 bp, Homo sapiens
ctagcatcagtgtgatgggctgctcctggtacagttacaaagtgaacatgcttcttgctgctcacatttatccctaatctggagggcaacctggagctaggtaagaacagaacagccctttgacttcaacgcatggacaaaggacaacaaaggcacactcattctgtctcctgctaccctgtgaaaaggtgccttctgccattattgtaagcttcctgaggcctcctcagccatgtggaactaatatttaaaaaaaccatccatgggacagtctaacataacaaagggaattattcatcaagaagaggccctttagcagggtatttaaagtgcccaggtacttacaataacaagttggactgaacacattgtatctcaggaattaagaatttttcctaaaagaagtttccagattgtttgaacttctctggccgcacaatacaggaaggaagactaaagcagcaaagggacattcagcgtctgcagcatgggctggttaactaggattgtctgtcttttctggggagtattacttacagcaagagcaaactatcagaatgggaagaacaatgtgccaaggctgaaattatcctacaaaggtaaatcttatttttcttttatttggttagctttgtaataaccgcccccccccttaattccttgaactccctcccaaccccaaatcatcaaacctttagtttaacctggtaaaccgacgtgattatgtgtatctttctgagatgctttaaacgctttttgtaaaaagcatgtcttctgtttgatatatgacaacttaaatgcaaacaaagaacatttaatcacatttgctgaaaagagctgt

SEQ ID NO: 63564 - DNA, 685 bp, Homo sapiens
cacagccccagagtgtgaaagaagatagccggaaatgtccaaagcagttaagagggcgaacagattttgtctaaaaagataaggcagctaaacagagggtgagaagacatgagccaaatttacacacacaaatagtggaaataatctctgagaatccaatttgggaagaagtgagggagataatagtgctctgagtgcctagtgatgagagaacaaagaggttaacgatgcctgagagacaggatcagtaatgtttccaaggtgtcatggaagagtctgctggcaataggacagaaaatatttaaaaaaaccatccatgggacagtctaacataacaaagggaattattcatcaagaagaggccctttagcagggtatttaaagtgcccaggtacttacaataacaagttggactgaacacattgtatctcaggaattaagaatttttcctaaaagaaggtttctcaggattcatttcattgtataaagtaggaagaaaatttggcaacattaagtttaccattccatcacggttacatatgttgctattaaaaggaatggctacaatgaacaaagaaatgaaaacatattcttgaagatctatattgtatgggactgttaagagaaaataacactgaatttaaatatgcttctttttttcttatggacctttgagtagaataaa

SEQ ID NO: 63565 - DNA, 3002 bp, Homo sapiens
ctagcatcagtgtgatgggctgctcctggtacagttacaaagtgaacatgcttcttgctgctcacatttatccctaatctggagggcaacctggagctaggtaagaacagaacagccctttgacttcaacgcatggacaaaggacaacaaaggcacactcattctgtctcctgctaccctgtgaaaaggtgccttctgccattattgtaagcttcctgaggcctcctcagccatgtggaactaatatttaaaaaaaccatccatgggacagtctaacataacaaagggaattattcatcaagaagaggccctttagcagggtatttaaagtgcccaggtacttacaataacaagttggactgaacacattgtatctcaggaattaagaatttttcctaaaagaagtttccagattgtttgaacttctctggccgcacaatacaggaaggaagactaaagcagcaaagggacattcagcgtctgcagcatgggctggttaactaggattgtctgtcttttctggggagtattacttacagcaagagcaaactatcagaatgggaagaacaatgtgccaaggctgaaattatcctacaaagaaatgttggaatccaacaatgtgatcactttcaatggcttggccaacagctccagttatcataccttccttttggatgaggaacggagtaggctgtatgttggagcaaaggatcacatattttcattcgacctggttaatatcaaggattttcaaaagattgtgtggccagtatcttacaccagaagagatgaatgcaagtgggctggaaaagacatcctgaaagaatgtgctaatttcatcaaggtacttaaggcatataatcagactcacttgtacgcctgtggaacgggggcttttcatccaatttgcacctacattgaaattggacatcatcctgaggacaatatttttaagctggagaactcacattttgaaaacggccgtgggaagagtccatatgaccctaagctgctgacagcatcccttttaatagatggagaattatactctggaactgcagctgattttatggggcgagactttgctatcttccgaactcttgggcaccaccacccaatcaggacagagcagcatgattccaggtggctcaatgatccaaagttcattagtgcccacctcatctcagagagtgacaatcctgaagatgacaaagtatactttttcttccgtgaaaatgcaatagatggagaacactctggaaaagctactcacgctagaataggtcagatatgcaagaatgactttggagggcacagaagtctggtgaataaatggacaacattcctcaaagctcgtctgatttgctcagtgccaggtccaaatggcattgacactcattttgatgaactgcaggatgtattcctaatgaactttaaagatcctaaaaatccagttgtatatggagtgtttacgacttccagtaacattttcaagggatcagccgtgtgtatgtatagcatgagtgatgtgagaagggtgttccttggtccatatgcccacagggatggacccaactatcaatgggtgccttatcaaggaagagtcccctatccacggccaggaacttgtcccagcaaaacatttggtggttttgactctacaaaggaccttcctgatgatgttataacctttgcaagaagtcatccagccatgtacaatccagtgtttcctatgaacaatcgcccaatagtgatcaaaacggatgtaaattatcaatttacacaaattgtcgtagaccgagtggatgcagaagatggacagtatgatgttatgtttatcggaacagatgttgggaccgttcttaaagtagtttcaattcctaaggagacttggtatgatttagaagaggttctgctggaagaaatgacagtttttcgggaaccgactgctatttcagcaatggagctttccactaagcagcaacaactatatattggttcaacggctggggttgcccagctccctttacaccggtgtgatatttacgggaaagcgtgtgctgagtgttgcctcgcccgagacccttactgtgcttgggatggttctgcatgttctcgctattttcccactgcaaagagacgcacaagacgacaagatataagaaatggagacccactgactcactgttcagacttacaccatgataatcaccatggccacagccctgaagagagaatcatctatggtgtagagaatagtagcacatttttggaatgcagtccgaagtcgcagagagcgctggtctattggcaattccagaggcgaaatgaagagcgaaaagaagagatcagagtggatgatcatatcatcaggacagatcaaggccttctgctacgtagtctacaacagaaggattcaggcaattacctctgccatgcggtggaacatgggttcatacaaactcttcttaaggtaaccctggaagtcattgacacagagcatttggaagaacttcttcataaagatgatgatggagatggctctaagaccaaagaaatgtccaatagcatgacacctagccagaaggtctggtacagagacttcatgcagctcatcaaccaccccaatctcaacacgatggatgagttctgtgaacaagtttggaaaagggaccgaaaacaacgtcggcaaaggccaggacataccccagggaacagtaacaaatggaagcacttacaagaaaataagaaaggtagaaacaggaggacccacgaatttgagagggcacccaggagtgtctgagctgcattacctctagaaacctcaaacaagtagaaacttgcctagacaataactggaaaaacaaatgcaatatacatgaacttttttcatggcattatgtggatgtttacaatggtgggaaattcagctgagttccaccaattataaattaaatccatgagtaactttcctaataggcttttttttcctaataccaccg

SEQ ID NO: 63566 - DNA, 540 bp, Homo sapiens
gcacagttgtcaaaacccatagaatatacagcaccagcagtgagtcctaatgtaacctacggacttgggtgataatgacgtgtgaagagacaaggcgggttcatccgttgtaacaaacagccaccctggtagtagggagggcaggaggtatgtagagaactctgtgctttccacgcgattttgctgtgaactaaacagctctaaaaaataaagttcattaattaaaaaaaaaaaaaaaaaaaagggaaatgaccacatgcaaagcactgcgtggagggccacgcatcccaagcaagtcagctagagtagaggcaggaaccaaacagctctatgaggttctggatgagaagccgcatgcaccaccccctccctgctcccgtgtgggacccagtgaagacctcctgtgcccggctgcagctgctgagtgtgggagtgtgctctccacagcaaaccagccgtgaaggctgcacaccttcctgtttctgcccagccacaccacagggcactcagcccttttcctgagcacttgaagctgcgttt

SEQ ID NO: 63567 - DNA, 476 bp, Homo sapiens
tgtgggaaccaggatggaagagtcaggcctccagatagcgtttacttctcctttcttccttgaatcactgtctcagagataattaggttcagaagaggaggaaaaaaaagatgacgtcaacatggagcagagtttttcttagaccttagcctagcaaggaaagagaaatgcctggtctcagtgctgggaagctgtttcagccagagccccgtggctgtgaagagagctctcctgtctggagccaaacagaaagctcataggtcttgaggccagaaaagttagtaggtggcggctctggtcggtgctggaaatggaggccaggatgaactaagaagcaaactaaagatacttgtaatataaggacgtgtaggctgggtgcggtggctcacgcctgtaatcccagcacttcgggaggccaaggcgggcggatcacgaggtcaggagatcgagaccatcctggctaacacggtgaaacc

SEQ ID NO: 63568 - DNA, 1863 bp, Homo sapiens
  misc_feature (251)..(252): n is a, c, g, or t
gttccatcctctgccatctactccactgttcagacacctcctaacctccgtcatgacctgtggcttcaactccataggctgtgggttccgccctggaaacttcagctgtgtctctgcctgcgggccccggccaagccgctgctgcatcaccgccgccccctaccgcggcatctcctgctaccgcggcctcaccgggggctttggcagccacagcgtgtgcgggggcttccgcgccggctcctgcggacgcnncttcggctaccgctccgggggcgtgtgcggacccagccccccatgcatcaccaccgtgtcggtcaacgagagcctcctcacgcccctcaacctggagatagaccccaacgcgcagtgcgtgaagcaggaggagaaggagcagatcaagtccctcaacagcagattcgcggccttcatcgacaaggtgcgcttcctggagcagcagaacaagctgctggagacaaagctgcagttctaccaaaactgcgagtgctgccagagtaacctggagcccctgtttgctggctacatcgagactctgcggcgggaggccgagtgcgtggaggctgacagtgggaggctggcctcagagctcaaccacgtgcaggaggtgctggagggctacaagaagaagtatgaagaagaagtagcacttcgagccacagcagagaacgagtttgtggctctaaagaaggatgtggactgtgcctacctccgcaagtcagacctggaggccaacgtggaggccctgatccaggagattgacttcctgaggcggctgtacgaggaggagatccgcattctccaatcccacatctcagacacctccgtggttgtcaagctggacaacagccgggacctgaacatggactgcatcgttgccgagatcaaggcacagtatgatgacattgccacccgtagccgggctgaggccgagtcctggtatcgcagcaagtgtgaggagatgaaggccacagtgatcaggcacggggagaccctgcgccgcaccaaggaggagatcaacgagctgaaccgcatgatccagaggctgacagccgaggtggagaatgccaagtgccagaactccaagctggaagctgcggtggcccagtctgagcagcagggtgaggcggccctcagtgatgcccgctgcaagctggccgagctggagggcgccctgcagaaggccaagcaagacatggcctgcctgatcagggagtaccaggaggtgatgaactccaagctaggcctggatatcgagatcgccacctacaggcgcctgctggagggcgaggagcagaggctgtgtgaaggtgttgaagctgtgaatgtctgtgtcagcagctcccggggtggggttgtgtgcggggacctctgcgtgtcgggctcccggccggtgacgggcagcgtctgcagtgccccctgcaacgggaacctggtggtgagcactggtttgtgcaagccctgtggccagctgaacaccacctgtggagggggctcctgcggccaggggaggtattaagtggcccaaaagagagccaggggagccccttctgcctgccagacgtgccactgccccaccaccagctgaaaacagcagcacatcgctggcttttccccttgtgttctgagaatacaccatcggctcattcccaccagtggctcctccccacctttcatcccactggaaaggggtctgtggctggggaatagacccattccttcccctgtctcagccttcagcccctcccggggagaagggccttgcttccctggaagaagcactgtgagactgttccccctgcctctctggcctcttgtctccccttttccaataaacttgggacctgc

SEQ ID NO: 63569 - DNA, 293 bp, Homo sapiens
gtttgtagttttggtaaatagaatcatgtaaaaggcatcatggggaacttgttatttccataaccctgtaataatttgttctagtaatccttcgctaatgtaggcacgtgccttctgctttactggtgtgtttgtatgctcttaaagttagacactgtaatttaaaatgctttttgaaaattaaaccaagatcttttagaattgtgcctagttattgcctagttagagtattttattatttctgttactcatcagtaaagtaagatgattggctaatcgtcctgggttctttc

SEQ ID NO: 63570 - DNA, 169 bp, Homo sapiens
  misc_feature (1)..(1): n is a, c, g, or t
  misc_feature (67)..(67): n is a, c, g, or t
nagcagcagattcagtgtctggagagggcttgcttcccggtttgcagatggacatcttattattatntcctcacatccaaaaagtaagctctgttatgtctttttataaggcactaatcccatccatgaggattctatcctaatgacctaatcacctcccaagggcccc

SEQ ID NO: 63571 - DNA, 360 bp, Homo sapiens
atcaaaagcttgagcacaaacagatacctcagcccggagtttctgttcctgttcttgaagagacagactggtgagcatgcaaaattacaggaaatgcagagaacaaaatgggcagagcaaccaaaactgtggtgtttgcatcaaatacaggtcaagagtaaacttattttcctatgaaattcaagaacatgttgaaactggaaagagcgggacaggctggtagcaccttttaaagaccaagagaggccgcctcattaaatattaagaacttggaggaaagaggtggatttacactgataaaaggttcatttaaaattccatgaggtcaataaattaccacttaagatgccatttcccaaa

SEQ ID NO: 63572 - DNA, 286 bp, Homo sapiens
attaaggtaaaggaagactttccattgttaagtagaaagagtgtcctgctattactaccattcacatctagtttgtgtgaactagggttttctatcttaaccctgttaaaaacaaaggaaagaaatgggctgaatggtgcaccagctatgcgggtagcattatcttcctgtgttccagactggaatgaatttatgaacaaggcaagcacaccattattgtaaataaaatcttacctagtttttgtttttgtatttcttactttgtagtatttttctgtgttatatt

SEQ ID NO: 63573 - DNA, 526 bp, Homo sapiens
ctggtcccctctatgaattgatagtgatttccagcattagcctatgagcgctatgcaacatagtatgttttctttatttgtccagattaaaagatagcttaaattatttttatgctcaaattgcagtagcgtcttctaacctaggatttttattatattctcccattcctagtaattataataatgctaacactagctaccactgattgaacatctactatgtgttagccatgtgattagtcttacctattctttacgaactctctgatataattagaaaataatcattcagttgctccataaccagtagtcttaaaatggagaaaaataaatgtagattcgcattcctataatgaataatttaaatgtgaaggaagtaagataacaagaaaagaaagacatttaaaggtaaaattacagcatatgaggaaagggtatggaatgggagaaacagaaacatgggagaaagaggtaagggagacctaggggaagaaagacaaaggaaaagagtttaaagtttggaggt

SEQ ID NO: 63574 - DNA, 3324 bp, Homo sapiens
cgcggggcgctctcgccagtcccgcgggccgtgcgcggtgctgtgccgcgccctgccagacacaggtgcgcccgcctagcccgaactccgcggcggcggctgccctctcgccgcgcctccgcctccttcgcagccgccgcctcctccgcgccgcgctccgcccggatggccagggctgtgcccgagaatggcggagcgagaaagcggcggcctgggagggggggccgcgtccccgcccgccgcctccccgttcctggggctgcacatcgcttcgcctcccaatttcaggctcacccatgacatcagcctggaggagtttgaggatgaagacctctcggagatcactgatgagtgtggcatcagcttacagtgcaaagacaccctgtccttacggcccccgcgcgccgggctgctctctgcgggcggcggcggcgcggggagccggttgcaggccgagatgctgcagatggacctgatcgacgcgacgggggacactcccggggccgaggacgacgaggaggacgacgacgaggagcgcgcggcccggcggccgggagcggggccgcccaaggccgagtccggccaggagccggcgtcccgcggccagggccagagccaaggccagagccagggcccgggcagcggggacacgtaccggcccaagcggcccaccacgctcaacctctttccgcaggtgccgcggtctcaggacacactgaataataattctctgggcaaaaagcacagttggcaggatcgggtgtctcgatcatcctcacccctgaagacaggggagcagacaccaccgcatgaacacatctgcctgagcgatgagctgcccccccagagcggccccgcccccaccacagatcgaggcacctccaccgacagcccttgccgccgcagcacagccacccagatggcacctccgggtggtccccctgctgccccgcctgggggtcggggccactcgcatcgagaccgaatccactaccaggccgatgtgcgactagaggccactgaggagatctacctgaccccagtgcagaggcccccagacgctgcagagcccacctccgccttcctgccgcccactgagagccggatgtcagtcagctccgatccagaccctgccgcctacccctccacggcagggcggccgcacccctccatcagtgaagaggaagagggcttcgactgcctgtcgtccccagagcgggctgagcccccaggcggagggtggcgggggagcctgggggagccgccgccacctccacgggcctctctgagctcggacaccagcgccctgtcctatgactctgtcaagtacacgctggtggtagatgagcatgcacagctggagctggtgagcctgcggccgtgcttcggagactacagtgacgagagtgactctgccaccgtctatgacaactgtgcctccgtctcctcgccctatgagtcggccatcggagaggaatatgaggaggccccgcggccccagccccctgcctgcctctccgaggactccacgcctgatgaacccgacgtccatttctccaagaaattcctgaacgtcttcatgagtggccgctcccgctcctccagtgctgagtccttcgggctgttctcctgcatcatcaacggggaggagcaggagcagacccaccgggccatattcaggtttgtgcctcgacacgaagacgaacttgagctggaagtggatgaccctctgctagtggagctccaggctgaagactactggtacgaggcctacaacatgcgcactggtgcccggggtgtctttcctgcctattacgccatcgaggtcaccaaggagcccgagcacatggcagccctggccaaaaacagtgactgggtggaccagttccgggtgaagttcctgggctcagtccaggttccctatcacaagggcaatgacgtcctctgtgctgctatgcaaaagattgccaccacccgccggctcaccgtgcactttaacccgccctccagctgtgtcctggagatcagcgtgcggggtgtgaagataggcgtcaaggccgatgactcccaggaggccaaggggaataaatgtagccactttttccagttaaaaaacatctctttctgcggatatcatccaaagaacaacaagtactttgggttcatcaccaagcaccccgccgaccaccggtttgcctgccacgtctttgtgtctgaagactccaccaaagccctggcagagtccgtggggagagcattccagcagttctacaagcagtttgtggagtacacctgccccacagaagatatctacctggagtagctgtgcagccccgccctctgcgtcccccagccctcaggccagtgccaggacagctggctgctgacaggatgtggcactgcttgaggaggggcacctgccaccgccagaggacaaggaagtgggggccgctggcccagggtaggggagggtggggcaatggggagaggcaaatgcagtttattgtaatatatgggattagattcatctatggagggcagagtgggctgcctggggattgggagggacagggcttggggagcaggtctctggcagagaaggatgtccgttccaggagcacacggccctgccccatcctgggccttacctcccctgccagggctcgggcgctgtggctcctgccttgatgaagcccgtgtcctgccttgatgaagcctgtgccacctgcaagtgcccgccctgcccctgccccaacccccaccgaagagccctgagctcaggctgagcccagccacctcccaaggactttccagtgaggaaatggcaacacgtggaggtgaagtccctgttctcagctccgtcatctgcggggcttctgggtggctcctgccactgacctcaccggcatgctggcctgtggcaggcctaggacctcaggcggggaggaggagctgccgcaaggccctgtcccagcagaagagggaggcttcctgactgacacaggccagccccatcttggtcctgtcaccctggccccaactattaaagtgccatttcctcggcacgaggtgttttagttcttgggggaggccaccccaaaccccagccccaactccaggggcacctatgagatggccatgctcaacccccctcccagacaggccctccctgtctccagggcccccaccgaggttcccagggctggagacttcctctggtaaacattcctccagcctcccctcccctggggacgccaaggaggtgggccacacccaggaagggaaagcgggcagccccgttttggggacgtgaacgttttaata

SEQ ID NO: 63575 - DNA, 2999 bp, Homo sapiens
cgcggggcgctctcgccagtcccgcgggccgtgcgcggtgctgtgccgcgccctgccagacacaggtgcgcccgcctagcccgaactccgcggcggcggctgccctctcgccgcgcctccgcctccttcgcagccgccgcctcctccgcgccgcgctccgcccggatggccagggctgtgcccgagaatggcggagcgagaaagcggcggcctgggagggggggccgcgtccccgcccgccgcctccccgttcctggggctgcacatcgcttcgcctcccaatttcaggctcacccatgacatcagcctggaggagtttgaggatgaagacctctcggagatcactgatgagtgtggcatcagcttacagtgcaaagacaccctgtccttacggcccccgcgcgccgggctgctctctgcgggcggcggcggcgcggggagccggttgcaggccgagatgctgcagatggacctgatcgacgcgacgggggacactcccggggccgaggacgacgaggaggacgacgacgaggagcgcgcggcccggcggccgggagcggggccgcccaaggccgagtccggccaggagccggcgtcccgcggccagggccagagccaaggccagagccagggcccgggcagcggggacacgtaccggcccaagcggcccaccacgctcaacctctttccgcaggtgccgcggtctcaggacacactgaataataattctctgggcaaaaagcacagttggcaggatcgggtgtctcgatcatcctcacccctgaagacaggggagcagacaccaccgcatgaacacatctgcctgagcgatgagctgcccccccagagcggccccgcccccaccacagatcgaggcacctccaccgacagcccttgccgccgcagcacagccacccagatggcacctccgggtggtccccctgctgccccgcctgggggtcggggccactcgcatcgagaccgaatccactaccaggccgatgtgcgactagaggccactgaggagatctacctgaccccagtgcagaggcccccagacgctgcagagcccacctccgccttcctgccgcccactgagagccggatgtcagtcagctccgatccagaccctgccgcctacccctccacggcagggcggccgcacccctccatcagtgaagaggaagagggcttcgactgcctgtcgtccccagagcgggctgagcccccaggcggagggtggcgggggagcctgggggagccgccgccacctccacgggcctctctgagctcggacaccagcgccctgtcctatgactctgtcaagtacacgctggtggtagatgagcatgcacagctggagctggtgagcctgcggccgtgcttcggagactacagtgacgagagtgactctgccaccgtctatgacaactgtgcctccgtctcctcgccctatgagtcggccatcggagaggaatatgaggaggccccgcggccccagccccctgcctgcctctccgaggactccacgcctgatgaacccgacgtccatttctccaagaaattcctgaacgtcttcatgagtggccgctcccgctcctccagtgctgagtccttcgggctgttctcctgcatcatcaacggggaggagcaggagcagacccaccgggccatattcaggtttgtgcctcgacacgaagacgaacttgagctggaagtggatgaccctctgctagtggagctccaggctgaagactactggtacgaggcctacaacatgcgcactggtgcccggggtgtctttcctgcctattacgccatcgaggtcaccaaggagcccgagcacatggcagccctggccaaaaacagtgactgggtggaccagttccgggtgaagttcctgggctcagtccaggttccctatcacaagggcaatgacgtcctctgtgctgctatgcaaaagattgccaccacccgccggctcaccgtgcactttaacccgccctccagctgtgtcctggagatcagcgtgcggggtgtgaagataggcgtcaaggccgatgactcccaggaggccaaggggaataaatgtagccactttttccagttaaaaaacatctctttctgcggatatcatccaaagaacaacaagtactttgggttcatcaccaagcaccccgccgaccaccggtttgcctgccacgtctttgtgtctgaagactccaccaaagccctggcagagtccgtggggagagcattccagcagttctacaagcagtttgtggagtacacctgccccacagaagatatctacctggagtagctgtgcagccccgccctctgcgtcccccagccctcaggccagtgccaggacagctggctgctgacaggatgtggcactgcttgaggaggggcacctgccaccgccagaggacaaggaagtgggggccgctggcccagggtaggggagggtggggcaatggggagaggcaaatgcagtttattgtaatatatgggattagattcatctatggagggcagagtgggctgcctggggattgggagggacagggcttggggagcaggtctctggcagagaaggatgtccgttccaggagcacacggccctgccccatcctgggccttacctcccctgccagggctcgggcgctgtggctcctgccttgatgaagcccgtgtcctgccttgatgaagcctgtgccacctgcaaccacctcccaaggactttccagtgaggaaatggcaacacgtggaggtgaagtccctgttctcagctccgtcatctgcggggcttctgggtggctcctgccactgacctcaccggcatgctggcctgtggcaggcctaggacctcaggcggggaggaggagctgccgcaaggccctgtcccagcagaagagggaggcttcctgactgacacaggccagccccatcttggtcctgtcaccctggccccaactattaaagtgccatttcct

SEQ ID NO: 63576 - DNA, 3102 bp, Homo sapiens
ggaaggtgcctgcagctgagggctgcgctgggaagagctggggctgggacccgggtcggcagctgcagcctcctctcctggcctgtctatttttaatgagctccccaggcttctgcagcaggcaggacgcagaaagacaggcccaagcggtggaggccagaggcccccagccctgccttgagccctggcccccccacccttccgggcatgagagggcagccctggggccccgcagccccccggccgggcagggctctccatgcagctggtgctgaagatggattcgagcccagacaatgacagctggttggaggatcaatgggagcgctggctcacccatgacatcagcctggaggagtttgaggatgaagacctctcggagatcactgatgagtgtggcatcagcttacagtgcaaagacaccctgtccttacggcccccgcgcgccgggctgctctctgcgggcggcggcggcgcggggagccggttgcaggccgagatgctgcagatggacctgatcgacgcgacgggggacactcccggggccgaggacgacgaggaggacgacgacgaggagcgcgcggcccggcggccgggagcggggccgcccaaggccgagtccggccaggagccggcgtcccgcggccagggccagagccaaggccagagccagggcccgggcagcggggacacgtaccggcccaagcggcccaccacgctcaacctctttccgcaggtgccgcggtctcaggacacactgaataataattctctgggcaaaaagcacagttggcaggatcgggtgtctcgatcatcctcacccctgaagacaggggagcagacaccaccgcatgaacacatctgcctgagcgatgagctgcccccccagagcggccccgcccccaccacagatcgaggcacctccaccgacagcccttgccgccgcagcacagccacccagatggcacctccgggtggtccccctgctgccccgcctgggggtcggggccactcgcatcgagaccgaatccactaccaggccgatgtgcgactagaggccactgaggagatctacctgaccccagtgcagaggcccccagacgctgcagagcccacctccgccttcctgccgcccactgagagccggatgtcagtcagctccgatccagaccctgccgcctacccctccacggcagggcggccgcacccctccatcagtgaagaggaagagggcttcgactgcctgtcgtccccagagcgggctgagcccccaggcggagggtggcgggggagcctgggggagccgccgccacctccacgggcctctctgagctcggacaccagcgccctgtcctatgactctgtcaagtacacgctggtggtagatgagcatgcacagctggagctggtgagcctgcggccgtgcttcggagactacagtgacgagagtgactctgccaccgtctatgacaactgtgcctccgtctcctcgccctatgagtcggccatcggagaggaatatgaggaggccccgcggccccagccccctgcctgcctctccgaggactccacgcctgatgaacccgacgtccatttctccaagaaattcctgaacgtcttcatgagtggccgctcccgctcctccagtgctgagtccttcgggctgttctcctgcatcatcaacggggaggagcaggagcagacccaccgggccatattcaggtttgtgcctcgacacgaagacgaacttgagctggaagtggatgaccctctgctagtggagctccaggctgaagactactggtacgaggcctacaacatgcgcactggtgcccggggtgtctttcctgcctattacgccatcgaggtcaccaaggagcccgagcacatggcagccctggccaaaaacagtgactgggtggaccagttccgggtgaagttcctgggctcagtccaggttccctatcacaagggcaatgacgtcctctgtgctgctatgcaaaagattgccaccacccgccggctcaccgtgcactttaacccgccctccagctgtgtcctggagatcagcgtgcggggtgtgaagataggcgtcaaggccgatgactcccaggaggccaaggggaataaatgtagccactttttccagttaaaaaacatctctttctgcggatatcatccaaagaacaacaagtactttgggttcatcaccaagcaccccgccgaccaccggtttgcctgccacgtctttgtgtctgaagactccaccaaagccctggcagagtccgtggggagagcattccagcagttctacaagcagtttgtggagtacacctgccccacagaagatatctacctggagtagctgtgcagccccgccctctgcgtcccccagccctcaggccagtgccaggacagctggctgctgacaggatgtggcactgcttgaggaggggcacctgccaccgccagaggacaaggaagtgggggccgctggcccagggtaggggagggtggggcaatggggagaggcaaatgcagtttattgtaatatatgggattagattcatctatggagggcagagtgggctgcctggggattgggagggacagggcttggggagcaggtctctggcagagaaggatgtccgttccaggagcacacggccctgccccatcctgggccttacctcccctgccagggctcgggcgctgtggctcctgccttgatgaagcccgtgtcctgccttgatgaagcctgtgccacctgcaagtgcccgccctgcccctgccccaacccccaccgaagagccctgagctcaggctgagcccagccacctcccaaggactttccagtgaggaaatggcaacacgtggaggtgaagtccctgttctcagctccgtcatctgcggggcttctgggtggctcctgccactgacctcaccggcatgctggcctgtggcaggcctaggacctcaggcggggaggaggagctgccgcaaggccctgtcccagcagaagagggaggcttcctgactgacacaggccagccccatcttggtcctgtcaccctggccccaactattaaagtgccatttcct

SEQ ID NO: 63577 - DNA, 2149 bp, Homo sapiens
gctgcagatgaacccgacgtccatttctccaagaaattcctgaacccgacgtccatttctccaagaaattccgaatccactaccaggccgatgtgcgactagaggccactgaggagatctacctgaccccagtgcagaggcccccagacgctgcagagcccacctccgccttcctgccgcccactgagagccggatgtcagtcagctccgatccagaccctgccgcctacccctccacggcagggcggccgcacccctccatcagtgaagaggaagagggcttcgactgcctgtcgtccccagagcgggctgagcccccaggcggagggtggcgggggagcctgggggagccgccgccacctccacgggcctctctgagctcggacaccagcgccctgtcctatgactctgtcaagtacacgctggtggtagatgagcatgcacagctggagctggtgagcctgcggccgtgcttcggagactacagtgacgagagtgactctgccaccgtctatgacaactgtgcctccgtctcctcgccctatgagtcggccatcggagaggaatatgaggaggccccgcggccccagccccctgcctgcctctccgaggactccacgcctgatgaacccgacgtccatttctccaagaaattcctgaacgtcttcatgagtggccgctcccgctcctccagtgctgagtccttcgggctgttctcctgcatcatcaacggggaggagcaggagcagacccaccgggccatattcaggtttgtgcctcgacacgaagacgaacttgagctggaagtggatgaccctctgctagtggagctccaggctgaagactactggtacgaggcctacaacatgcgcactggtgcccggggtgtctttcctgcctattacgccatcgaggtcaccaaggagcccgagcacatggcagccctggccaaaaacagtgactgggtggaccagttccgggtgaagttcctgggctcagtccaggttccctatcacaagggcaatgacgtcctctgtgctgctatgcaaaagattgccaccacccgccggctcaccgtgcactttaacccgccctccagctgtgtcctggagatcagcgtgcggggtgtgaagataggcgtcaaggccgatgactcccaggaggccaaggggaataaatgtagccactttttccagttaaaaaacatctctttctgcggatatcatccaaagaacaacaagtactttgggttcatcaccaagcaccccgccgaccaccggtttgcctgccacgtctttgtgtctgaagactccaccaaagccctggcagagtccgtggggagagcattccagcagttctacaagcagtttgtggagtacacctgccccacagaagatatctacctggagtagctgtgcagccccgccctctgcgtcccccagccctcaggccagtgccaggacagctggctgctgacaggatgtggcactgcttgaggaggggcacctgccaccgccagaggacaaggaagtgggggccgctggcccagggtaggggagggtggggcaatggggagaggcaaatgcagtttattgtaatatatgggattagattcatctatggagggcagagtgggctgcctggggattgggagggacagggcttggggagcaggtctctggcagagaaggatgtccgttccaggagcacacggccctgccccatcctgggccttacctcccctgccagggctcgggcgctgtggctcctgccttgatgaagcccgtgtcctgccttgatgaagcctgtgccacctgcaagtgcccgccctgcccctgccccaacccccaccgaagagccctgagctcaggctgagcccagccacctcccaaggactttccagtgaggaaatggcaacacgtggaggtgaagtccctgttctcagctccgtcatctgcggggcttctgggtggctcctgccactgacctcaccggcatgctggcctgtggcaggcctaggacctcaggcggggaggaggagctgccgcaaggccctgtcccagcagaagagggaggcttcctgactgacacaggccagccccatcttggtcctgtcaccctggccccaactattaaagtgccatttcct

SEQ ID NO: 63578 - DNA, 1518 bp, Homo sapiens
gcctggtggcgaattcggcacgaggggacaaggaagtggggcaatggggagaggcaaatccagtgctgagtccttcgggctgttctcctgcatcatcaacggggaggagcaggagcagacccaccgggccatattcaggtttgtgcctcgacacgaagacgaacttgagctggaagtggatgaccctctgctagtggagctccaggctgaagactactggtacgaggcctacaacatgcgcactggtgcccggggtgtctttcctgcctattacgccatcgaggtcaccaaggagcccgagcacatggcagccctggccaaaaacagtgactgggtggaccagttccgggtgaagttcctgggctcagtccaggttccctatcacaagggcaatgacgtcctctgtgctgctatgcaaaagattgccaccacccgccggctcaccgtgcactttaacccgccctccagctgtgtcctggagatcagcgtgcggggtgtgaagataggcgtcaaggccgatgactcccaggaggccaaggggaataaatgtagccactttttccagttaaaaaacatctctttctgcggatatcatccaaagaacaacaagtactttgggttcatcaccaagcaccccgccgaccaccggtttgcctgccacgtctttgtgtctgaagactccaccaaagccctggcagagtccgtggggagagcattccagcagttctacaagcagtttgtggagtacacctgccccacagaagatatctacctggagtagctgtgcagccccgccctctgcgtcccccagccctcaggccagtgccaggacagctggctgctgacaggatgtggcactgcttgaggaggggcacctgccaccgccagaggacaaggaagtgggggccgctggcccagggtaggggagggtggggcaatggggagaggcaaatgcagtttattgtaatatatgggattagattcatctatggagggcagagtgggctgcctggggattgggagggacagggcttggggagcaggtctctggcagagaaggatgtccgttccaggagcacacggccctgccccatcctgggccttacctcccctgccagggctcgggcgctgtggctcctgccttgatgaagcccgtgtcctgccttgatgaagcctgtgccacctgcaagtgcccgccctgcccctgccccaacccccaccgaagagccctgagctcaggctgagcccagccacctcccaaggactttccagtgaggaaatggcaacacgtggaggtgaagtccctgttctcagctccgtcatctgcggggcttctgggtggctcctgccactgacctcaccggcatgctggcctgtggcaggcctaggacctcaggcggggaggaggagctgccgcaaggccctgtcccagcagaagagggaggcttcctgactgacacaggccagccccatcttggtcctgtcaccctggccccaactattaaagtgccatttcct

SEQ ID NO: 63579 - DNA, 112 bp, Homo sapiens
tgctcagctccctcctgctctttctgcccctcctcaattcacgcttgctttccagccctggccaaaaacagtgactgggtggaccagttccgggtgaagttcctgggctcag

SEQ ID NO: 63580 - DNA, 300 bp, Homo sapiens
gctggccgtcagaggcacggctggatcggggaggcggcggcctcgcgcttcctcgcggcggacgggcgagagcgccccagtctccggcggcccctgctcggctcccctcgtgcccccttcgcgccacagaatggactcgcccgggcggggggcggtgcaagcggcctcggccccgccccggccccgccccctgacgcccctccgtgcgctgtgcagcccccgcgcgccgggctgctctctgcgggcggcggcggcgcggggagccggttgcaggccgagatgctgcagatggacctgatc

SEQ ID NO: 63581 - DNA, 3060 bp, Homo sapiens
cgcggggcgctctcgccagtcccgcgggccgtgcgcggtgctgtgccgcgccctgccagacacaggtgcgcccgcctagcccgaactccgcggcggcggctgccctctcgccgcgcctccgcctccttcgcagccgccgcctcctccgcgccgcgctccgcccggatggccagggctgtgcccgagaatggcggagcgagaaagcggcggcctgggagggggggccgcgtccccgcccgccgcctccccgttcctggggctgcacatcgcttcgcctcccaatttcaggctcacccatgacatcagcctggaggagtttgaggatgaagacctctcggagatcactgatgagtgtggcatcagcttacagtgcaaagacaccctgtccttacggcccccgcgcgccgggctgctctctgcgggcggcggcggcgcggggagccggttgcaggccgagatgctgcagatggacctgatcgacgcgacgggggacactcccggggccgaggacgacgaggaggacgacgacgaggagcgcgcggcccggcggccgggagcggggccgcccaaggccgagtccggccaggagccggcgtcccgcggccagggccagagccaaggccagagccagggcccgggcagcggggacacgtaccggcccaagcggcccaccacgctcaacctctttccgcaggtgccgcggtctcaggacacactgaataataattctctgggcaaaaagcacagttggcaggatcgggtgtctcgatcatcctcacccctgaagacaggggagcagacaccaccgcatgaacacatctgcctgagcgatgagctgcccccccagagcggccccgcccccaccacagatcgaggcacctccaccgacagcccttgccgccgcagcacagccacccagatggcacctccgggtggtccccctgctgccccgcctgggggtcggggccactcgcatcgagaccgaatccactaccaggccgatgtgcgactagaggccactgaggagatctacctgaccccagtgcagaggcccccagacgctgcagagcccacctccgccttcctgccgcccactgagagccggatgtcagtcagctccgatccagaccctgccgcctacccctccacggcagggcggccgcacccctccatcagtgaagaggaagagggcttcgactgcctgtcgtccccagagcgggctgagcccccaggcggagggtggcgggggagcctgggggagccgccgccacctccacgggcctctctgagctcggacaccagcgccctgtcctatgactctgtcaagtacacgctggtggtagatgagcatgcacagctggagctggtgagcctgcggccgtgcttcggagactacagtgacgagagtgactctgccaccgtctatgacaactgtgcctccgtctcctcgccctatgagtcggccatcggagaggaatatgaggaggccccgcggccccagccccctgcctgcctctccgaggactccacgcctgatgaacccgacgtccatttctccaagaaattcctgaacgtcttcatgagtggccgctcccgctcctccagtgctgagtccttcgggctgttctcctgcatcatcaacggggaggagcaggagcagacccaccgggccatattcaggtttgtgcctcgacacgaagacgaacttgagctggaagtggatgaccctctgctagtggagctccaggctgaagactactggtacgaggcctacaacatgcgcactggtgcccggggtgtctttcctgcctattacgccatcgaggtcaccaaggagcccgagcacatggcagccctggccaaaaacagtgactgggtggaccagttccgggtgaagttcctgggctcagtccaggttccctatcacaagggcaatgacgtcctctgtgctgctatgcaaaagattgccaccacccgccggctcaccgtgcactttaacccgccctccagctgtgtcctggagatcagcgtgcggggtgtgaagataggcgtcaaggccgatgactcccaggaggccaaggggaataaatgtagccactttttccagttaaaaaacatctctttctgcggatatcatccaaagaacaacaagtactttgggttcatcaccaagcaccccgccgaccaccggtttgcctgccacgtctttgtgtctgaagactccaccaaagccctggcagagtccgtggggagagcattccagcagttctacaagcagtttgtggagtacacctgccccacagaagatatctacctggagtagctgtgcagccccgccctctgcgtcccccagccctcaggccagtgccaggacagctggctgctgacaggatgtggcactgcttgaggaggggcacctgccaccgccagaggacaaggaagtgggggccgctggcccagggtaggggagggtggggcaatggggagaggcaaatgcagtttattgtaatatatgggattagattcatctatggagggcagagtgggctgcctggggattgggagggacagggcttggggagcaggtctctggcagagaaggatgtccgttccaggagcacacggccctgccccatcctgggccttacctcccctgccagggctcgggcgctgtggctcctgccttgatgaagcccgtgtcctgccttgatgaagcctgtgccacctgcaagtgcccgccctgcccctgccccaacccccaccgaagagccctgagctcaggctgagcccagccacctcccaaggactttccagtgaggaaatggcaacacgtggaggtgaagtccctgttctcagctccgtcatctgcggggcttctgggtggctcctgccactgacctcaccggcatgctggcctgtggcaggcctaggacctcaggcggggaggaggagctgccgcaaggccctgtcccagcagaagagggaggcttcctgactgacacaggccagccccatcttggtcctgtcaccctggccccaactattaaagtgccatttcct

SEQ ID NO: 63582 - DNA, 2957 bp, Homo sapiens
cgcggggcgctctcgccagtcccgcgggccgtgcgcggtgctgtgccgcgccctgccagacacaggtgcgcccgcctagcccgaactccgcggcggcggctgccctctcgccgcgcctccgcctccttcgcagccgccgcctcctccgcgccgcgctccgcccggatggccagggctgtgcccgagaatggcggagcgagaaagcggcggcctgggagggggggccgcgtccccgcccgccgcctccccgttcctggggctgcacatcgcttcgcctcccaatttcaggctcacccatgacatcagcctggaggagtttgaggatgaagacctctcggagatcactgatgagtgtggcatcagcttacagtgcaaagacaccctgtccttacggcccccgcgcgccgggctgctctctgcgggcggcggcggcgcggggagccggttgcaggccgagatgctgcagatggacctgatcgacgcgacgggggacactcccggggccgaggacgacgaggaggacgacgacgaggagcgcgcggcccggcggccgggagcggggccgcccaaggccgagtccggccaggagccggcgtcccgcggccagggccagagccaaggccagagccagggcccgggcagcggggacacgtaccggcccaagcggcccaccacgctcaacctctttccgcaggtgccgcggtctcaggacacactgaataataattctctgggcaaaaagcacagttggcaggatcgggtgtctcgatcatcctcacccctgaagacaggggagcagacaccaccgcatgaacacatctgcctgagcgatgagctgcccccccagagcggccccgcccccaccacagatcgaggcacctccaccgacagcccttgccgccgcagcacagccacccagatggcacctccgggtggtccccctgctgccccgcctgggggtcggggccactcgcatcgagaccgaatccactaccaggccgatgtgcgactagaggccactgaggagatctacctgaccccagtgcagaggcccccagacgctgcagagcccacctccgccttcctgccgcccactgagagccggatgtcagtcagctccgatccagaccctgccgcctacccctccacggcagggcggccgcacccctccatcagtgaagaggaagagggcttcgactgcctgtcgtccccagagcgggctgagcccccaggcggagggtggcgggggagcctgggggagccgccgccacctccacgggcctctctgagctcggacaccagcgccctgtcctatgactctgtcaagtacacgctggtggtagatgagcatgcacagctggagctggtgagcctgcggccgtgcttcggagactacagtgacgagagtgactctgccaccgtctatgacaactgtgcctccgtctcctcgccctatgagtcggccatcggagaggaatatgaggaggccccgcggccccagccccctgcctgcctctccgaggactccacgcctgatgaacccgacgtccatttctccaagaaattcctgaacgtcttcatgagtggccgctcccgctcctccagtgctgagtccttcgggctgttctcctgcatcatcaacggggaggagcaggagcagacccaccgggccatattcaggtttgtgcctcgacacgaagacgaacttgagctggaagtggatgaccctctgctagtggagctccaggctgaagactactggtacgaggcctacaacatgcgcactggtgcccggggtgtctttcctgcctattacgccatcgaggtcaccaaggagcccgagcacatggcagccctggccaaaaacagtgactgggtggaccagttccgggtgaagttcctgggctcagtccaggttccctatcacaagggcaatgacgtcctctgtgctgctatgcaaaagattgccaccacccgccggctcaccgtgcactttaacccgccctccagctgtgtcctggagatcagcgtgcggggtgtgaagataggcgtcaaggccgatgactcccaggaggccaaggggaataaatgtagccactttttccagttaaaaaacatctctttctgcggatatcatccaaagaacaacaagtactttgggttcatcaccaagcaccccgccgaccaccggtttgcctgccacgtctttgtgtctgaagactccaccaaagccctggcagagtccgtggggagagcattccagcagttctacaagcagtttgtggagtacacctgccccacagaagatatctacctggagtagctgtgcagccccgccctctgcgtcccccagccctcaggccagtgccaggacagctggctgctgacaggatgtggcactgcttgaggaggggcacctgccaccgccagaggacaaggaagtgggggccgctggcccagggtaggggagggtggggcaatggggagaggcaaatgcagtttattgtaatatatgggattagattcatctatggagggcagagtgggctgcctggggattgggagggacagggcttggggagcaggtctctggcagagaaggatgtccgttccaggagcacacggccctgccccatcctgggccttacctcccctgccagggctcgggcgctgtggctcctgccttgatgaagcccgtgtcctgccttgatgaagcctgtgccacctgcaagtgcccgccctgcccctgccccaacccccaccgaagagccctgagctcaggctgagcccagccacctcccaaggactttccagtgaggaaatggcaacacgtggaggtgaagtccctgttctcagctccgtcatctgcggggcttctgggtggctcctgccactgacctcgccagccccatcttggtcctgtcaccctggccccaactattaaagtgccatttcct

SEQ ID NO: 63583 - DNA, 2398 bp, Homo sapiens
gcactgttgaccacttccatcacaagagccttttgttccctgcacaggacacactgaataataattctctgggcaaaaagcacagttggcaggatcgggtgtctcgatcatcctcacccctgaagacaggggagcagacaccaccgcatgaacacatctgcctgagcgatgagctgcccccccagagcggccccgcccccaccacagatcgaggcacctccaccgacagcccttgccgccgcagcacagccacccagatggcacctccgggtggtccccctgctgccccgcctgggggtcggggccactcgcatcgagaccgaatccactaccaggccgatgtgcgactagaggccactgaggagatctacctgaccccagtgcagaggcccccagacgctgcagagcccacctccgccttcctgccgcccactgagagccggatgtcagtcagctccgatccagaccctgccgcctacccctccacggcagggcggccgcacccctccatcagtgaagaggaagagggcttcgactgcctgtcgtccccagagcgggctgagcccccaggcggagggtggcgggggagcctgggggagccgccgccacctccacgggcctctctgagctcggacaccagcgccctgtcctatgactctgtcaagtacacgctggtggtagatgagcatgcacagctggagctggtgagcctgcggccgtgcttcggagactacagtgacgagagtgactctgccaccgtctatgacaactgtgcctccgtctcctcgccctatgagtcggccatcggagaggaatatgaggaggccccgcggccccagccccctgcctgcctctccgaggactccacgcctgatgaacccgacgtccatttctccaagaaattcctgaacgtcttcatgagtggccgctcccgctcctccagtgctgagtccttcgggctgttctcctgcatcatcaacggggaggagcaggagcagacccaccgggccatattcaggtttgtgcctcgacacgaagacgaacttgagctggaagtggatgaccctctgctagtggagctccaggctgaagactactggtacgaggcctacaacatgcgcactggtgcccggggtgtctttcctgcctattacgccatcgaggtcaccaaggagcccgagcacatggcagccctggccaaaaacagtgactgggtggaccagttccgggtgaagttcctgggctcagtccaggttccctatcacaagggcaatgacgtcctctgtgctgctatgcaaaagattgccaccacccgccggctcaccgtgcactttaacccgccctccagctgtgtcctggagatcagcgtgcggggtgtgaagataggcgtcaaggccgatgactcccaggaggccaaggggaataaatgtagccactttttccagttaaaaaacatctctttctgcggatatcatccaaagaacaacaagtactttgggttcatcaccaagcaccccgccgaccaccggtttgcctgccacgtctttgtgtctgaagactccaccaaagccctggcagagtccgtggggagagcattccagcagttctacaagcagtttgtggagtacacctgccccacagaagatatctacctggagtagctgtgcagccccgccctctgcgtcccccagccctcaggccagtgccaggacagctggctgctgacaggatgtggcactgcttgaggaggggcacctgccaccgccagaggacaaggaagtgggggccgctggcccagggtaggggagggtggggcaatggggagaggcaaatgcagtttattgtaatatatgggattagattcatctatggagggcagagtgggctgcctggggattgggagggacagggcttggggagcaggtctctggcagagaaggatgtccgttccaggagcacacggccctgccccatcctgggccttacctcccctgccagggctcgggcgctgtggctcctgccttgatgaagcccgtgtcctgccttgatgaagcctgtgccacctgcaagtgcccgccctgcccctgccccaacccccaccgaagagccctgagctcaggctgagcccagccacctcccaaggactttccagtgaggaaatggcaacacgtggaggtgaagtccctgttctcagctccgtcatctgcggggcttctgggtggctcctgccactgacctcaccggcatgctggcctgtggcaggcctaggacctcaggcggggaggaggagctgccgcaaggccctgtcccagcagaagagggaggcttcctgactgacacaggccagccccatcttggtcctgtcaccctggccccaactattaaagtgccatttcct

SEQ ID NO: 63584 - DNA, 1915 bp, Homo sapiens
cgcaggtaggcatgtttgaggaacagaagagatcacttggttggatcgttgtaagtggttaggaagagcagggtgagagaagataagagaaggaatgcgggggccaagccttgtagggccatggtaagacatggtaaattttcagtacagaaataatcagatttatttctgagataattttggctgccatgtgaagaatgggctgtagggggcgagagtggaagcaggaagaccagctttaggaggtctttgcagaagttgagcaatgatggtggcctgaaataggatgggagtggcagctgtgggagccaccctgtgggcggggccttgtaccgtacaaggccccgcggccccagccccctgcctgcctctccgaggactccacgcctgatgaacccgacgtccatttctccaagaaattcctgaacgtcttcatgagtggccgctcccgctcctccagtgctgagtccttcgggctgttctcctgcatcatcaacggggaggagcaggagcagacccaccgggccatattcaggtttgtgcctcgacacgaagacgaacttgagctggaagtggatgaccctctgctagtggagctccaggctgaagactactggtacgaggcctacaacatgcgcactggtgcccggggtgtctttcctgcctattacgccatcgaggtcaccaaggagcccgagcacatggcagccctggccaaaaacagtgactgggtggaccagttccgggtgaagttcctgggctcagtccaggttccctatcacaagggcaatgacgtcctctgtgctgctatgcaaaagattgccaccacccgccggctcaccgtgcactttaacccgccctccagctgtgtcctggagatcagcgtgcggggtgtgaagataggcgtcaaggccgatgactcccaggaggccaaggggaataaatgtagccactttttccagttaaaaaacatctctttctgcggatatcatccaaagaacaacaagtactttgggttcatcaccaagcaccccgccgaccaccggtttgcctgccacgtctttgtgtctgaagactccaccaaagccctggcagagtccgtggggagagcattccagcagttctacaagcagtttgtggagtacacctgccccacagaagatatctacctggagtagctgtgcagccccgccctctgcgtcccccagccctcaggccagtgccaggacagctggctgctgacaggatgtggcactgcttgaggaggggcacctgccaccgccagaggacaaggaagtgggggccgctggcccagggtaggggagggtggggcaatggggagaggcaaatgcagtttattgtaatatatgggattagattcatctatggagggcagagtgggctgcctggggattgggagggacagggcttggggagcaggtctctggcagagaaggatgtccgttccaggagcacacggccctgccccatcctgggccttacctcccctgccagggctcgggcgctgtggctcctgccttgatgaagcccgtgtcctgccttgatgaagcctgtgccacctgcaagtgcccgccctgcccctgccccaacccccaccgaagagccctgagctcaggctgagcccagccacctcccaaggactttccagtgaggaaatggcaacacgtggaggtgaagtccctgttctcagctccgtcatctgcggggcttctgggtggctcctgccactgacctcaccggcatgctggcctgtggcaggcctaggacctcaggcggggaggaggagctgccgcaaggccctgtcccagcagaagagggaggcttcctgactgacacaggccagccccatcttggtcctgtcaccctggccccaactattaaagtgccatttcct

SEQ ID NO: 63585 - DNA, 250 bp, Homo sapiens
cacaggatgcttttgcaaatgtttactgaaataacgatgctgctgtggctcccagaccccagagtaggcctggctggacaggccttggtgccgaatttctcacctgtccttgctggggacaggtttgtgcctcgacacgaagacgaacttgagctggaagtggatgaccctctgctagtggagctccaggctgaagactactggtacgaggcctacaacatgcgcactggtgcccggggtgtctttcctg

SEQ ID NO: 63586 - DNA, 2233 bp, Homo sapiens
ctctctccacactgggaggaggaggaggaggaaggggaggcagcaggggaaaacataggagaaaaaagtgaaagcagagaagaaaagttaggagactcattgcaagatttatacagggcactggagcaggccagtctgtcaccactaggagaacatcgtatttcaaccaagatggaatacaagctatcatttataaaaagatgtaatgatcctgtaatgaatgaaaaactacaccggctgagaattctcaaaagcactttaaaggccagagaaggggaagtagccattatcgataaagtcctagacaatccagacttgacatctaaagaattccaacaatggaagcagatgtacctcgaccttttcttggatatctgtcaaaataccacctcaaatgacccactgagtatttcttctgaagtagatgtaatcacttcctctctagcacacactcattcatacattgaaacgcatgtctaaatgtattctgccttcagaccatctagtacctgctggtactctgaacaagtatataaggtagtttttatatcaatgtgtggaacacttgacaagctatactttaatgttaccaaactatatgaaacaaaccatatatggtcacaataccactatctttaatgagcatttgtatattttatatgcaacagtgctcagcttatgtttaccatgtgcaaaatcaactgtctttaatgacttaaaattaacttttgcaaacaattctaaatacaggtggtcttcaagtagtaaaaccacaaaaggcagttttctatctatggtcatcttttctccctttaagttaattttatataaacaagacttcaaaagtaaatcacattttttcaggtgcagacatccttgtgggtgggaaagaatttaaaccttttttatatttattaaaatgttctaagaattttcttaaacattgcacaaagtttaatgctgtagttttatttttgtgaaatgtagatgcgcatacaagagctaagcaaaatagaagagcatcgacataagaaaagttcaggtatctaatattcgtcttaatagtctattaacttgtgaaagctaagttaatggaaatattattccaaatctatgagaacacttggtgtatcagggcaaagctttgtaagatgtttttgtaactaagaccaaaattgaagatagagctgctttattttcttggtttaaaatcttcctttatttttgtagtgatgagatgctgattgtgtacagaagaatttgagaggggatttttaaaaactgacttaacacacccagaaaggcagctaacagctatatatatatataaatttcagcccaaactcatgtttttaaactccaactcttaaaagacaacaaggtataaactgaaatgaatcaactttccacttagtttccaattttcccctagtccactaattaaacttaggtaattatacttcaggtagggaagtacaatatgtttagtttcaggctgatgtgtgttataaaaaacaacactgaaaaataaaaatgtacttcccttctaaggagcaagcaggtgatggtcattcaaagagatgtcacattgaattatgagagaaacaatttagaggtttttttcctggcttcatgaattgttctatagagtggatgaagtctaaggaaaagtcctcttcatatatttccatttataagcgtcttgtttttgaaagtgatcacagcatgaaaatgactgtgctgctttttagtgtctggctgcataatgtacaagtcacaatttgctgtttttttcaggaggagaaagggaacctcctttactattctatatcctaaaatctacttctaatcagctttatactgttgcctgtacagctcagtgaatgtactttcatctttaagagttcagatatatgccagtgaatatttttgctgtagaggagaaagtaaaaactccacagcggggatctttttctttgcttttgaaaccaccattgaatcactatcgttttgcagactttgcacaactgtacaggagagtggcctttctacagcacattttcagtaatcctatatttagtcaaaatggatgagaaatcatgtattaatgtttgtatggaattttgggtccagtgtaatatttttatcatttaaaaagaactctatttgtaaaaacatttatttactgcatggatattgacgcacattaaatttgtgggattttgtatatgta

SEQ ID NO: 63587 - DNA, 3245 bp, Homo sapiens
  misc_feature (2377)..(2377): n is a, c, g, or t
  misc_feature (2522)..(2522): n is a, c, g, or t
ctctctccacactgggaggaggaggaggaggaaggggaggcagcaggggaaaacataggagaaaaaagtgaaagcagagaagaaaagttaggagactcattgcaagatttatacagggcactggagcaggccagtctgtcaccactaggagaacatcgtatttcaaccaagatggaatacaagctatcatttataaaaagatgtaatgatcctgtaatgaatgaaaaactacaccggctgagaattctcaaaagcactttaaaggccagagaaggggaagtagccattatcgataaagtcctagacaatccagacttgacatctaaagaattccaacaatggaagcagatgtacctcgaccttttcttggatatctgtcaaaataccacctcaaatgacccactgagtatttcttctgaagtagatgtaatcacttcctctctagcacacactcattcatacattgaaacgcatgtctaaatgtattctgccttcagaccatctagtacctgctggtactctgaacaagtatataaggtagtttttatatcaatgtgtggaacacttgacaagctatactttaatgttaccaaactatatgaaacaaaccatatatggtcacaataccactatctttaatgagcatttgtatattttatatgcaacagtgctcagcttatgtttaccatgtgcaaaatcaactgtctttaatgacttaaaattaacttttgcaaacaattctaaatacaggtggtcttcaagtagtaaaaccacaaaaggcagttttctatctatggtcatcttttctccctttaagttaattttatataaacaagacttcaaaagtaaatcacattttttcaggtgcagacatccttgtgggtgggaaagaatttaaaccttttttatatttattaaaatgttctaagaattttcttaaacattgcacaaagtttaatgctgtagttttatttttgtgaaatgtagatgcgcatacaagagctaagcaaaatagaagagcatcgacataagaaaagttcaggtatctaatattcgtcttaatagtctattaacttgtgaaagctaagttaatggaaatattattccaaatctatgagaacacttggtgtatcagggcaaagctttgtaagatgtttttgtaactaagaccaaaattgaagatagagctgctttattttcttggtttaaaatcttcctttatttttgtagtgatgagatgctgattgtgtacagaagaatttgagaggggatttttaaaaactgacttaacacacccagaaaggcagctaacagctatatatatatataaatttcagcccaaactcatgtttttaaactccaactcttaaaagacaacaaggtataaactgaaatgaatcaactttccacttagtttccaattttcccctagtccactaattaaacttaggtaattatacttcaggtagggaagtacaatatgtttagtttcaggctgatgtgtgttataaaaaacaacactgaaaaataaaaatgtacttcccttctaaggagcaagcaggtgatggtcattcaaagagatgtcacattgaattatgagagaaacaatttagaggtttttttcctggcttcatgaattgttctatagagtggatgaagtctaaggaaaagtcctcttcatatatttccatttataagcgtcttgtttttgaaagtgatcacagcatgaaaatgactgtgctgctttttagtgtctggctgcataatgtacaagtcacaatttgctgtttttttcaggaggagaaagggaacctcctttactattctatatcctaaaatctacttctaatcagctttatactgttgcctgtacagctcagtgaatgtactttcatctttaagagttcagatatatgccagtgaatatttttgctgtagaggagaaagtaaaaactccacagcggggatctttttctttgcttttgaaaccaccattgaatcactatcgttttgcagactttgcacaactgtacaggagagtggcctttctacagcacattttcagtaatcctatatttagtcaaaatggatgagaaatcatgtattaatgtttgtatggaattttgggtccagtgtaatatttttatcatttaaaaagaactctatttgtaaaaacatttatttactgcatggatattgacgcacattaaatttgtgggattttgtatatgtaaaaaaaaaaaaaaaaaaaaaaaacaaaaaaaacctctcttgtgttccttaaaagtgaagtgtggtgctgtgtgttaacacgggtgtgttttagaactttttggaatgttttcacttagaaccaactgtgtgtgtcttgtgttcncactttaaaaattatttgtgttccctgtgattggcagtggtgtctaagtggtctcaccagtgggcccagggtctgtggtgcgcctgtgttaaaacaacgcaaagccagttctgaacggggcaagaacttacgcctcgtgttggcnatacataaagcaagctttataaccgtttgtgggtaaaggctcaagcccatgtgcgtgggcttctcacaacggtgggtacacaaccatcttcaaacgcttaactggggaacttttggcacacaaagcactctcggggggctattcgctctatagtcatttgaaacaagagaccccttcttgcaccactttattttataacctaccctccgggtacccattgtgttaatttgggcaactcccgggctttccaacgaaacctccctaaggggaaccgaacaacagcgcggcgcagcccccctgttggctaaccacctggggagcaggtccccacaaactctacaaccttctcacgacggctgtgggcttcacaacgtggcaaaccaacatacgacaagcacacaaaaacagctctcctacacaagagcgcgcgttggagaaatcgccgacggccaaacatgagagggagccacgagaccaacacattctaccgaagcgggggggggaggaccgccgcgagatacacaccaccagcagttgattggtggttcccccatcttatagggagcgagcgcggcgcgtatcaacaatcacccaccgaaagccatgagatgggcagggagaaaaacacaagtggagtcacgaagagcagcgcagggctgccccgtcggggcggctagaaccaagctgtgagtaacataccgcggaccaccagcaatgtcccca

SEQ ID NO: 63588 - DNA, 287 bp, Homo sapiens
ctctctccacactgggaggaggaggaggaggaaggggaggcagcaggggaaaacataggagaaaaaagtgaaagcagagaagaaaagttaggagactcattgcaagatttatacagggcactggagcaggccagtctgtcaccactaggagaacatcgtatttcaaccaagatggaatacaagctatcatttataaaaagatgtaatgatcctgtaatgaatgaaaaactacaccggctgagaattctcaaaagcactttaaaggtaagacaagaaatggaaggaca

SEQ ID NO: 63589 - DNA, 2667 bp, Homo sapiens
ctctctccacactgggaggaggaggaggaggaaggggaggcagcaggggaaaacataggagaaaaaagtgaaagcagagaagaaaagttaggagactcattgcaagatttatacagggcactggagcaggccagtctgtcaccactaggagaacatcgtatttcaaccaagatggaatacaagctatcatttataaaaagatgtaatgatcctgtaatgaatgaaaaactacaccggctgagaattctcaaaagcactttaaaggccagagaaggggaagtagccattatcgataaagtcctagacaatccagacttgacatctaaagaattccaacaatggaagcagatgtacctcgaccttttcttggatatctgtcaaaataccacctcaaatgacccactgagtatttcttctgaagtagatgtaatcacttcctctctagcacacactcattcatacattgaaacgcatgtctaaatgtattctgccttcagaccatctagtacctgctggtactctgaacaagtatataaggtagtttttatatcaatgtgtggaacacttgacaagctatactttaatgttaccaaactatatgaaacaaaccatatatggtcacaataccactatctttaatgagcatttgtatattttatatgcaacagtgctcagcttatgtttaccatgtgcaaaatcaactgtctttaatgacttaaaattaacttttgcaaacaattctaaatacaggtggtcttcaagtagtaaaaccacaaaaggcagttttctatctatggtcatcttttctccctttaagttaattttatataaacaagacttcaaaagtaaatcacattttttcaggtgcagacatccttgtgggtgggaaagaatttaaaccttttttatatttattaaaatgttctaagaattttcttaaacattgcacaaagtttaatgctgtagttttatttttgtgaaatgtagatgcgcatacaagagctaagcaaaatagaagagcatcgacataagaaaagttcaggtatctaatattcgtcttaatagtctattaacttgtgaaagctaagttaatggaaatattattccaaatctatgagaacacttggtgtatcagggcaaagctttgtaagatgtttttgtaactaagaccaaaattgaagatagagctgctttattttcttggtttaaaatcttcctttatttttgtagtgatgagatgctgattgtgtacagaagaatttgagaggggatttttaaaaactgacttaacacacccagaaaggcagctaacagctatatatatatataaatttcagcccaaactcatgtttttaaactccaactcttaaaagacaacaaggtataaactgaaatgaatcaactttccacttagtttccaattttcccctagtccactaattaaacttaggtaattatacttcaggtagggaagtacaatatgtttagtttcaggctgatgtgtgttataaaaaacaacactgaaaaataaaaatgtacttcccttctaaggagcaagcaggtgatggtcattcaaagagatgtcacattgaattatgagagaaacaatttagaggtttttttcctggcttcatgaattgttctatagagtggatgaagtctaaggaaaagtcctcttcatatatttccatttataagcgtcttgtttttgaaagtgatcacagcatgaaaatgactgtgctgctttttagtgtctggctgcataatgtacaagtcacaatttgctgtttttttcaggaggagaaagggaacctcctttactattctatatcctaaaatctacttctaatcagctttatactgttgcctgtacagctcagtgaatgtactttcatctttaagagttcagatatatgccagtgaatatttttgctgtagaggagaaagtaaaaactccacagcggggatctttttctttgcttttgaaaccaccattgaatcactatcgttttgcagactttgcacaactgtacaggagagtggcctttctacagcacattttcagtaatcctatatttagtcaaaatggatgagaaatcatgtattaatgtttgtatggaattttgggtccagtgtaatatttttatcatttaaaaagaactctatttgtaaaaacatttatttactgcatggatattgacgcacattaaatttgtgggattttgtatatgtaaaaaaaaaaaaaaaaaaaaaaaacaaaaaacctcttgtcctaaaatgaagtgtgcttgttaacaggtgtttagacttattgatgtttactagaccaaatgtgtatgttcacttaaaaatatatgtacctgatggatgtgtcatgtttacagtggccaggttgtggcctgtaaacagcaagcagttgacgggaagactagctctgttgctactaagcagcttttacttttgtaaagtcagctctgttgttttaaatggtaaaaattaaactaatgaatttgacaagactcgtggctagcctagcatgaaagagaccttttaacactatataatatctgtacattttattgcattcgtttcaaatctaggagagaggcagcactgtaaactgaagtcaaataaattcagctcttaatgaatccttgttagggccct

SEQ ID NO: 63590 - DNA, 985 bp, Homo sapiens
ccaaggttcagtgttacccctcatcaaccagcccagcagcatcttcgggattcccaatggcattgccctttgctttaatgatggccctggtggtgctcagctgcaagtcaagctgctctctgggctgtaatctgtctcaaacccacagcctgaataacaggaggactttgatgctcatggcacaaatgaggagaatctctcctttctcctgcctgaaggacagacatgactttgaatttccccaggaggaatttgatggcaaccagttccagaaagctcaagccatctctgtcctccatgagatgatgcagcagaccttcaatctcttcagcacaaagaactcatctgctgcttgggatgagaccctcctagaaaaattctacattgaacttttccagcaaatgaatgacctggaagcctgtgtgatacaggaggttggggtggaagagactcccctgatgaatgaggactccatcctggctgtgaagaaatacttccaaagaatcactctttatctgatggagaagaaatacagcccttgtgcctgggaggttgtcagagcagaaatcatgagatccttctctttttcaacaaacttgcaaaaaagattaaggaggaaggattgaaaactggttcatcatggaaatgattctcattgactaatacatcatctcacactttcatgttcttccatttcaaagactcacttctataaccaccacaagttgaatcaaaatttccaaatgttttcaggagtgttaagaagcatcgtgtttacctgtgcaggcactagtcctttacagatgaccattctgatgtctcctttcatctatttatttaaatatttatttatttaactatttttattatttaaattattttttatgtaatatcatgagtacctttacattgtggttaatgtaacaaatatgttcttcatatttagccaatatattaatttcctttttcattaaatttttactat

SEQ ID NO: 63591 - DNA, 295 bp, Homo sapiens
atcccaaagattctcctgaggaagcccagaagagccacggggaaatgcaggctctgccagcaattgggccttggagggctgccctgctaagggggtggaaaggctgtttgcctccctccccccatgcccagagctgccagagcacattccttttgtgaggaggccacagacgttcagctgccccagcttccagtttcgggtggcccagccaactttcatgccagccgtcctcagcccttcctggtgctgggtctgccaggctcatggtcagccaggcctggggccctggagaggt

SEQ ID NO: 63592 - DNA, 446 bp, Homo sapiens
ttgatttatcccatttttaatcaaagtaaggtaccaacacatgcaggatgtagtaattcacagtctcaagattaaatgctgataaaaatttgtagcagttttagcatcaaatatatcctcacccataacaaggaggtcactctattagtgagcaagtctgggcacaaaatggggaagtccattgtccagtttgaataatgtagtggaatctaaagctttgtggataagaatgactgaccctgtaatgtcctcggtgcatctgtacttgaagtgagattaacataagcgtgatctgcaggaaataggtaccctttaaagataccttcagctgtgtgtgtgagagagagcagggccacggggtgtcgtggggtagggggaaaggagagaggacctaagagactgagtgaaggcaatttacttatcaatgttcaattttcctaaatgtc

SEQ ID NO: 63593 - DNA, 330 bp, Homo sapiens
ctctccaggtgtctagtattttttttaacatgaatatcttggcactgtccatagccaggctttctaccttttgtggataagggacaaggaagaatgagagagagaatagaacaaattaggtctcttattcagagacagagaaagaggattcctccagatttttccagccttccagtccattttgaatgcctaagcacacatccattcttagattctgagacatttcagttgctttcaaatatttatcactttttaaaataaactttaaaaactttagaatagttttagatttatagaaagttgtaaagataatacagttttcataaaccg

SEQ ID NO: 63594 - DNA, 375 bp, Homo sapiens
  misc_feature (30)..(30): n is a, c, g, or t
  misc_feature (37)..(37): n is a, c, g, or t
  misc_feature (77)..(77): n is a, c, g, or t
  misc_feature (131)..(131): n is a, c, g, or t
gcccaaaataaccttccctcaaaaccctanggggccnccctgtaaaaattgggggctcacctcccctaaacaaaagnccacacccctaaaaatcccctttgaggataagcccattcctcgttccttgaaantcccgctgagaggcaatagcttttagcttccttagaaactctcctctttgatggttgggcgtgggtggcacgcttgtactcccaaaatgctgggattacaggcgtgagccactgcacaggcctaattgatattattcttgtattaaattatttcatggtattgctctaaaattttaaactcttaggacataatgtcctgtgtttagtcctaaacctatactttcagtcagaacttaaaattata

SEQ ID NO: 63595 - DNA, 2156 bp, Homo sapiens
tcatgccgttgcactccagcgtgggtgacagagagactccatctcaaaaaatacatatagagagagagaggatttctaccccctccagttccccaactttagttccccaacatcagtatttcccatgtttgcttcgttattctctctctccctctctctcttatttttctggacagaaggagagtcacttcatacatgatacccctttaacctaaaatacttccatgtatatttcctcaagataaagacacttataaaaccacagtacagtgatcaaaatgaagaagttgacactgatccaatgctattctctaattgtagaccttactcatgtttctccaattgtccttttaacatcctttatagcaaaaaaaaaaaaaaaaagctcttgttgtttctcctgacatgggatccaatccaggatcccatgtcgtatctctttaatttcctttccttgggatcggtttctctgtttttcatgacctttacttttttgaagagtgcagcgcatttattttttagaggatcccttggtcagggtgcatgccccatgtcttcccagtcaggttcagataccatgttttggcggcaacaccactgatgtggccagtccctgttggtatatcccaccaggaagtgggtgacggtgtctgtcccatcactggggatgggaactctgatcctgggttgagctggtctgcccattttcactacggtcaagttaatatttctcctttgctaattagtaagtgtcttatggggaaatgagtatcctgtttttattgaacattcaccgactagttgtagcatccattaatgattcttgccggaaatgtttattactgtgttgtcatatggtccgatttttttttttttttgagatggagtttcgctcttgttgtccaggctggagtgcagtggcacgatctcagctcaccacaacctccgcttcccgggttcaagcgattctcctgcctcagcctctcaagtagctgggattacaggcatgcaccaccacacccggctaattttgtgtagtagagatgggatttcaccttgttggtcaggctggtctcaaactcccgacctcagttgatccgcctgcctcagcctcccaaagtgctgggattacaggcgtgagctgccacccctggcccaaatggtgaattttctaatattattctttctatatttgttacttgccattcaactgtaggaagagctttccaacctcatgtgtttttttcattcacttagttatatcaggatagatccacgaagttttacttgatgctatagatgagaatcttttacgaacactctttatgttgctgttttgattgtctgagattcggtcagtgggagccccctcggaatggctttttccttagaccatttgatgcggccctaccagcctttaagcattttatactttgtgtcatggttcgatgctccgggctcatctcgtgtcttctctctcccagccctgaaccagccatttctccaaggagccctcctctttcttcaacagtggtgttcagaaacccagacctggacactgccatatggcattgcttttaggccctctcagtcagcagagcaggaggagtgggggtgtgagcatgtgcacacgagcgcctgccacctacacacactaattgctatgtacaagccgtgagttcccacagatatcccagccccactccctgtgctacagtgagcgttctcccttccccgtccacctttgtaactccttagacagtaagaacctggaccccatcatccatggtgcctttactgacttgctgagtcctacaacacaggtaaagggttcagaagtccctgcccttacccgatggaaaactccgggcatgctttcggtatttgttcagttctttttgtctttagcctcagggtgtggtgattacactgaatttacaaatgacttaaattagttcttttcacctttagtacaattacgttattgattgaaaacacacctgattgcgtttttccatttgtgttccatttgttttctcccctacccagttcctctttttttttaatctgttcccacccactccctgtaggtaactaatcagtttcttatttgcttttcttttttacataaaaggtagtgtattatagacataata

SEQ ID NO: 63596 - DNA, 517 bp, Homo sapiens
gaaatgcttttggcagagtttctcataagccccagcatttctaaaggttggtggtgggtggagccgtgctcctaacactgatgactctcccttccccgtccacctttgtaactccttagacagtaagaacctggaccccatcatccatggtgcctttactgacttgctgagtcctacaacacaggtaaagggttcagaagtccctgcccttacccgatggaaaactccgggcatgctttcggtatttgttcagttctttttgtctttagcctcagggtgtggtgattacactgaatttacaaatgacttaaattagttcttttcacctttagtacaattacgttattgattgaaaacacacctgattgcgtttttccatttgtgttccatttgttttctcccctacccagttcctctttttttttaatctgttcccacccactccctgtaggtaactaatcagtttcttatttgcttttcttttttacataaaaggtagtgtattatagacataata

SEQ ID NO: 63597 - DNA, 501 bp, Homo sapiens
aatgaagagcacatcaaggcaagcagatccagaggtgaagaagagagcctgatgacattgcatggtctcctcaatgtatttgtacctgacccatgacagactgcccacttacttaagatgataaatttcctcctttctgtctgtttgcttagggtaatttgagatatatttctagcctaactttgagaaacttctaatatgcccattaatctttaattaaaatgtagtatcatatagtcatattttgcctaatacataatatgatttccaaaaccttgtctagatgggaagcttaccagacttccaatagcaaaactgtgatatatttaaactatgccgtggagtacagatcactgtaagaaatctcaacaaaactgaatatctgtatttgtgtcctagattttttttaactcattattttcaatactgtttatgcttcccaactcaagagtgcctaggaagaattgagaagacatgaaaacatggattttacttgatcaa

SEQ ID NO: 63598 - DNA, 436 bp, Homo sapiens
tttttttttgagatggaatcttgctctgtcgcccatgctggagtgcggtggcgccatctcagctcactgcaatctccgtttcctgggttcaagcgattctcctgcctcggcctcttgagtagctgggattacaggcgcctaccacctcacccagctaattttttattttttagtagacacagggtttcaccatgttggtcaggctggtcttgaactcctgacctcgtgatccacccgcctcagcctcccaaagtgctgggattacaggcacaagccaccgcgcccggccgacagtaaatacttttaatagaccaccagcatcttgaaaatatggaccacgtattccttattcaactttatatcccagaatcagcattgtgtacataagaggtactccatgtttgctgaatggatgattaaataagcaaatgaattc

SEQ ID NO: 63599 - DNA, 464 bp, Homo sapiens
gtatataatacatttacaaaatatgtgctaatcaattatttttatctttttaaaaatagagatggggtctcgctatgttgcccaggctcaaactcctggtctcaagtggtcctcctgccttggcctcctaaaatgctggaattacaggtgtgagccaccatgccccaaccagaatacagtatatactacatataacatataaaatatgttaatcaacaatttctattatcagtaaggcttccagttaatggtaggctattagtagttaagtttttgggaatcaagttacatgtaggttttcattgtgtgggggttggcaccccaacgcccatattaagggtcaactgtatatggaaatatagcctgaaatctgtaatgaattacacttatttgaaaattgcttttggctggaagtatttcaggtaagtttctacttcaactttagtgtcattgtttacatattc

SEQ ID NO: 63600 - DNA, 314 bp, Homo sapiens
cattcagtagtatgtgttcaaaaagggtaaaaggaagcctatgaagaagagggagaaaagaaacaattttctgagtatcagatgagtgactggaaacacctgaatcctattaaatttcagagtcttggttatcaaaaggaattttaaaatatttgggaggagaaaaaagattcaagtaattaagaattataattcaagcaaaagatttcccaaaacttcatttaactgtattggagtgctttacacttggtttaacattgaaagtatgttcttttagaataaaatgatttccagatgcatgtactttacataga

SEQ ID NO: 63601 - DNA, 421 bp, Homo sapiens
acatgtctattcaggtcttttgcccattttgaaatagcattgcttgttcttttgctggatattaaccccttgtcaggtgcacagtttgcaagttaccttttctcatcctataggttatctcctcactcttgattgtttctgttgctgtgcagtagcttttaagtttggtgtaataccattgtgttttctctgctgcccttttaagtttcactgggtcaaaagtttaaaatttgtgaattcctatatttttagggcaattctcctgccactgttggaattatgcctcaatctatgcagtagaatattagtgtgaaatgcttctgtaccaatggagatgatgctgatgtctctatcataaacccatacctcatcaacacaaactgcaattacacaagtgctctaatatcatgtatctccattt

SEQ ID NO: 63602 - DNA, 454 bp, Homo sapiens
aaaaaatactagtaaaatctgcagaccttgggtaaaggcatacaagtactatcaggacactgccagactagatggtagttcttaacatatattgcttaacctgtctgagacacaatttcttctgtgaaatgagtggggctgatttttctttctagttttaaaattcccaagataaagcgttttgaaacaacagcaaaaagcaagaaaaggaagtagtcaaaaacttcatttccattatgcagacataaagaacattctcagtaaagccatctcttccgtgggtcttccacaccctaggaagtcatcagtggccttcctgttgtaagcataaaacatagtgcagttcagcttttagagccaacaattgcagtaagtctttctttataccttcttaaaatcatatttttatttccaacattgtactatttttttattttttaagaagcacatgtac

SEQ ID NO: 63603 - DNA, 759 bp, Homo sapiens
gggacacagaaccaaaccatatcacctcgctagatgggatttcccgcgtcaggtgcttgatggtgaaaatgaatcctaggacagctgtttaatctgtggctgtcacttcagaaatcgggagacaagttctggaagccagaagtctgcaatccaggtgctgtccaggctggtgccttctggaggctctgagggtgagcctccagctcttccaccttgcctcttccagcatgaggtggcgctggcaggctttgctgttccttggcttgtgcacttgaccttgaaccacaaggtctgaactgcaggggccacttagatgcacatttcttctggttctgccaccccgagacaccaagatcagcaacctcctctgcctgttcagtgtgaagatgatgaggatgaagagctcgataatgacccacttccacctcacaaatagtaaacatattttcccttccttacgattttcttaataacattttccttttctgggtgactttattgtgagaaaaacagtatatgatacatacaacatatacatatgtgtcaatcaactgcttacgttattggtaagtcttgttgtcaacaataggctgttactagttaacgttttggggaagtcaaaagttatataaaggccgagcgctgtaactcacatctgtaatctgagcactttggggagggcgaggtgggaggaccacttgaacccagcggtttgaaaccagcctgggccgcatattgagacccatctgttaaagaaca

SEQ ID NO: 63604 - DNA, 391 bp, Homo sapiens
gcgtggtggtgcgtgcctgtaaatcccagctactacggagtctgaggcaggaaaatcccttgaaccagggagtcggaggttgcagtgagccgagagcacgccactgcactcccgcctagcgacagagtgagactccgtctcaaaacaaaacaaaacaaaacaaaaaaccaaaaacactgggagtcccagtttgtaggaaatcattaagattttattatttgagctccagaacgagtgaggatgacctgataattttggtttggctcaggttgtaatgtgtttctgttttgctcgatgactactagaacagttctcaaactgtgtggtgggtaagaatcacctgggaacttgaccaagtgacatgtctacaccacccgcccctacaggctct

SEQ ID NO: 63605 - DNA, 468 bp, Homo sapiens
gaacagttcacaatagggttcactctccaatgagaatctaatgctgccgctgatctgacaggtgccagagctcaggcggtaatacgagaggctggagatacagataaagcttcagttgcttgcccgccacttacctcctcttgtgcggcccagttcctaacaggccacagaccgctaccagtccatggcctggaagttggggacccctctactgggatatttataattgcatatgtggttacctaatatttccatgatacaacactggtctagattctaggccattctccttcaaaaagaaccctgcttccttacagttttactgtttagcagcaatgttttctaccccttcttaaaattttcagctaccacacccctgttttgttctaatattaaagatgacatctaacactcaatttttctttctgctccaagctccatcatcattctgggacatttttggcccat

SEQ ID NO: 63606 - DNA, 882 bp, Homo sapiens
gtcatataatagttaaaacaacagtaccaacctacatgaagaatttagaaatggcatatatacaagactgttcattgcaactcattcattacataagaggaagggggacactaaatcactgtcagtaaggcgttaatattatattacatttctgcattagaatacccttcagccataaaaaagaataaagagtatttttgtgtagaatgatctgcaagatacatttaatgaaaaagcaaggtgctgaacaatatgtaatatgctgcctactcttgctattaaaatgggaggaaatgaggatgatttttacataaatacatattgcttgtatatgcataaaatatttcttgaagcctttagagaagggaaccaggtaactaggaataaaagtaaggagggaaacttttcattacatacctatctagttcaggccactataacaaagccctatagactgattggctaatgaacaacagaagttttatttctcacagttctagaaactggaagtctgagatcagcgtgctagcggggttggattctagtgagagcgtttttctgggttggagactgctgacatctccttgtagcctcatatggcagaaagaatgagggagttatcttggggtcccttttataaaggcatgaatcccattcatgtgggccctgctctcataaattatggcataattacttctcaaaggctctacctcccaataccatcactttaggagttaggatttcaacataccaattttgggaggcaggacacaaacattcagtccataacaatgccattttgcaacttgaaagttttaactgtgtgattatgttgcctgtttaaaacatttgttaggttaattgaaaaagatgaaaaaaaaa

SEQ ID NO: 63607 - DNA, 426 bp, Homo sapiens
ctcctgccacagcctcccaaagtgctgggattacaggcatgagccaccatgcccagcccctgcctttctgagtagctgggactagtggtgcttgcctctgcgccaggctccagtcatttcttagtgttcaatacacacgctctgagttctccacatagaatagatgactaagagtggatgtccctgtggccagcagctatgcccctcaccagcctttgtgaatgaccttcaaagctcttgttgaattttctgtctctgaggtctcttgaaataaggcttgtgaagtgtcttgagatcctcacaacaggtggtatacaatgaaaaatgtcaatgttctcctagttttgtttctttgatcaccatttcatccctccttccggtgcctgcagctgccctcagccttcaaagtgattctcactggagaga

SEQ ID NO: 63608 - DNA, 166 bp, Homo sapiens
aaacaaatgagctctgggtggaaataaaaatagcctccaatgataaagtaatgtaaaaataaaaaggaatatacgttctctagaaaaactggaaaatgtgaacaatagtttgacatgctacattgagttccgcagaaacaacaaaaacaagaacgacacagggcgg

SEQ ID NO: 63609 - DNA, 362 bp, Homo sapiens
ttacctcagttcactctcatgctatatattaaaaataatttacagggacactcagtaggaggttgaattatacgccagactgagacaggatgctgctgggggtgctgtatggaatttcccagcaaaagattctttcattagtttcaccaaatataccatttccacttagttttaaaagaaagtcaaactgaactgccatttgagattacatagaatgcacaagacccaatctgagaccctatgtttaaaaaaacaaaactgttttataatctaatcagcctgtcaaaggcatcactcataagcaaccgaattgtatttttggagagcaccattaaagatgtcttttaaaaaacagttataga

SEQ ID NO: 63610 - DNA, 1022 bp, Homo sapiens
acaaaagagtgctaactactctaggagagattaaagcctgtgaaatagaacttttccagataatggcgagtttttaggcttgctcatgctgaagcttaatataagctaataagtagagaaattaggaggcttggatattgcaaactttattggttggggtgttacccaggctaatagaaaaaaaattatatcctagaaagacagaacaggtgcgacttctgagaagaaaggttagagaagactagaaaggctgggaccaccttgaatttggcacacacacacacacacccacacgcacacacaaaatcaccaaatgatctggaatgtgctatgcgatgagtcagcctccactgctgtacgtccttggctacagactcctggaacagcagctcttctcaaggctagttgtgacagactcctggaacagcagctcttctcaaggctagttgtgacatccaaagtgacaagagcaggcccatattcagccacctcatccaggccttatcaaagaagagtcttatatgagatcaaatggctgcctttccccacaagattatatttttcctggtatgctctactttgacacatgtggctttctcaggaattttcaataaacgtgacttcactaggtggcctaagccccgatgtaaaatgtatatcccactggaccctgattacaatgcagactgccccaatgtgacagcacctgtttgtgcctcaaatggccacactttccagaatgagtgtttcttttgtgttgaacagagggaatttcattatcgtataaaatttgaaaaatatggaaaatgtgattaatgggtaccagagtaactacacttgcttattctttttctacttaattcagaatagtatttcttttagagtgtgagaatgtaaattaaataacatccctatgctgtacttaaatgtcgaacaaaatgagagacaaaaatgaaggaatcaaactgacaagaaccaaatatcacatttgttacaaataaacaacaaaagagctgatattc

SEQ ID NO: 63611 - DNA, 407 bp, Homo sapiens
aaacaaaaatgaaaaaaaaaaagaaggatgtaaagggaatttaaaagcagctcccttttcaggacctcttttagaagataaggaaaagtacattcaataccaatgttcactttccttatgatactaatcttctttttttctcttctctttagggaatttcattatcgtataaaatttgaaaaatatggaaaatgtgattaatgggtaccagagtaactacacttgcttattctttttctacttaattcagaatagtatttcttttagagtgtgagaatgtaaattaaataacatccctatgctgtacttaaatgtcgaacaaaatgagagacaaaaatgaaggaatcaaactgacaagaaccaaatatcacatttgttacaaataaacaacaaaagagctgatattc

SEQ ID NO: 63612 - DNA, 109 bp, Homo sapiens
cctacaaacaattagatctttaaaatttattgaatgctcaagatgtaaaagtagatattaaagtatgtcagcattttcattcaaagtttaccggcaaattgtaggtaaa

SEQ ID NO: 63613 - DNA, 947 bp, Homo sapiens
ggctcggggccggggccagcacccacactgggtctccacagcggcatggaggcctgcgtgtcttcactgctggtgctggccctgggggccctgtcagtaggcagctcctttgggacccagatcatcgggggccgggaggtgatcccccactcgcgcccgtacatggcctcactgcagagaaatggctcccacctgtgcgggggtgtcctggtgcacccaaagtgggtgctgacggctgcccactgcctggcccagcggatggcccagctgaggctggtgctggggctccacaccctggacagccccggtctcaccttccacatcaaggcagccatccagcaccctcgctacaagcccgtccctgccctggagaacgacctcgcgctgcttcagctggacgggaaagtgaagcccagccggaccatccggccgttggccctgcccagtaagcgccaggtggtggcagcagggactcggtgcagcatggccggctgggggctgacccaccagggcgggcgcctgtcccgggtgctgcgggagctggacctccaagtgctggacacccgcatgtgtaacaacagccgcttctggaacggcagcctctcccccagcatggtctgcctggcggccgactccaaggaccaggctccctgcaagggtgactcgggcgggcccctggtgtgtggcaaaggccgggtgttggccggagtcctgtccttcagctccagggtctgcactgacatcttcaagcctcccgtggccaccgctgtggcgccttacgtgtcctggatcaggaaggtcaccggccgatcggcctgatgccctggggtgatggggaccccctcgctgtctccacaggacccttcccctccaggggtgcagtggggtgggtgaggacgggtgggagggacagggagggaccaataaatcataatgaagaaacgctc

SEQ ID NO: 63614 - DNA, 946 bp, Homo sapiens
gcgaacgccgggtaaaagatcgggagcggaagtgggcgagtcagagcacatccggtgttagaagcgctggtaggccttggagaggcgggttaggaagagtggagactgctgcacggactctggaaccatgaacatatttgatcgaaagatcaactttgatgcgcttttaaaattttctcatataaccccgtcaacgcagcagcacctgaagaaggtctatgcaagttttgccctttgtatgtttgtggcggctgcaggggcctatgtccatatggtcactcatttcattcaggctggcctgctgtctgccttgggctccctgatattgatgatttggctgatggcaacacctcatagccatgaaactgaacagaaaagactgggacttcttgctggatttgcattccttacaggagttggcctgggccctgccctggagttttgtattgctgtcaaccccagcatccttcccactgctttcatgggcacggcaatgatctttacctgcttcaccctcagtgcactctatgccaggcgccgtagctacctctttctgggaggtatcttgatgtcagccctgagcttgttgcttttgtcttccctggggaatgttttctttggatccatttggcttttccaggcaaacctgtatgtgggactggtggtcatgtgtggcttcgtcctttttgatactcaactcattattgaaaaggccgaacatggagatcaagattatatctggcactgcattgatctcttcttagatttcattactgtcttcagaaaactcatgatgatcctggccatgaatgaaaaggataagaagaaagagaagaaatgaagtgaccatccagcctttcccaattagacttcctctccttccacccctcatttcctttttgcacacattacaggtggtgtgttctgtgataatgaaaagcatcag

SEQ ID NO: 63615 - DNA, 967 bp, Homo sapiens
  misc_feature (28)..(28): n is a, c, g, or t
  misc_feature (761)..(761): n is a, c, g, or t
  misc_feature (763)..(763): n is a, c, g, or t
  misc_feature (766)..(766): n is a, c, g, or t
atacggctaggtacgaggccgggtggtncgctggtaggcctggagaggcgggttaggaagagtggagactgctgcacggactctggaaccatgaacatatttgatcgaaagatcaactttgatgcgcttttaaaattttctcatataaccccgtcaacgcagcagcacctgaagaaggtctatgcaagttttgccctttgtatgtttgtggcggctgcaggggcctatgtccatatggtcactcatttcattcaggctggcctgctgtctgccttgggctccctgatattgatgatttggctgatggcaacacctcatagccatgaaactgaacagaaaagactgggacttcttgctggatttgcattccttacaggagttggcctgggccctgccctggagttttgtattgctgtcaaccccagcatccttcccactgctttcatgggcacggcaatgatctttacctgcttcaccctcagtgcactctatgccaggcgccgtagctacctctttctgggaggtatcttgatgtcagccctgagcttgttgcttttgtcttccctggggaatgttttctttggatccatttggcttttccaggcaaacctgtatgtgggactggtggtcatgtgtggcttcgtcctttttgatactcaactcattattgaaaaggccgaacatggagatcaagattatatctgggcctgcttgatctctcttgattcattactgcgttcgaaaaactctgtgtccgggcngntgnaggtctgagcacgcggattgtgggcgtccccctttccataagttctccctttcccccttcttttgcccttcgggggttcgggttaagccccacgtgtgggggggccttcgtcttggacagccatatcggggggttcggcccccctagcacgtcttctctccccgcgaaggagggtgcccacgccagagctcttgggtgaga

SEQ ID NO: 63616 - DNA, 2657 bp, Homo sapiens
gcgaacgccgggtaaaagatcgggagcggaagtgggcgagtcagagcacatccggtgttagaagcgctggtaggccttggagaggcgggttaggaagagtggagactgctgcacggactctggaaccatgaacatatttgatcgaaagatcaactttgatgcgcttttaaaattttctcatataaccccgtcaacgcagcagcacctgaagaaggtctatgcaagttttgccctttgtatgtttgtggcggctgcaggggcctatgtccatatggtcactcatttcattcaggctggcctgctgtctgccttgggctccctgatattgatgatttggctgatggcaacacctcatagccatgaaactgaacagaaaagactgggacttcttgctggatttgcattccttacaggagttggcctgggccctgccctggagttttgtattgctgtcaaccccagcatccttcccactgctttcatgggcacggcaatgatctttacctgcttcaccctcagtgcactctatgccaggcgccgtagctacctctttctgggaggtatcttgatgtcagccctgagcttgttgcttttgtcttccctggggaatgttttctttggatccatttggcttttccaggcaaacctgtatgtgggactggtggtcatgtgtggcttcgtcctttttgatactcaactcattattgaaaaggccgaacatggagatcaagattatatctggcactgcattgatctcttcttagatttcattactgtcttcagaaaactcatgatgatcctggccatgaatgaaaaggataagaagaaagagaagaaatgaagtgaccatccagcctttcccaattagacttcctctccttccacccctcatttcctttttgcacacattacaggtggtgtgttctgtgataatgaaaagcatcagaaaagcttttgtactttgtggtttcctctattttgaattttttgatcaaaaaactgattagcagaatatagtttggagtttggcttcatcttcctggggttcccctcactcccttttttgtcaaccccatctgtagcctcttcctctactcaggcagtcgacccgccacgatgagaagtgggaccagccagagggcgccaacttcaggagtccgctttcccaccaggcttcattcacccagtggacctgaactgtttggtagagccacccggcccttccttcctcattgttgtttggtatgcgcacagttcctgtgggactgggccgtgagttttccattggaaagaagttcagtggtcccattgttaactcagcctcaaatctcaactgtcaggccctacaaagaaaatggagagcctcttctggtggatgctttgctccctctgagctgcccatgctggtctggcaaacacacctttctgctttgccttcacaaaagtaatgtgttccctttcccaccccttgcctgaccctcagggagtcagcctgcttccatccatgggtgggaagacttcagcacaaaggaaagactaattcttgtcaggcatttttgaaaaggctgattatgtgtatcaaggtacagcatacgtagggttcccctaaacttgccctgtttttgtttttttagtttgttatccccttactgagcggcctctactaggtggctgtgattaaatgtcccaagcaaggatagggaaggggaatggttgagcctctggagatcattgtaaccaatcctgccagacctgtttggggcagtggggagcaaacctagataaggacctgtttggggcagcagggagcaaaatctcctttaacaaccaagcagttcctcattcacatcaacagagcgaggctgtgataacttaggaggcagcaatcctaatagtccttcagtgcattttagtctgtctccaactggacaccagtaggtagtgtcaagccagagattcggggcagtagataaatgttcattttactgatgcactttagtttttggtctgttacctgttttccagaaatttgtggccttttaggcgggagttaggcgaccaaaccagtgagagccccaatccctgcagttttgtggcttcaagtgtgggtggacagtcctaatggggatctccagctccttcctgtgggctgccacagacagctacccccagaagggtcaatgttgggagtggttgtggctctgagctgctctacagagcttcagtgtgagaggatcgagccattgaaagctcattaccagtaggacataatttttggctctccctattcacaaccagtgcacagtttgacacagtggcctcaggttcacagtgcaccatgtcactgtgctatcctacgaaatcatttgtttctaagttgtgtttattcctggagtgacatgccaccccgaatggctcactttcactgaggatgctgtcctctgatttagctgctgcctccagcctctggcttgagaacttactaaaggcacttccttcctgttaaacccctgttaactctccataaatttggtgattctctgctaggcctaagattttgagttaacatctcttgaagccaaactccaccttctgtgctttttgcttgggataatggagtttttctttagaaacagtgccaagaatgacaagatatt

SEQ ID NO: 63617 - DNA, 1536 bp, Homo sapiens
gcgaacgccgggtaaaagatcgggagcggaagtgggcgagtcagagcacatccggtgttagaagcgctggtaggccttggagaggcgggttaggaagagtggagactgctgcacggactctggaaccatgaacatatttgatcgaaagatcaactttgatgcgcttttaaaattttctcatataaccccgtcaacgcagcagcacctgaagaaggtctatgcaagttttgccctttgtatgtttgtggcggctgcaggggcctatgtccatatggtcactcatttcattcaggctggcctgctgtctgccttgggctccctgatattgatgatttggctgatggcaacacctcatagccatgaaactgaacagaaaagactgggacttcttgctggatttgcattccttacaggagttggcctgggccctgccctggagttttgtattgctgtcaaccccagcatccttcccactgctttcatgggcacggcaatgatctttacctgcttcaccctcagtgcactctatgccaggcgccgtagctacctctttctgggaggtatcttgatgtcagccctgagcttgttgcttttgtcttccctggggaatgttttctttggatccatttggcttttccaggcaaacctgtatgtgggactggtggtcatgtgtggcttcgtcctttttgatactcaactcattattgaaaaggccgaacatggagatcaagattatatctggcactgcattgatctcttcttagatttcattactgtcttcagaaaactcatgatgatcctggccatgaatgaaaaggataagaagaaagagaagaaatgaagtgaccatccagcctttcccaattagacttcctctccttccacccctcatttcctttttgcacacattacaggtggtgtgttctgtgataatgaaaagcatcagaaaagcttttgtactttgtggtttcctctattttgaattttttgatcaaaaaactgattagcagaatatagtttggagtttggcttcatcttcctggggttcccctcactcccttttttgtcaaccccatctgtagcctcttcctctaagagcttcagtgtgagaggatcgagccattgaaagctcattaccagtaggacataatttttggctctccctattcacaaccagtgcacagtttgacacagtggcctcaggttcacagtgcaccatgtcactgtgctatcctacgaaatcatttgtttctaagttgtgtttattcctggagtgacatgccaccccgaatggctcactttcactgaggatgctgtcctctgatttagctgctgcctccagcctctggcttgagaacttactaaaggcacttccttcctgttaaacccctgttaactctccataaatttggtgattctctgctaggcctaagattttgagttaacatctcttgaagccaaactccaccttctgtgctttttgcttgggataatggagtttttctttagaaacagtgccaagaatgacaagatatt

SEQ ID NO: 63618 - DNA, 2636 bp, Homo sapiens
aaaaaaaaaaaaaaaaaaaaaaaagcacatccggtgttagaagcgctggtaggccttggagaggcgggttaggaagagtggagactgctgcacggactctggaaccatgaacatatttgatcgaaagatcaactttgatgcgcttttaaaattttctcatataaccccgtcaacgcagcagcacctgaagaaggtctatgcaagttttgccctttgtatgtttgtggcggctgcaggggcctatgtccatatggtcactcatttcattcaggctggcctgctgtctgccttgggctccctgatattgatgatttggctgatggcaacacctcatagccatgaaactgaacagaaaagactgggacttcttgctggatttgcattccttacaggagttggcctgggccctgccctggagttttgtattgctgtcaaccccagcatccttcccactgctttcatgggcacggcaatgatctttacctgcttcaccctcagtgcactctatgccaggcgccgtagctacctctttctgggaggtatcttgatgtcagccctgagcttgttgcttttgtcttccctggggaatgttttctttggatccatttggcttttccaggcaaacctgtatgtgggactggtggtcatgtgtggcttcgtcctttttgatactcaactcattattgaaaaggccgaacatggagatcaagattatatctggcactgcattgatctcttcttagatttcattactgtcttcagaaaactcatgatgatcctggccatgaatgaaaaggataagaagaaagagaagaaatgaagtgaccatccagcctttcccaattagacttcctctccttccacccctcatttcctttttgcacacattacaggtggtgtgttctgtgataatgaaaagcatcagaaaagcttttgtactttgtggtttcctctattttgaattttttgatcaaaaaactgattagcagaatatagtttggagtttggcttcatcttcctggggttcccctcactcccttttttgtcaaccccatctgtagcctcttcctctactcaggcagtcgacccgccacgatgagaagtgggaccagccagagggcgccaacttcaggagtccgctttcccaccaggcttcattcacccagtggacctgaactgtttggtagagccacccggcccttccttcctcattgttgtttggtatgcgcacagttcctgtgggactgggccgtgagttttccattggaaagaagttcagtggtcccattgttaactcagcctcaaatctcaactgtcaggccctacaaagaaaatggagagcctcttctggtggatgctttgctccctctgagctgcccatgctggtctggcaaacacacctttctgctttgccttcacaaaagtaatgtgttccctttcccaccccttgcctgaccctcagggagtcagcctgcttccatccatgggtgggaagacttcagcacaaaggaaagactaattcttgtcaggcatttttgaaaaggctgattatgtgtatcaaggtacagcatacgtagggttcccctaaacttgccctgtttttgtttttttagtttgttatccccttactgagcggcctctactaggtggctgtgattaaatgtcccaagcaaggatagggaaggggaatggttgagcctctggagatcattgtaaccaatcctgccagacctgtttggggcagtggggagcaaacctagataaggacctgtttggggcagcagggagcaaaatctcctttaacaaccaagcagttcctcattcacatcaacagagcgaggctgtgataacttaggaggcagcaatcctaatagtccttcagtgcattttagtctgtctccaactggacaccagtaggtagtgtcaagccagagattcggggcagtagataaatgttcattttactgatgcactttagtttttggtctgttacctgttttccagaaatttgtggccttttaggcgggagttaggcgaccaaaccagtgagagccccaatccctgcagttttgtggcttcaagtgtgggtggacagtcctaatggggatctccagctccttcctgtgggctgccacagacagctacccccagaagggtcaatgttgggagtggttgtggctctgagctgctctacagagcttcagtgtgagaggatcgagccattgaaagctcattaccagtaggacataatttttggctctccctattcacaaccagtgcacagtttgacacagtggcctcaggttcacagtgcaccatgtcactgtgctatcctacgaaatcatttgtttctaagttgtgtttattcctggagtgacatgccaccccgaatggctcactttcactgaggatgctgtcctctgatttagctgctgcctccagcctctggcttgagaacttactaaaggcacttccttcctgttaaacccctgttaactctccataaatttggtgattctctgctaggcctaagattttgagttaacatctcttgaagccaaactccaccttctgtgctttttgcttgggataatggagtttttctttagaaacagtgccaagaatgacaagatatt

SEQ ID NO: 63619 - DNA, 2857 bp, Homo sapiens
agcgggggtggggcggaggcgagtctgcgggggttttggggggtgtcgaggcctctattctgccccagagcgctggcgaaggccccttctcagcccgccttttcctttctcccgctccttctcctctactaagtgtagacgcagggccccttggcctagcttcgatcgttcgaattcagagcacgtccttccgaggtgaaggaacgcgaaactccacccatccgattgctgttcggctgcgggcgggtcctttggtcgggctgaccctgggtgagcggcccggagccaagactcgagagtggagactgctgcacggactctggaaccatgaacatatttgatcgaaagatcaactttgatgcgcttttaaaattttctcatataaccccgtcaacgcagcagcacctgaagaaggtctatgcaagttttgccctttgtatgtttgtggcggctgcaggggcctatgtccatatggtcactcatttcattcaggctggcctgctgtctgccttgggctccctgatattgatgatttggctgatggcaacacctcatagccatgaaactgaacagaaaagactgggacttcttgctggatttgcattccttacaggagttggcctgggccctgccctggagttttgtattgctgtcaaccccagcatccttcccactgctttcatgggcacggcaatgatctttacctgcttcaccctcagtgcactctatgccaggcgccgtagctacctctttctgggaggtatcttgatgtcagccctgagcttgttgcttttgtcttccctggggaatgttttctttggatccatttggcttttccaggcaaacctgtatgtgggactggtggtcatgtgtggcttcgtcctttttgatactcaactcattattgaaaaggccgaacatggagatcaagattatatctggcactgcattgatctcttcttagatttcattactgtcttcagaaaactcatgatgatcctggccatgaatgaaaaggataagaagaaagagaagaaatgaagtgaccatccagcctttcccaattagacttcctctccttccacccctcatttcctttttgcacacattacaggtggtgtgttctgtgataatgaaaagcatcagaaaagcttttgtactttgtggtttcctctattttgaattttttgatcaaaaaactgattagcagaatatagtttggagtttggcttcatcttcctggggttcccctcactcccttttttgtcaaccccatctgtagcctcttcctctactcaggcagtcgacccgccacgatgagaagtgggaccagccagagggcgccaacttcaggagtccgctttcccaccaggcttcattcacccagtggacctgaactgtttggtagagccacccggcccttccttcctcattgttgtttggtatgcgcacagttcctgtgggactgggccgtgagttttccattggaaagaagttcagtggtcccattgttaactcagcctcaaatctcaactgtcaggccctacaaagaaaatggagagcctcttctggtggatgctttgctccctctgagctgcccatgctggtctggcaaacacacctttctgctttgccttcacaaaagtaatgtgttccctttcccaccccttgcctgaccctcagggagtcagcctgcttccatccatgggtgggaagacttcagcacaaaggaaagactaattcttgtcaggcatttttgaaaaggctgattatgtgtatcaaggtacagcatacgtagggttcccctaaacttgccctgtttttgtttttttagtttgttatccccttactgagcggcctctactaggtggctgtgattaaatgtcccaagcaaggatagggaaggggaatggttgagcctctggagatcattgtaaccaatcctgccagacctgtttggggcagtggggagcaaacctagataaggacctgtttggggcagcagggagcaaaatctcctttaacaaccaagcagttcctcattcacatcaacagagcgaggctgtgataacttaggaggcagcaatcctaatagtccttcagtgcattttagtctgtctccaactggacaccagtaggtagtgtcaagccagagattcggggcagtagataaatgttcattttactgatgcactttagtttttggtctgttacctgttttccagaaatttgtggccttttaggcgggagttaggcgaccaaaccagtgagagccccaatccctgcagttttgtggcttcaagtgtgggtggacagtcctaatggggatctccagctccttcctgtgggctgccacagacagctacccccagaagggtcaatgttgggagtggttgtggctctgagctgctctacagagcttcagtgtgagaggatcgagccattgaaagctcattaccagtaggacataatttttggctctccctattcacaaccagtgcacagtttgacacagtggcctcaggttcacagtgcaccatgtcactgtgctatcctacgaaatcatttgtttctaagttgtgtttattcctggagtgacatgccaccccgaatggctcactttcactgaggatgctgtcctctgatttagctgctgcctccagcctctggcttgagaacttactaaaggcacttccttcctgttaaacccctgttaactctccataaatttggtgattctctgctaggcctaagattttgagttaacatctcttgaagccaaactccaccttctgtgctttttgcttgggataatggagtttttctttagaaacagtgccaagaatgacaagatatt

SEQ ID NO: 63620 - DNA, 2689 bp, Homo sapiens
gtgacacgcgaggctcctcagttacttagccaacggcagaggcgggaagtgagaggagtctggggctggggctgccttccaggcccacggggcggccccgctcttttcggattggttacctttgggcagagtggagactgctgcacggactctggaaccatgaacatatttgatcgaaagatcaactttgatgcgcttttaaaattttctcatataaccccgtcaacgcagcagcacctgaagaaggtctatgcaagttttgccctttgtatgtttgtggcggctgcaggggcctatgtccatatggtcactcatttcattcaggctggcctgctgtctgccttgggctccctgatattgatgatttggctgatggcaacacctcatagccatgaaactgaacagaaaagactgggacttcttgctggatttgcattccttacaggagttggcctgggccctgccctggagttttgtattgctgtcaaccccagcatccttcccactgctttcatgggcacggcaatgatctttacctgcttcaccctcagtgcactctatgccaggcgccgtagctacctctttctgggaggtatcttgatgtcagccctgagcttgttgcttttgtcttccctggggaatgttttctttggatccatttggcttttccaggcaaacctgtatgtgggactggtggtcatgtgtggcttcgtcctttttgatactcaactcattattgaaaaggccgaacatggagatcaagattatatctggcactgcattgatctcttcttagatttcattactgtcttcagaaaactcatgatgatcctggccatgaatgaaaaggataagaagaaagagaagaaatgaagtgaccatccagcctttcccaattagacttcctctccttccacccctcatttcctttttgcacacattacaggtggtgtgttctgtgataatgaaaagcatcagaaaagcttttgtactttgtggtttcctctattttgaattttttgatcaaaaaactgattagcagaatatagtttggagtttggcttcatcttcctggggttcccctcactcccttttttgtcaaccccatctgtagcctcttcctctactcaggcagtcgacccgccacgatgagaagtgggaccagccagagggcgccaacttcaggagtccgctttcccaccaggcttcattcacccagtggacctgaactgtttggtagagccacccggcccttccttcctcattgttgtttggtatgcgcacagttcctgtgggactgggccgtgagttttccattggaaagaagttcagtggtcccattgttaactcagcctcaaatctcaactgtcaggccctacaaagaaaatggagagcctcttctggtggatgctttgctccctctgagctgcccatgctggtctggcaaacacacctttctgctttgccttcacaaaagtaatgtgttccctttcccaccccttgcctgaccctcagggagtcagcctgcttccatccatgggtgggaagacttcagcacaaaggaaagactaattcttgtcaggcatttttgaaaaggctgattatgtgtatcaaggtacagcatacgtagggttcccctaaacttgccctgtttttgtttttttagtttgttatccccttactgagcggcctctactaggtggctgtgattaaatgtcccaagcaaggatagggaaggggaatggttgagcctctggagatcattgtaaccaatcctgccagacctgtttggggcagtggggagcaaacctagataaggacctgtttggggcagcagggagcaaaatctcctttaacaaccaagcagttcctcattcacatcaacagagcgaggctgtgataacttaggaggcagcaatcctaatagtccttcagtgcattttagtctgtctccaactggacaccagtaggtagtgtcaagccagagattcggggcagtagataaatgttcattttactgatgcactttagtttttggtctgttacctgttttccagaaatttgtggccttttaggcgggagttaggcgaccaaaccagtgagagccccaatccctgcagttttgtggcttcaagtgtgggtggacagtcctaatggggatctccagctccttcctgtgggctgccacagacagctacccccagaagggtcaatgttgggagtggttgtggctctgagctgctctacagagcttcagtgtgagaggatcgagccattgaaagctcattaccagtaggacataatttttggctctccctattcacaaccagtgcacagtttgacacagtggcctcaggttcacagtgcaccatgtcactgtgctatcctacgaaatcatttgtttctaagttgtgtttattcctggagtgacatgccaccccgaatggctcactttcactgaggatgctgtcctctgatttagctgctgcctccagcctctggcttgagaacttactaaaggcacttccttcctgttaaacccctgttaactctccataaatttggtgattctctgctaggcctaagattttgagttaacatctcttgaagccaaactccaccttctgtgctttttgcttgggataatggagtttttctttagaaacagtgccaagaatgacaagatatt

SEQ ID NO: 63621 - DNA, 3034 bp, Homo sapiens
aaaaaaaaaaaaaaaaaaaaaaaagcacatccggtgttagaagcgctggtaggccttggagaggcgggttaggaagacgcagggccccttggcctagcttcgatcgttcgaattcagagcacgtccttccgaggtgaaggaacgcgaaactccacccatccgattgctgttcggctgcgggcgggtcctttggtcgggctgaccctgggtgagcggcccggagccaagactcgagagacagggtttcgccgtgttggccagactggtctcgaactcctgacgtcaaagtgatccacctgcctcggcctcccaaagtactgggattacaggcgtgagccactgtgcccaacctgtaagtcatttttgagtcaacgatatttttaatttacaatgggtgtatccagatgtaagccatcgcaaatcaaggagtgtaccgaatgagtatcaatttctcccagtgataggtcaaccctgagtggagactgctgcacggactctggaaccatgaacatatttgatcgaaagatcaactttgatgcgcttttaaaattttctcatataaccccgtcaacgcagcagcacctgaagaaggtctatgcaagttttgccctttgtatgtttgtggcggctgcaggggcctatgtccatatggtcactcatttcattcaggctggcctgctgtctgccttgggctccctgatattgatgatttggctgatggcaacacctcatagccatgaaactgaacagaaaagactgggacttcttgctggatttgcattccttacaggagttggcctgggccctgccctggagttttgtattgctgtcaaccccagcatccttcccactgctttcatgggcacggcaatgatctttacctgcttcaccctcagtgcactctatgccaggcgccgtagctacctctttctgggaggtatcttgatgtcagccctgagcttgttgcttttgtcttccctggggaatgttttctttggatccatttggcttttccaggcaaacctgtatgtgggactggtggtcatgtgtggcttcgtcctttttgatactcaactcattattgaaaaggccgaacatggagatcaagattatatctggcactgcattgatctcttcttagatttcattactgtcttcagaaaactcatgatgatcctggccatgaatgaaaaggataagaagaaagagaagaaatgaagtgaccatccagcctttcccaattagacttcctctccttccacccctcatttcctttttgcacacattacaggtggtgtgttctgtgataatgaaaagcatcagaaaagcttttgtactttgtggtttcctctattttgaattttttgatcaaaaaactgattagcagaatatagtttggagtttggcttcatcttcctggggttcccctcactcccttttttgtcaaccccatctgtagcctcttcctctactcaggcagtcgacccgccacgatgagaagtgggaccagccagagggcgccaacttcaggagtccgctttcccaccaggcttcattcacccagtggacctgaactgtttggtagagccacccggcccttccttcctcattgttgtttggtatgcgcacagttcctgtgggactgggccgtgagttttccattggaaagaagttcagtggtcccattgttaactcagcctcaaatctcaactgtcaggccctacaaagaaaatggagagcctcttctggtggatgctttgctccctctgagctgcccatgctggtctggcaaacacacctttctgctttgccttcacaaaagtaatgtgttccctttcccaccccttgcctgaccctcagggagtcagcctgcttccatccatgggtgggaagacttcagcacaaaggaaagactaattcttgtcaggcatttttgaaaaggctgattatgtgtatcaaggtacagcatacgtagggttcccctaaacttgccctgtttttgtttttttagtttgttatccccttactgagcggcctctactaggtggctgtgattaaatgtcccaagcaaggatagggaaggggaatggttgagcctctggagatcattgtaaccaatcctgccagacctgtttggggcagtggggagcaaacctagataaggacctgtttggggcagcagggagcaaaatctcctttaacaaccaagcagttcctcattcacatcaacagagcgaggctgtgataacttaggaggcagcaatcctaatagtccttcagtgcattttagtctgtctccaactggacaccagtaggtagtgtcaagccagagattcggggcagtagataaatgttcattttactgatgcactttagtttttggtctgttacctgttttccagaaatttgtggccttttaggcgggagttaggcgaccaaaccagtgagagccccaatccctgcagttttgtggcttcaagtgtgggtggacagtcctaatggggatctccagctccttcctgtgggctgccacagacagctacccccagaagggtcaatgttgggagtggttgtggctctgagctgctctacagagcttcagtgtgagaggatcgagccattgaaagctcattaccagtaggacataatttttggctctccctattcacaaccagtgcacagtttgacacagtggcctcaggttcacagtgcaccatgtcactgtgctatcctacgaaatcatttgtttctaagttgtgtttattcctggagtgacatgccaccccgaatggctcactttcactgaggatgctgtcctctgatttagctgctgcctccagcctctggcttgagaacttactaaaggcacttccttcctgttaaacccctgttaactctccataaatttggtgattctctgctaggcctaagattttgagttaacatctcttgaagccaaactccaccttctgtgctttttgcttgggataatggagtttttctttagaaacagtgccaagaatgacaagatatt

SEQ ID NO: 63622 - DNA, 2607 bp, Homo sapiens
tgtgattctgtatgacttaatgactctaacctttctttattctgcagagtggagactgctgcacggactctggaaccatgaacatatttgatcgaaagatcaactttgatgcgcttttaaaattttctcatataaccccgtcaacgcagcagcacctgaagaaggtctatgcaagttttgccctttgtatgtttgtggcggctgcaggggcctatgtccatatggtcactcatttcattcaggctggcctgctgtctgccttgggctccctgatattgatgatttggctgatggcaacacctcatagccatgaaactgaacagaaaagactgggacttcttgctggatttgcattccttacaggagttggcctgggccctgccctggagttttgtattgctgtcaaccccagcatccttcccactgctttcatgggcacggcaatgatctttacctgcttcaccctcagtgcactctatgccaggcgccgtagctacctctttctgggaggtatcttgatgtcagccctgagcttgttgcttttgtcttccctggggaatgttttctttggatccatttggcttttccaggcaaacctgtatgtgggactggtggtcatgtgtggcttcgtcctttttgatactcaactcattattgaaaaggccgaacatggagatcaagattatatctggcactgcattgatctcttcttagatttcattactgtcttcagaaaactcatgatgatcctggccatgaatgaaaaggataagaagaaagagaagaaatgaagtgaccatccagcctttcccaattagacttcctctccttccacccctcatttcctttttgcacacattacaggtggtgtgttctgtgataatgaaaagcatcagaaaagcttttgtactttgtggtttcctctattttgaattttttgatcaaaaaactgattagcagaatatagtttggagtttggcttcatcttcctggggttcccctcactcccttttttgtcaaccccatctgtagcctcttcctctactcaggcagtcgacccgccacgatgagaagtgggaccagccagagggcgccaacttcaggagtccgctttcccaccaggcttcattcacccagtggacctgaactgtttggtagagccacccggcccttccttcctcattgttgtttggtatgcgcacagttcctgtgggactgggccgtgagttttccattggaaagaagttcagtggtcccattgttaactcagcctcaaatctcaactgtcaggccctacaaagaaaatggagagcctcttctggtggatgctttgctccctctgagctgcccatgctggtctggcaaacacacctttctgctttgccttcacaaaagtaatgtgttccctttcccaccccttgcctgaccctcagggagtcagcctgcttccatccatgggtgggaagacttcagcacaaaggaaagactaattcttgtcaggcatttttgaaaaggctgattatgtgtatcaaggtacagcatacgtagggttcccctaaacttgccctgtttttgtttttttagtttgttatccccttactgagcggcctctactaggtggctgtgattaaatgtcccaagcaaggatagggaaggggaatggttgagcctctggagatcattgtaaccaatcctgccagacctgtttggggcagtggggagcaaacctagataaggacctgtttggggcagcagggagcaaaatctcctttaacaaccaagcagttcctcattcacatcaacagagcgaggctgtgataacttaggaggcagcaatcctaatagtccttcagtgcattttagtctgtctccaactggacaccagtaggtagtgtcaagccagagattcggggcagtagataaatgttcattttactgatgcactttagtttttggtctgttacctgttttccagaaatttgtggccttttaggcgggagttaggcgaccaaaccagtgagagccccaatccctgcagttttgtggcttcaagtgtgggtggacagtcctaatggggatctccagctccttcctgtgggctgccacagacagctacccccagaagggtcaatgttgggagtggttgtggctctgagctgctctacagagcttcagtgtgagaggatcgagccattgaaagctcattaccagtaggacataatttttggctctccctattcacaaccagtgcacagtttgacacagtggcctcaggttcacagtgcaccatgtcactgtgctatcctacgaaatcatttgtttctaagttgtgtttattcctggagtgacatgccaccccgaatggctcactttcactgaggatgctgtcctctgatttagctgctgcctccagcctctggcttgagaacttactaaaggcacttccttcctgttaaacccctgttaactctccataaatttggtgattctctgctaggcctaagattttgagttaacatctcttgaagccaaactccaccttctgtgctttttgcttgggataatggagtttttctttagaaacagtgccaagaatgacaagatatt

SEQ ID NO: 63623 - DNA, 2596 bp, Homo sapiens
tgtggctgttctagaggatcccaggctgaatggaagagtggagactgctgcacggactctggaaccatgaacatatttgatcgaaagatcaactttgatgcgcttttaaaattttctcatataaccccgtcaacgcagcagcacctgaagaaggtctatgcaagttttgccctttgtatgtttgtggcggctgcaggggcctatgtccatatggtcactcatttcattcaggctggcctgctgtctgccttgggctccctgatattgatgatttggctgatggcaacacctcatagccatgaaactgaacagaaaagactgggacttcttgctggatttgcattccttacaggagttggcctgggccctgccctggagttttgtattgctgtcaaccccagcatccttcccactgctttcatgggcacggcaatgatctttacctgcttcaccctcagtgcactctatgccaggcgccgtagctacctctttctgggaggtatcttgatgtcagccctgagcttgttgcttttgtcttccctggggaatgttttctttggatccatttggcttttccaggcaaacctgtatgtgggactggtggtcatgtgtggcttcgtcctttttgatactcaactcattattgaaaaggccgaacatggagatcaagattatatctggcactgcattgatctcttcttagatttcattactgtcttcagaaaactcatgatgatcctggccatgaatgaaaaggataagaagaaagagaagaaatgaagtgaccatccagcctttcccaattagacttcctctccttccacccctcatttcctttttgcacacattacaggtggtgtgttctgtgataatgaaaagcatcagaaaagcttttgtactttgtggtttcctctattttgaattttttgatcaaaaaactgattagcagaatatagtttggagtttggcttcatcttcctggggttcccctcactcccttttttgtcaaccccatctgtagcctcttcctctactcaggcagtcgacccgccacgatgagaagtgggaccagccagagggcgccaacttcaggagtccgctttcccaccaggcttcattcacccagtggacctgaactgtttggtagagccacccggcccttccttcctcattgttgtttggtatgcgcacagttcctgtgggactgggccgtgagttttccattggaaagaagttcagtggtcccattgttaactcagcctcaaatctcaactgtcaggccctacaaagaaaatggagagcctcttctggtggatgctttgctccctctgagctgcccatgctggtctggcaaacacacctttctgctttgccttcacaaaagtaatgtgttccctttcccaccccttgcctgaccctcagggagtcagcctgcttccatccatgggtgggaagacttcagcacaaaggaaagactaattcttgtcaggcatttttgaaaaggctgattatgtgtatcaaggtacagcatacgtagggttcccctaaacttgccctgtttttgtttttttagtttgttatccccttactgagcggcctctactaggtggctgtgattaaatgtcccaagcaaggatagggaaggggaatggttgagcctctggagatcattgtaaccaatcctgccagacctgtttggggcagtggggagcaaacctagataaggacctgtttggggcagcagggagcaaaatctcctttaacaaccaagcagttcctcattcacatcaacagagcgaggctgtgataacttaggaggcagcaatcctaatagtccttcagtgcattttagtctgtctccaactggacaccagtaggtagtgtcaagccagagattcggggcagtagataaatgttcattttactgatgcactttagtttttggtctgttacctgttttccagaaatttgtggccttttaggcgggagttaggcgaccaaaccagtgagagccccaatccctgcagttttgtggcttcaagtgtgggtggacagtcctaatggggatctccagctccttcctgtgggctgccacagacagctacccccagaagggtcaatgttgggagtggttgtggctctgagctgctctacagagcttcagtgtgagaggatcgagccattgaaagctcattaccagtaggacataatttttggctctccctattcacaaccagtgcacagtttgacacagtggcctcaggttcacagtgcaccatgtcactgtgctatcctacgaaatcatttgtttctaagttgtgtttattcctggagtgacatgccaccccgaatggctcactttcactgaggatgctgtcctctgatttagctgctgcctccagcctctggcttgagaacttactaaaggcacttccttcctgttaaacccctgttaactctccataaatttggtgattctctgctaggcctaagattttgagttaacatctcttgaagccaaactccaccttctgtgctttttgcttgggataatggagtttttctttagaaacagtgccaagaatgacaagatatt

SEQ ID NO: 63624 - DNA, 2570 bp, Homo sapiens
gctgacccaggtacttattcgtgttgccggcctctgggtcatgaacatatttgatcgaaagatcaactttgatgcgcttttaaaattttctcatataaccccgtcaacgcagcagcacctgaagaaggtctatgcaagttttgccctttgtatgtttgtggcggctgcaggggcctatgtccatatggtcactcatttcattcaggctggcctgctgtctgccttgggctccctgatattgatgatttggctgatggcaacacctcatagccatgaaactgaacagaaaagactgggacttcttgctggatttgcattccttacaggagttggcctgggccctgccctggagttttgtattgctgtcaaccccagcatccttcccactgctttcatgggcacggcaatgatctttacctgcttcaccctcagtgcactctatgccaggcgccgtagctacctctttctgggaggtatcttgatgtcagccctgagcttgttgcttttgtcttccctggggaatgttttctttggatccatttggcttttccaggcaaacctgtatgtgggactggtggtcatgtgtggcttcgtcctttttgatactcaactcattattgaaaaggccgaacatggagatcaagattatatctggcactgcattgatctcttcttagatttcattactgtcttcagaaaactcatgatgatcctggccatgaatgaaaaggataagaagaaagagaagaaatgaagtgaccatccagcctttcccaattagacttcctctccttccacccctcatttcctttttgcacacattacaggtggtgtgttctgtgataatgaaaagcatcagaaaagcttttgtactttgtggtttcctctattttgaattttttgatcaaaaaactgattagcagaatatagtttggagtttggcttcatcttcctggggttcccctcactcccttttttgtcaaccccatctgtagcctcttcctctactcaggcagtcgacccgccacgatgagaagtgggaccagccagagggcgccaacttcaggagtccgctttcccaccaggcttcattcacccagtggacctgaactgtttggtagagccacccggcccttccttcctcattgttgtttggtatgcgcacagttcctgtgggactgggccgtgagttttccattggaaagaagttcagtggtcccattgttaactcagcctcaaatctcaactgtcaggccctacaaagaaaatggagagcctcttctggtggatgctttgctccctctgagctgcccatgctggtctggcaaacacacctttctgctttgccttcacaaaagtaatgtgttccctttcccaccccttgcctgaccctcagggagtcagcctgcttccatccatgggtgggaagacttcagcacaaaggaaagactaattcttgtcaggcatttttgaaaaggctgattatgtgtatcaaggtacagcatacgtagggttcccctaaacttgccctgtttttgtttttttagtttgttatccccttactgagcggcctctactaggtggctgtgattaaatgtcccaagcaaggatagggaaggggaatggttgagcctctggagatcattgtaaccaatcctgccagacctgtttggggcagtggggagcaaacctagataaggacctgtttggggcagcagggagcaaaatctcctttaacaaccaagcagttcctcattcacatcaacagagcgaggctgtgataacttaggaggcagcaatcctaatagtccttcagtgcattttagtctgtctccaactggacaccagtaggtagtgtcaagccagagattcggggcagtagataaatgttcattttactgatgcactttagtttttggtctgttacctgttttccagaaatttgtggccttttaggcgggagttaggcgaccaaaccagtgagagccccaatccctgcagttttgtggcttcaagtgtgggtggacagtcctaatggggatctccagctccttcctgtgggctgccacagacagctacccccagaagggtcaatgttgggagtggttgtggctctgagctgctctacagagcttcagtgtgagaggatcgagccattgaaagctcattaccagtaggacataatttttggctctccctattcacaaccagtgcacagtttgacacagtggcctcaggttcacagtgcaccatgtcactgtgctatcctacgaaatcatttgtttctaagttgtgtttattcctggagtgacatgccaccccgaatggctcactttcactgaggatgctgtcctctgatttagctgctgcctccagcctctggcttgagaacttactaaaggcacttccttcctgttaaacccctgttaactctccataaatttggtgattctctgctaggcctaagattttgagttaacatctcttgaagccaaactccaccttctgtgctttttgcttgggataatggagtttttctttagaaacagtgccaagaatgacaagatatt

SEQ ID NO: 63625 - DNA, 698 bp, Homo sapiens
gcgaacgccgggtaaaagatcgggagcggaagtgggcgagtcagagcacatccggtgttagaagcgctggtaggccttggagaggcgggttaggaagagtggagactgctgcacggactctggaaccatgaacatatttgatcgaaagatcaactttgatgcgcttttaaaattttctcatataaccccgtcaacgcagcagcacctgaagaaggtctatgcaagttttgccctttgtatgtttgtggcggctgcaggggcctatgtccatatggtcactcatttcattcaggctggcctgctgtctgccttgggctccctgatattgatgatttggctgatggcaacacctcatagccatgaaactgaacagaaaagactgggacttcttgctggatttgcattccttacaggagttggcctgggccctgccctggagttttgtattgctgtcaaccccagcatccttcccactgctttcatgggcacggcaatgatctttacctgcttcaccctcagtgcactctatgccaggcgccgtagctacctctttctgggaggtatcttgatgtcagccctgagcttgttgcttttgtcttccctggggaatgttttctttggatccatttggcttttccaggtaagacttagcctggaactttccagcagccatttgcctcacacttctttctttcctt

SEQ ID NO: 63626 - DNA, 911 bp, Homo sapiens
aaaaaaaaaaaaaaaaaaaaaaaagcacatccggtgttagaagcgctggtaggccttggagaggcgggttaggaagacgcagggccccttggcctagcttcgatcgttcgaattcagagcacgtccttccgaggtgaaggaacgcgaaactccacccatccgattgctgttcggctgcgggcgggtcctttggtcgggctgaccctgggtgagcggcccggagccaagactcgagagtggagactgctgcacggactctggaaccatgaacatatttgatcgaaagatcaactttgatgcgcttttaaaattttctcatataaccccgtcaacgcagcagcacctgaagaaggtctatgcaagttttgccctttgtatgtttgtggcggctgcaggggcctatgtccatatggtcactcatttcattcaggctggcctgctgtctgccttgggctccctgatattgatgatttggctgatggcaacacctcatagccatgaaactgaacagaaaagactgggacttcttgctggatttgcattccttacaggagttggcctgggccctgccctggagttttgtattgctgtcaaccccagcatccttcccactgctttcatgggcacggcaatgatctttacctgcttcaccctcagtgcactctatgccaggcgccgtagctacctctttctgggaggtatcttgatgtcagccctgagcttgttgcttttgtcttccctggggaatgttttctttggatccatttggcttttccaggcaaacctgtatgtgggactggtggtcatgtgtggcttcgtcctttttgatactcaactcattattgaaaaggccgaacatggagatcaagattatatctggcactgcatagatccttcttagattcattatg

SEQ ID NO: 63627 - DNA, 2177 bp, Homo sapiens
gcgaacgccgggtaaaagatcgggagcggaagtgggcgagtcagagcacatccggtgttagaagcgctggtaggccttggagaggcgggttaggaagagtggagactgctgcacggactctggaaccatgaacatatttgatcgaaagatcaactttgatgcgcttttaaaattttctcatataaccccgtcaacgcagcagcacctgaagaaggtctatgcaagttttgccctttgtatgtttgtggcggctgcaggggcctatgtccatatggtcactcatttcattcaggctggcctgctgtctgccttgggctccctgatattgatgatttggctgatggcaacacctcatagccatgaaactgaacagaaaagactgggacttcttgctggatttgcattccttacagtcctttttgcacacattacaggtggtgtgttctgtgataatgaaaagcatcagaaaagcttttgtactttgtggtttcctctattttgaattttttgatcaaaaaactgattagcagaatatagtttggagtttggcttcatcttcctggggttcccctcactcccttttttgtcaaccccatctgtagcctcttcctctactcaggcagtcgacccgccacgatgagaagtgggaccagccagagggcgccaacttcaggagtccgctttcccaccaggcttcattcacccagtggacctgaactgtttggtagagccacccggcccttccttcctcattgttgtttggtatgcgcacagttcctgtgggactgggccgtgagttttccattggaaagaagttcagtggtcccattgttaactcagcctcaaatctcaactgtcaggccctacaaagaaaatggagagcctcttctggtggatgctttgctccctctgagctgcccatgctggtctggcaaacacacctttctgctttgccttcacaaaagtaatgtgttccctttcccaccccttgcctgaccctcagggagtcagcctgcttccatccatgggtgggaagacttcagcacaaaggaaagactaattcttgtcaggcatttttgaaaaggctgattatgtgtatcaaggtacagcatacgtagggttcccctaaacttgccctgtttttgtttttttagtttgttatccccttactgagcggcctctactaggtggctgtgattaaatgtcccaagcaaggatagggaaggggaatggttgagcctctggagatcattgtaaccaatcctgccagacctgtttggggcagtggggagcaaacctagataaggacctgtttggggcagcagggagcaaaatctcctttaacaaccaagcagttcctcattcacatcaacagagcgaggctgtgataacttaggaggcagcaatcctaatagtccttcagtgcattttagtctgtctccaactggacaccagtaggtagtgtcaagccagagattcggggcagtagataaatgttcattttactgatgcactttagtttttggtctgttacctgttttccagaaatttgtggccttttaggcgggagttaggcgaccaaaccagtgagagccccaatccctgcagttttgtggcttcaagtgtgggtggacagtcctaatggggatctccagctccttcctgtgggctgccacagacagctacccccagaagggtcaatgttgggagtggttgtggctctgagctgctctacagagcttcagtgtgagaggatcgagccattgaaagctcattaccagtaggacataatttttggctctccctattcacaaccagtgcacagtttgacacagtggcctcaggttcacagtgcaccatgtcactgtgctatcctacgaaatcatttgtttctaagttgtgtttattcctggagtgacatgccaccccgaatggctcactttcactgaggatgctgtcctctgatttagctgctgcctccagcctctggcttgagaacttactaaaggcacttccttcctgttaaacccctgttaactctccataaatttggtgattctctgctaggcctaagattttgagttaacatctcttgaagccaaactccaccttctgtgctttttgcttgggataatggagtttttctttagaaacagtgccaagaatgacaagatatt

SEQ ID NO: 63628 - DNA, 1965 bp, Homo sapiens
gcgaacgccgggtaaaagatcgggagcggaagtgggcgagtcagagcacatccggtgttagaagcgctggtaggccttggagaggcgggttaggaagagtggagactgctgcacggactctggaaccatgaacatatttgatcgaaagatcaactttgatgcgcttttaaaattttctcatatctccttccacccctcatttcctttttgcacacattacaggtggtgtgttctgtgataatgaaaagcatcagaaaagcttttgtactttgtggtttcctctattttgaattttttgatcaaaaaactgattagcagaatatagtttggagtttggcttcatcttcctggggttcccctcactcccttttttgtcaaccccatctgtagcctcttcctctactcaggcagtcgacccgccacgatgagaagtgggaccagccagagggcgccaacttcaggagtccgctttcccaccaggcttcattcacccagtggacctgaactgtttggtagagccacccggcccttccttcctcattgttgtttggtatgcgcacagttcctgtgggactgggccgtgagttttccattggaaagaagttcagtggtcccattgttaactcagcctcaaatctcaactgtcaggccctacaaagaaaatggagagcctcttctggtggatgctttgctccctctgagctgcccatgctggtctggcaaacacacctttctgctttgccttcacaaaagtaatgtgttccctttcccaccccttgcctgaccctcagggagtcagcctgcttccatccatgggtgggaagacttcagcacaaaggaaagactaattcttgtcaggcatttttgaaaaggctgattatgtgtatcaaggtacagcatacgtagggttcccctaaacttgccctgtttttgtttttttagtttgttatccccttactgagcggcctctactaggtggctgtgattaaatgtcccaagcaaggatagggaaggggaatggttgagcctctggagatcattgtaaccaatcctgccagacctgtttggggcagtggggagcaaacctagataaggacctgtttggggcagcagggagcaaaatctcctttaacaaccaagcagttcctcattcacatcaacagagcgaggctgtgataacttaggaggcagcaatcctaatagtccttcagtgcattttagtctgtctccaactggacaccagtaggtagtgtcaagccagagattcggggcagtagataaatgttcattttactgatgcactttagtttttggtctgttacctgttttccagaaatttgtggccttttaggcgggagttaggcgaccaaaccagtgagagccccaatccctgcagttttgtggcttcaagtgtgggtggacagtcctaatggggatctccagctccttcctgtgggctgccacagacagctacccccagaagggtcaatgttgggagtggttgtggctctgagctgctctacagagcttcagtgtgagaggatcgagccattgaaagctcattaccagtaggacataatttttggctctccctattcacaaccagtgcacagtttgacacagtggcctcaggttcacagtgcaccatgtcactgtgctatcctacgaaatcatttgtttctaagttgtgtttattcctggagtgacatgccaccccgaatggctcactttcactgaggatgctgtcctctgatttagctgctgcctccagcctctggcttgagaacttactaaaggcacttccttcctgttaaacccctgttaactctccataaatttggtgattctctgctaggcctaagattttgagttaacatctcttgaagccaaactccaccttctgtgctttttgcttgggataatggagtttttctttagaaacagtgccaagaatgacaagatatt

SEQ ID NO: 63629 - DNA, 437 bp, Homo sapiens
aggaccacaggtggacgtcaccagctccagctaatttttgtattttttgtggagatggggtatcaccatgttgcccaggcttaccaactccagaactcaagcgatttatttatttattattattattatgttttttttttgagacagtctcactcccttacccaagctggagtgcagtggtgcaatctcggctcactgcaacctccgcctccctggtgcattcaattctcatgcctcagcctcctaagcagctgagatgacaggcgcgcaccaccatgcccagctaatttttgtatttttagtagagacgggcttttgccaagttgtccagcctggtctcgaactccacacctcaagcgattcgcccgccttgacctcccaaattgctaggattacaggtgtaatcctttcctaaagaaaaagagtcatctctcctg

SEQ ID NO: 63630 - DNA, 964 bp, Homo sapiens
tgtggctgttctagaggatcccaggctgaatggaagagtggagactgctgcacggactctggaaccatgaacatatttgatcgaaagatcaactttgatgcgcttttaaaattttctcatataaccccgtcaacgcagcagcacctgaagaaggtctatgcaagttttgccctttgtatgtttgtggcggctgcaggggcctatgtccatatggtcactcatttcattcaggctggcctgctgtctgccttgggctccctgatattgatgatttggctgatggcaacacctcatagccatgaaactgaacagaaaagactgggacttcttgctggatttgcattccttacaggagttggcctgggccctgccctggagttttgtattgctgtcaaccccagcatccttcccactgctttcatgggcacggcaatgatctttacctgcttcaccctcagtgcactctatgccaggcgccgtagctacctctttctgggaggtatcttgatgtcagccctgagcttgttgcttttgtcttccctggggaatgttttctttggatccatttggcttttccaggcaaacctgtatgtgggactggtggtcatgtgtggcttcgtcctttttgatactcaactcattattgaaaaggccgaacatggagatcaagattatatctggcactgcattgatctcttcttagatttcattactgtcttcagaaaactcatgatgatcctggccatgaatgaaagtagagagagaggaagggtgacatcagccttccagtgagtccgtcttcaactcattccttggccctaggggggtcggaaagcagaccaaaaccggcggggccatacaaggcaacacggcaatgggggggccccgggccacttgagccggccctagagaccgaagaaggagagcacccacaaagcgctggcggggaggtctaacatactta

SEQ ID NO: 63631 - DNA, 524 bp, Homo sapiens
  misc_feature (499)..(499): n is a, c, g, or t
gtgacacgcgaggctcctcagttacttagccaacggcagaggcgggaagtgagaggagtctggggctggggctgccttccaggcccacggggcggccccgctcttttcggattggttacctttgggcagagtggagactgctgcacggactctggaaccatgaacatatttgatcgaaagatcaactttgatgcgcttttaaaattttctcatataaccccgtcaacgcagcagcacctgaagaaggtctatgcaagttttgccctttgtatgtttgtggcggctgcaggggcctatgtccatatggtcactcatttcattcaggctggcctgctgtctgccttgggctccctgatattgatgatttggctgatggcaacacctcatagccatgaaactgaacagaaaagactgggacttcttgctggatttgcattccttacagcaaggggtggctggcctcctgggggtttgttttctgaacccagaccctcccctncttcagggacggaaatattttacct

SEQ ID NO: 63632 - DNA, 2661 bp, Homo sapiens
  misc_feature (19)..(19): n is a, c, g, or t
  misc_feature (43)..(43): n is a, c, g, or t
aattcgcggccgcgtacgnaccggctgcgagaagacgacaganccggaggcacatccggtgttagaagcgctggtaggccttggagaggcgggttaggaagagtggagactgctgcacggactctggaaccatgaacatatttgatcgaaagatcaactttgatgcgcttttaaaattttctcatataaccccgtcaacgcagcagcacctgaagaaggtctatgcaagttttgccctttgtatgtttgtggcggctgcaggggcctatgtccatatggtcactcatttcattcaggctggcctgctgtctgccttgggctccctgatattgatgatttggctgatggcaacacctcatagccatgaaactgaacagaaaagactgggacttcttgctggatttgcattccttacaggagttggcctgggccctgccctggagttttgtattgctgtcaaccccagcatccttcccactgctttcatgggcacggcaatgatctttacctgcttcaccctcagtgcactctatgccaggcgccgtagctacctctttctgggaggtatcttgatgtcagccctgagcttgttgcttttgtcttccctggggaatgttttctttggatccatttggcttttccaggcaaacctgtatgtgggactggtggtcatgtgtggcttcgtcctttttgatactcaactcattattgaaaaggccgaacatggagatcaagattatatctggcactgcattgatctcttcttagatttcattactgtcttcagaaaactcatgatgatcctggccatgaatgaaaaggataagaagaaagagaagaaatgaagtgaccatccagcctttcccaattagacttcctctccttccacccctcatttcctttttgcacacattacaggtggtgtgttctgtgataatgaaaagcatcagaaaagcttttgtactttgtggtttcctctattttgaattttttgatcaaaaaactgattagcagaatatagtttggagtttggcttcatcttcctggggttcccctcactcccttttttgtcaaccccatctgtagcctcttcctctactcaggcagtcgacccgccacgatgagaagtgggaccagccagagggcgccaacttcaggagtccgctttcccaccaggcttcattcacccagtggacctgaactgtttggtagagccacccggcccttccttcctcattgttgtttggtatgcgcacagttcctgtgggactgggccgtgagttttccattggaaagaagttcagtggtcccattgttaactcagcctcaaatctcaactgtcaggccctacaaagaaaatggagagcctcttctggtggatgctttgctccctctgagctgcccatgctggtctggcaaacacacctttctgctttgccttcacaaaagtaatgtgttccctttcccaccccttgcctgaccctcagggagtcagcctgcttccatccatgggtgggaagacttcagcacaaaggaaagactaattcttgtcaggcatttttgaaaaggctgattatgtgtatcaaggtacagcatacgtagggttcccctaaacttgccctgtttttgtttttttagtttgttatccccttactgagcggcctctactaggtggctgtgattaaatgtcccaagcaaggatagggaaggggaatggttgagcctctggagatcattgtaaccaatcctgccagacctgtttggggcagtggggagcaaacctagataaggacctgtttggggcagcagggagcaaaatctcctttaacaaccaagcagttcctcattcacatcaacagagcgaggctgtgataacttaggaggcagcaatcctaatagtccttcagtgcattttagtctgtctccaactggacaccagtaggtagtgtcaagccagagattcggggcagtagataaatgttcattttactgatgcactttagtttttggtctgttacctgttttccagaaatttgtggccttttaggcgggagttaggcgaccaaaccagtgagagccccaatccctgcagttttgtggcttcaagtgtgggtggacagtcctaatggggatctccagctccttcctgtgggctgccacagacagctacccccagaagggtcaatgttgggagtggttgtggctctgagctgctctacagagcttcagtgtgagaggatcgagccattgaaagctcattaccagtaggacataatttttggctctccctattcacaaccagtgcacagtttgacacagtggcctcaggttcacagtgcaccatgtcactgtgctatcctacgaaatcatttgtttctaagttgtgtttattcctggagtgacatgccaccccgaatggctcactttcactgaggatgctgtcctctgatttagctgctgcctccagcctctggcttgagaacttactaaaggcacttccttcctgttaaacccctgttaactctccataaatttggtgattctctgctaggcctaagattttgagttaacatctcttgaagccaaactccaccttctgtgctttttgcttgggataatggagtttttctttagaaacagtgccaagaatgacaagatatt

SEQ ID NO: 63633 - DNA, 1033 bp, Homo sapiens
  misc_feature (887)..(887): n is a, c, g, or t
gcgaacgccgggtaaaagatcgggagcggaagtgggcgagtcagagcacatccggtgttagaagcgctggtaggccttggagaggcgggttaggaagagtggagactgctgcacggactctggaaccatgaacatatttgatcgaaagatcaactttgatgcgcttttaaaattttctcatataaccccgtcaacgcagcagcacctgaagaaggtctatgcaagttttgccctttgtatgtttgtggcggctgcaggggcctatgtccatatggtcactcatttcattcaggctggcctgctgtctgccttgggctccctgatattgatgatttggctgatggcaacacctcatagccatgaaactgaacagaaaagactgggacttcttgctggatttgcattccttacaggagttggcctgggccctgccctggagttttgtattgctgtcaaccccagcatccttcccactgctttcatgggcacggcaatgatctttacctgcttcaccctcagtgcactctatgccaggcgccgtagctacctctttctgggaggtatcttgatgtcagccctgagcttgttgcttttgtcttccctggggaatgttttctttggatccatttggcttttccaggcaaacctgtatgtgggactggtggtcatgtgtggcttcgtcctttttgatactcaactcattattgaaaaggccgaacatggagatcaagattatatctggcactgcattgatctcttcttagatttcattactgtcttcagaaaactcatgatgatcctggccatgaatgaaagtagagacgagagaaatgaatgacatcagcttccatagatcttcttcacctcattctttggccttacggggngtccgggatatgaacctcagaaaaaaaaaatcaaaaaaggggcgctgattccggggcactggccctttgaaaggccagggaataaggggcgaacggggaaacaggttggccttgggtatgccacaataaatgttcttgttgtaaac

SEQ ID NO: 63634 - DNA, 2795 bp, Homo sapiens
aaaaaaaaaaaaaaaaaaaaaaaagcacatccggtgttagaagcgctggtaggccttggagaggcgggttaggaagacgcagggccccttggcctagcttcgatcgttcgaattcagagcacgtccttccgaggtgaaggaacgcgaaactccacccatccgattgctgttcggctgcgggcgggtcctttggtcgggctgaccctgggtgagcggcccggagccaagactcgagagtggagactgctgcacggactctggaaccatgaacatatttgatcgaaagatcaactttgatgcgcttttaaaattttctcatataaccccgtcaacgcagcagcacctgaagaaggtctatgcaagttttgccctttgtatgtttgtggcggctgcaggggcctatgtccatatggtcactcatttcattcaggctggcctgctgtctgccttgggctccctgatattgatgatttggctgatggcaacacctcatagccatgaaactgaacagaaaagactgggacttcttgctggatttgcattccttacaggagttggcctgggccctgccctggagttttgtattgctgtcaaccccagcatccttcccactgctttcatgggcacggcaatgatctttacctgcttcaccctcagtgcactctatgccaggcgccgtagctacctctttctgggaggtatcttgatgtcagccctgagcttgttgcttttgtcttccctggggaatgttttctttggatccatttggcttttccaggcaaacctgtatgtgggactggtggtcatgtgtggcttcgtcctttttgatactcaactcattattgaaaaggccgaacatggagatcaagattatatctggcactgcattgatctcttcttagatttcattactgtcttcagaaaactcatgatgatcctggccatgaatgaaaaggataagaagaaagagaagaaatgaagtgaccatccagcctttcccaattagacttcctctccttccacccctcatttcctttttgcacacattacaggtggtgtgttctgtgataatgaaaagcatcagaaaagcttttgtactttgtggtttcctctattttgaattttttgatcaaaaaactgattagcagaatatagtttggagtttggcttcatcttcctggggttcccctcactcccttttttgtcaaccccatctgtagcctcttcctctactcaggcagtcgacccgccacgatgagaagtgggaccagccagagggcgccaacttcaggagtccgctttcccaccaggcttcattcacccagtggacctgaactgtttggtagagccacccggcccttccttcctcattgttgtttggtatgcgcacagttcctgtgggactgggccgtgagttttccattggaaagaagttcagtggtcccattgttaactcagcctcaaatctcaactgtcaggccctacaaagaaaatggagagcctcttctggtggatgctttgctccctctgagctgcccatgctggtctggcaaacacacctttctgctttgccttcacaaaagtaatgtgttccctttcccaccccttgcctgaccctcagggagtcagcctgcttccatccatgggtgggaagacttcagcacaaaggaaagactaattcttgtcaggcatttttgaaaaggctgattatgtgtatcaaggtacagcatacgtagggttcccctaaacttgccctgtttttgtttttttagtttgttatccccttactgagcggcctctactaggtggctgtgattaaatgtcccaagcaaggatagggaaggggaatggttgagcctctggagatcattgtaaccaatcctgccagacctgtttggggcagtggggagcaaacctagataaggacctgtttggggcagcagggagcaaaatctcctttaacaaccaagcagttcctcattcacatcaacagagcgaggctgtgataacttaggaggcagcaatcctaatagtccttcagtgcattttagtctgtctccaactggacaccagtaggtagtgtcaagccagagattcggggcagtagataaatgttcattttactgatgcactttagtttttggtctgttacctgttttccagaaatttgtggccttttaggcgggagttaggcgaccaaaccagtgagagccccaatccctgcagttttgtggcttcaagtgtgggtggacagtcctaatggggatctccagctccttcctgtgggctgccacagacagctacccccagaagggtcaatgttgggagtggttgtggctctgagctgctctacagagcttcagtgtgagaggatcgagccattgaaagctcattaccagtaggacataatttttggctctccctattcacaaccagtgcacagtttgacacagtggcctcaggttcacagtgcaccatgtcactgtgctatcctacgaaatcatttgtttctaagttgtgtttattcctggagtgacatgccaccccgaatggctcactttcactgaggatgctgtcctctgatttagctgctgcctccagcctctggcttgagaacttactaaaggcacttccttcctgttaaacccctgttaactctccataaatttggtgattctctgctaggcctaagattttgagttaacatctcttgaagccaaactccaccttctgtgctttttgcttgggataatggagtttttctttagaaacagtgccaagaatgacaagatatt

SEQ ID NO: 63635 - DNA, 2608 bp, Homo sapiens
aaaaaaaaaaaaaaaaaaaaaaaagcacatccggtgttagaagcgctgagtggagactgctgcacggactctggaaccatgaacatatttgatcgaaagatcaactttgatgcgcttttaaaattttctcatataaccccgtcaacgcagcagcacctgaagaaggtctatgcaagttttgccctttgtatgtttgtggcggctgcaggggcctatgtccatatggtcactcatttcattcaggctggcctgctgtctgccttgggctccctgatattgatgatttggctgatggcaacacctcatagccatgaaactgaacagaaaagactgggacttcttgctggatttgcattccttacaggagttggcctgggccctgccctggagttttgtattgctgtcaaccccagcatccttcccactgctttcatgggcacggcaatgatctttacctgcttcaccctcagtgcactctatgccaggcgccgtagctacctctttctgggaggtatcttgatgtcagccctgagcttgttgcttttgtcttccctggggaatgttttctttggatccatttggcttttccaggcaaacctgtatgtgggactggtggtcatgtgtggcttcgtcctttttgatactcaactcattattgaaaaggccgaacatggagatcaagattatatctggcactgcattgatctcttcttagatttcattactgtcttcagaaaactcatgatgatcctggccatgaatgaaaaggataagaagaaagagaagaaatgaagtgaccatccagcctttcccaattagacttcctctccttccacccctcatttcctttttgcacacattacaggtggtgtgttctgtgataatgaaaagcatcagaaaagcttttgtactttgtggtttcctctattttgaattttttgatcaaaaaactgattagcagaatatagtttggagtttggcttcatcttcctggggttcccctcactcccttttttgtcaaccccatctgtagcctcttcctctactcaggcagtcgacccgccacgatgagaagtgggaccagccagagggcgccaacttcaggagtccgctttcccaccaggcttcattcacccagtggacctgaactgtttggtagagccacccggcccttccttcctcattgttgtttggtatgcgcacagttcctgtgggactgggccgtgagttttccattggaaagaagttcagtggtcccattgttaactcagcctcaaatctcaactgtcaggccctacaaagaaaatggagagcctcttctggtggatgctttgctccctctgagctgcccatgctggtctggcaaacacacctttctgctttgccttcacaaaagtaatgtgttccctttcccaccccttgcctgaccctcagggagtcagcctgcttccatccatgggtgggaagacttcagcacaaaggaaagactaattcttgtcaggcatttttgaaaaggctgattatgtgtatcaaggtacagcatacgtagggttcccctaaacttgccctgtttttgtttttttagtttgttatccccttactgagcggcctctactaggtggctgtgattaaatgtcccaagcaaggatagggaaggggaatggttgagcctctggagatcattgtaaccaatcctgccagacctgtttggggcagtggggagcaaacctagataaggacctgtttggggcagcagggagcaaaatctcctttaacaaccaagcagttcctcattcacatcaacagagcgaggctgtgataacttaggaggcagcaatcctaatagtccttcagtgcattttagtctgtctccaactggacaccagtaggtagtgtcaagccagagattcggggcagtagataaatgttcattttactgatgcactttagtttttggtctgttacctgttttccagaaatttgtggccttttaggcgggagttaggcgaccaaaccagtgagagccccaatccctgcagttttgtggcttcaagtgtgggtggacagtcctaatggggatctccagctccttcctgtgggctgccacagacagctacccccagaagggtcaatgttgggagtggttgtggctctgagctgctctacagagcttcagtgtgagaggatcgagccattgaaagctcattaccagtaggacataatttttggctctccctattcacaaccagtgcacagtttgacacagtggcctcaggttcacagtgcaccatgtcactgtgctatcctacgaaatcatttgtttctaagttgtgtttattcctggagtgacatgccaccccgaatggctcactttcactgaggatgctgtcctctgatttagctgctgcctccagcctctggcttgagaacttactaaaggcacttccttcctgttaaacccctgttaactctccataaatttggtgattctctgctaggcctaagattttgagttaacatctcttgaagccaaactccaccttctgtgctttttgcttgggataatggagtttttctttagaaacagtgccaagaatgacaagatatt

SEQ ID NO: 63636 - DNA, 2620 bp, Homo sapiens
  misc_feature (28)..(28): n is a, c, g, or t
atacggctaggtacgaggccgggtggtncgctggtaggcctggagaggcgggttaggaagagtggagactgctgcacggactctggaaccatgaacatatttgatcgaaagatcaactttgatgcgcttttaaaattttctcatataaccccgtcaacgcagcagcacctgaagaaggtctatgcaagttttgccctttgtatgtttgtggcggctgcaggggcctatgtccatatggtcactcatttcattcaggctggcctgctgtctgccttgggctccctgatattgatgatttggctgatggcaacacctcatagccatgaaactgaacagaaaagactgggacttcttgctggatttgcattccttacaggagttggcctgggccctgccctggagttttgtattgctgtcaaccccagcatccttcccactgctttcatgggcacggcaatgatctttacctgcttcaccctcagtgcactctatgccaggcgccgtagctacctctttctgggaggtatcttgatgtcagccctgagcttgttgcttttgtcttccctggggaatgttttctttggatccatttggcttttccaggcaaacctgtatgtgggactggtggtcatgtgtggcttcgtcctttttgatactcaactcattattgaaaaggccgaacatggagatcaagattatatctggcactgcattgatctcttcttagatttcattactgtcttcagaaaactcatgatgatcctggccatgaatgaaaaggataagaagaaagagaagaaatgaagtgaccatccagcctttcccaattagacttcctctccttccacccctcatttcctttttgcacacattacaggtggtgtgttctgtgataatgaaaagcatcagaaaagcttttgtactttgtggtttcctctattttgaattttttgatcaaaaaactgattagcagaatatagtttggagtttggcttcatcttcctggggttcccctcactcccttttttgtcaaccccatctgtagcctcttcctctactcaggcagtcgacccgccacgatgagaagtgggaccagccagagggcgccaacttcaggagtccgctttcccaccaggcttcattcacccagtggacctgaactgtttggtagagccacccggcccttccttcctcattgttgtttggtatgcgcacagttcctgtgggactgggccgtgagttttccattggaaagaagttcagtggtcccattgttaactcagcctcaaatctcaactgtcaggccctacaaagaaaatggagagcctcttctggtggatgctttgctccctctgagctgcccatgctggtctggcaaacacacctttctgctttgccttcacaaaagtaatgtgttccctttcccaccccttgcctgaccctcagggagtcagcctgcttccatccatgggtgggaagacttcagcacaaaggaaagactaattcttgtcaggcatttttgaaaaggctgattatgtgtatcaaggtacagcatacgtagggttcccctaaacttgccctgtttttgtttttttagtttgttatccccttactgagcggcctctactaggtggctgtgattaaatgtcccaagcaaggatagggaaggggaatggttgagcctctggagatcattgtaaccaatcctgccagacctgtttggggcagtggggagcaaacctagataaggacctgtttggggcagcagggagcaaaatctcctttaacaaccaagcagttcctcattcacatcaacagagcgaggctgtgataacttaggaggcagcaatcctaatagtccttcagtgcattttagtctgtctccaactggacaccagtaggtagtgtcaagccagagattcggggcagtagataaatgttcattttactgatgcactttagtttttggtctgttacctgttttccagaaatttgtggccttttaggcgggagttaggcgaccaaaccagtgagagccccaatccctgcagttttgtggcttcaagtgtgggtggacagtcctaatggggatctccagctccttcctgtgggctgccacagacagctacccccagaagggtcaatgttgggagtggttgtggctctgagctgctctacagagcttcagtgtgagaggatcgagccattgaaagctcattaccagtaggacataatttttggctctccctattcacaaccagtgcacagtttgacacagtggcctcaggttcacagtgcaccatgtcactgtgctatcctacgaaatcatttgtttctaagttgtgtttattcctggagtgacatgccaccccgaatggctcactttcactgaggatgctgtcctctgatttagctgctgcctccagcctctggcttgagaacttactaaaggcacttccttcctgttaaacccctgttaactctccataaatttggtgattctctgctaggcctaagattttgagttaacatctcttgaagccaaactccaccttctgtgctttttgcttgggataatggagtttttctttagaaacagtgccaagaatgacaagatatt

SEQ ID NO: 63637 - DNA, 2838 bp, Homo sapiens
gtgacacgcgaggctcctcagttacttagccaacggcagaggcgggaagtgagaggagtctggggctggggctgccttccaggcccacggggcggccccgctcttttcggattggttacctttgggcagtagagacgggcttttgccaagttgtccagcctggtctcgaactccacacctcaagcgattcgcccgccttgacctcccaaattgctaggattacaggtgtaatcctttcctaaagaaaaagagtcatctctcctgaagaataagaaaagagtggagactgctgcacggactctggaaccatgaacatatttgatcgaaagatcaactttgatgcgcttttaaaattttctcatataaccccgtcaacgcagcagcacctgaagaaggtctatgcaagttttgccctttgtatgtttgtggcggctgcaggggcctatgtccatatggtcactcatttcattcaggctggcctgctgtctgccttgggctccctgatattgatgatttggctgatggcaacacctcatagccatgaaactgaacagaaaagactgggacttcttgctggatttgcattccttacaggagttggcctgggccctgccctggagttttgtattgctgtcaaccccagcatccttcccactgctttcatgggcacggcaatgatctttacctgcttcaccctcagtgcactctatgccaggcgccgtagctacctctttctgggaggtatcttgatgtcagccctgagcttgttgcttttgtcttccctggggaatgttttctttggatccatttggcttttccaggcaaacctgtatgtgggactggtggtcatgtgtggcttcgtcctttttgatactcaactcattattgaaaaggccgaacatggagatcaagattatatctggcactgcattgatctcttcttagatttcattactgtcttcagaaaactcatgatgatcctggccatgaatgaaaaggataagaagaaagagaagaaatgaagtgaccatccagcctttcccaattagacttcctctccttccacccctcatttcctttttgcacacattacaggtggtgtgttctgtgataatgaaaagcatcagaaaagcttttgtactttgtggtttcctctattttgaattttttgatcaaaaaactgattagcagaatatagtttggagtttggcttcatcttcctggggttcccctcactcccttttttgtcaaccccatctgtagcctcttcctctactcaggcagtcgacccgccacgatgagaagtgggaccagccagagggcgccaacttcaggagtccgctttcccaccaggcttcattcacccagtggacctgaactgtttggtagagccacccggcccttccttcctcattgttgtttggtatgcgcacagttcctgtgggactgggccgtgagttttccattggaaagaagttcagtggtcccattgttaactcagcctcaaatctcaactgtcaggccctacaaagaaaatggagagcctcttctggtggatgctttgctccctctgagctgcccatgctggtctggcaaacacacctttctgctttgccttcacaaaagtaatgtgttccctttcccaccccttgcctgaccctcagggagtcagcctgcttccatccatgggtgggaagacttcagcacaaaggaaagactaattcttgtcaggcatttttgaaaaggctgattatgtgtatcaaggtacagcatacgtagggttcccctaaacttgccctgtttttgtttttttagtttgttatccccttactgagcggcctctactaggtggctgtgattaaatgtcccaagcaaggatagggaaggggaatggttgagcctctggagatcattgtaaccaatcctgccagacctgtttggggcagtggggagcaaacctagataaggacctgtttggggcagcagggagcaaaatctcctttaacaaccaagcagttcctcattcacatcaacagagcgaggctgtgataacttaggaggcagcaatcctaatagtccttcagtgcattttagtctgtctccaactggacaccagtaggtagtgtcaagccagagattcggggcagtagataaatgttcattttactgatgcactttagtttttggtctgttacctgttttccagaaatttgtggccttttaggcgggagttaggcgaccaaaccagtgagagccccaatccctgcagttttgtggcttcaagtgtgggtggacagtcctaatggggatctccagctccttcctgtgggctgccacagacagctacccccagaagggtcaatgttgggagtggttgtggctctgagctgctctacagagcttcagtgtgagaggatcgagccattgaaagctcattaccagtaggacataatttttggctctccctattcacaaccagtgcacagtttgacacagtggcctcaggttcacagtgcaccatgtcactgtgctatcctacgaaatcatttgtttctaagttgtgtttattcctggagtgacatgccaccccgaatggctcactttcactgaggatgctgtcctctgatttagctgctgcctccagcctctggcttgagaacttactaaaggcacttccttcctgttaaacccctgttaactctccataaatttggtgattctctgctaggcctaagattttgagttaacatctcttgaagccaaactccaccttctgtgctttttgcttgggataatggagtttttctttagaaacagtgccaagaatgacaagatatt

SEQ ID NO: 63638 - DNA, 2500 bp, Homo sapiens
atacggctaggtacgaggccgggtggaaccccgtcaacgcagcagcacctgaagaaggtctatgcaagttttgccctttgtatgtttgtggcggctgcaggggcctatgtccatatggtcactcatttcattcaggctggcctgctgtctgccttgggctccctgatattgatgatttggctgatggcaacacctcatagccatgaaactgaacagaaaagactgggacttcttgctggatttgcattccttacaggagttggcctgggccctgccctggagttttgtattgctgtcaaccccagcatccttcccactgctttcatgggcacggcaatgatctttacctgcttcaccctcagtgcactctatgccaggcgccgtagctacctctttctgggaggtatcttgatgtcagccctgagcttgttgcttttgtcttccctggggaatgttttctttggatccatttggcttttccaggcaaacctgtatgtgggactggtggtcatgtgtggcttcgtcctttttgatactcaactcattattgaaaaggccgaacatggagatcaagattatatctggcactgcattgatctcttcttagatttcattactgtcttcagaaaactcatgatgatcctggccatgaatgaaaaggataagaagaaagagaagaaatgaagtgaccatccagcctttcccaattagacttcctctccttccacccctcatttcctttttgcacacattacaggtggtgtgttctgtgataatgaaaagcatcagaaaagcttttgtactttgtggtttcctctattttgaattttttgatcaaaaaactgattagcagaatatagtttggagtttggcttcatcttcctggggttcccctcactcccttttttgtcaaccccatctgtagcctcttcctctactcaggcagtcgacccgccacgatgagaagtgggaccagccagagggcgccaacttcaggagtccgctttcccaccaggcttcattcacccagtggacctgaactgtttggtagagccacccggcccttccttcctcattgttgtttggtatgcgcacagttcctgtgggactgggccgtgagttttccattggaaagaagttcagtggtcccattgttaactcagcctcaaatctcaactgtcaggccctacaaagaaaatggagagcctcttctggtggatgctttgctccctctgagctgcccatgctggtctggcaaacacacctttctgctttgccttcacaaaagtaatgtgttccctttcccaccccttgcctgaccctcagggagtcagcctgcttccatccatgggtgggaagacttcagcacaaaggaaagactaattcttgtcaggcatttttgaaaaggctgattatgtgtatcaaggtacagcatacgtagggttcccctaaacttgccctgtttttgtttttttagtttgttatccccttactgagcggcctctactaggtggctgtgattaaatgtcccaagcaaggatagggaaggggaatggttgagcctctggagatcattgtaaccaatcctgccagacctgtttggggcagtggggagcaaacctagataaggacctgtttggggcagcagggagcaaaatctcctttaacaaccaagcagttcctcattcacatcaacagagcgaggctgtgataacttaggaggcagcaatcctaatagtccttcagtgcattttagtctgtctccaactggacaccagtaggtagtgtcaagccagagattcggggcagtagataaatgttcattttactgatgcactttagtttttggtctgttacctgttttccagaaatttgtggccttttaggcgggagttaggcgaccaaaccagtgagagccccaatccctgcagttttgtggcttcaagtgtgggtggacagtcctaatggggatctccagctccttcctgtgggctgccacagacagctacccccagaagggtcaatgttgggagtggttgtggctctgagctgctctacagagcttcagtgtgagaggatcgagccattgaaagctcattaccagtaggacataatttttggctctccctattcacaaccagtgcacagtttgacacagtggcctcaggttcacagtgcaccatgtcactgtgctatcctacgaaatcatttgtttctaagttgtgtttattcctggagtgacatgccaccccgaatggctcactttcactgaggatgctgtcctctgatttagctgctgcctccagcctctggcttgagaacttactaaaggcacttccttcctgttaaacccctgttaactctccataaatttggtgattctctgctaggcctaagattttgagttaacatctcttgaagccaaactccaccttctgtgctttttgcttgggataatggagtttttctttagaaacagtgccaagaatgacaagatatt

SEQ ID NO: 63639 - DNA, 2611 bp, Homo sapiens
gcgaacgccgggtaaaagatcgggagcggaagtgggcgagtcagagcacatccggtgttagaagcgctggtaggccttggagaggcgggttaggaagagtggagactgctgcacggactctggaaccatgaacatatttgatcgaaagatcaactttgatgcgcttttaaaattttctcatataaccccgtcaacgcagcagcacctgaagaaggtctatgcaagttttgccctttgtatgtttgtggcggctgcaggggcctatgtccatatggtcactcatttcattcaggctggcctgctgtctgccttgggctccctgatattgatgatttggctgatggcaacacctcatagccatgaaactgaacagaaaagactgggacttcttgctggatttgcattccttacaggagttggcctgggccctgccctggagttttgtattgctgtcaaccccagttcaccctcagtgcactctatgccaggcgccgtagctacctctttctgggaggtatcttgatgtcagccctgagcttgttgcttttgtcttccctggggaatgttttctttggatccatttggcttttccaggcaaacctgtatgtgggactggtggtcatgtgtggcttcgtcctttttgatactcaactcattattgaaaaggccgaacatggagatcaagattatatctggcactgcattgatctcttcttagatttcattactgtcttcagaaaactcatgatgatcctggccatgaatgaaaaggataagaagaaagagaagaaatgaagtgaccatccagcctttcccaattagacttcctctccttccacccctcatttcctttttgcacacattacaggtggtgtgttctgtgataatgaaaagcatcagaaaagcttttgtactttgtggtttcctctattttgaattttttgatcaaaaaactgattagcagaatatagtttggagtttggcttcatcttcctggggttcccctcactcccttttttgtcaaccccatctgtagcctcttcctctactcaggcagtcgacccgccacgatgagaagtgggaccagccagagggcgccaacttcaggagtccgctttcccaccaggcttcattcacccagtggacctgaactgtttggtagagccacccggcccttccttcctcattgttgtttggtatgcgcacagttcctgtgggactgggccgtgagttttccattggaaagaagttcagtggtcccattgttaactcagcctcaaatctcaactgtcaggccctacaaagaaaatggagagcctcttctggtggatgctttgctccctctgagctgcccatgctggtctggcaaacacacctttctgctttgccttcacaaaagtaatgtgttccctttcccaccccttgcctgaccctcagggagtcagcctgcttccatccatgggtgggaagacttcagcacaaaggaaagactaattcttgtcaggcatttttgaaaaggctgattatgtgtatcaaggtacagcatacgtagggttcccctaaacttgccctgtttttgtttttttagtttgttatccccttactgagcggcctctactaggtggctgtgattaaatgtcccaagcaaggatagggaaggggaatggttgagcctctggagatcattgtaaccaatcctgccagacctgtttggggcagtggggagcaaacctagataaggacctgtttggggcagcagggagcaaaatctcctttaacaaccaagcagttcctcattcacatcaacagagcgaggctgtgataacttaggaggcagcaatcctaatagtccttcagtgcattttagtctgtctccaactggacaccagtaggtagtgtcaagccagagattcggggcagtagataaatgttcattttactgatgcactttagtttttggtctgttacctgttttccagaaatttgtggccttttaggcgggagttaggcgaccaaaccagtgagagccccaatccctgcagttttgtggcttcaagtgtgggtggacagtcctaatggggatctccagctccttcctgtgggctgccacagacagctacccccagaagggtcaatgttgggagtggttgtggctctgagctgctctacagagcttcagtgtgagaggatcgagccattgaaagctcattaccagtaggacataatttttggctctccctattcacaaccagtgcacagtttgacacagtggcctcaggttcacagtgcaccatgtcactgtgctatcctacgaaatcatttgtttctaagttgtgtttattcctggagtgacatgccaccccgaatggctcactttcactgaggatgctgtcctctgatttagctgctgcctccagcctctggcttgagaacttactaaaggcacttccttcctgttaaacccctgttaactctccataaatttggtgattctctgctaggcctaagattttgagttaacatctcttgaagccaaactccaccttctgtgctttttgcttgggataatggagtttttctttagaaacagtgccaagaatgacaagatatt

SEQ ID NO: 63640 - DNA, 658 bp, Homo sapiens
gcgaacgccgggtaaaagatcgggagcggaagtgggcgagtcagagcacatccggtgttagaagcgctggtaggccttggagaggcgggttaggaagagtggagactgctgcacggactctggaaccatgaacatatttgatcgaaagatcaactttgatgcgcttttaaaattttctcatataaccccgtcaacgcagcagcacctgaagaaggtctatgcaagttttgccctttgtatgtttgtggcggctgcaggggcctatgtccatatggtcactcatttcattcaggctggcctgctgtctgccttgggctccctgatattgatgatttggctgatggcaacacctcatagccatgaaactgaacaggagttggcctgggccctgccctggagttttgtattgctgtcaaccccagcatccttcccactgctttcatgggcacggcaatgatctttacctgcttcaccctcagtgcactctatgccaggcgccgtagctacctctttctgggaggtatcttgatgtcagccctgagcttgttgcttttgtcttccctggggaatgttttctttggatccatttggcttttccaggtaagacttagcctggaactttccagcagccatttgcctcacacttctttctttcctt

SEQ ID NO: 63641 - DNA, 1066 bp, Homo sapiens
gcctcctgtccttgggccctcccagctgcttcctttgctcctgcgctgaggaaggcttttgccccccagtggggcagcatgggccctccctgttgccggcatcgttattttctcccagctcctgatgggtcccttgggttgtgcttcggggcggggcaggcgggtgtgactgcactgcgcccgtccagcctcccacccgcacctcctgcccttcccgagccccctcctctgtcatttctccccctggagttcctcacgcacagggctttgtcctaagtggtcgcacacgccgttttaagagaaacctgagcgttggggaagcaggtcctggggaccaaggtggacgcggagcgtgacggcgtgaaggtgcccaccacgctggccgagtactgcgtgaagaccaaggcgccggcgcccgacgagggctcagacctcttctacgacgactactacgaggacggcgaggtggaggaggaggccgacagctgcttcggggacgatgaggatgactctggcacggaggagtcctgacaccaccagaataaacttgccgagtttacctcactagggccggacccgtggctccttagacgacagactacctcacggaggttttgtgctggtccccgtctcctctggttgtttcgttttggctttttctccctccccatgtctgttctgggttttcacgtgcttcagagaagaggggctgccccaccgccactcacgtcactcggggctcggtggacgggcccagggtgggagcggccggcccacctgtcccctcgggaggggagctgagcccgacttctaccggggtcccccagcttccggactggccgcaccccggaggagccacgggggcgctgctgggaacgtgggcggggggccgtttcctgacactaccagcctgggaggcccaggtgtagcggtccgaggggcccggtcctgcctgtcagctccaggtcctggagccacgtccagcacagagtggacggattcaccgtggccgactcttttccctgctttggtttgtttgaaatctaaataaaactactttatgaga

SEQ ID NO: 63642 - DNA, 403 bp, Homo sapiens
gcggggcccgaagcgtttactttgaaaaaattagagcgctcggggtccccgggcggcggcggcggcgcagaggaggaggcaggcggcggccccggtggctcccccccggcccacctgtcccctcgggaggggagctgagcccgacttctaccggggtcccccagcttccggactggccgcaccccggaggagccacgggggcgctgctgggaacgtgggcggggggccgtttcctgacactaccagcctgggaggcccaggtgtagcggtccgaggggcccggtcctgcctgtcagctccaggtcctggagccacgtccagcacagagtggacggattcaccgtggccgactcttttccctgctttggtttgtttgaaatctaaataaaactactttatgaga

SEQ ID NO: 63643 - DNA, 1030 bp, Homo sapiens
ttgtcggtgtcctgaccaaagagtgtggcaccactaacagcgtacgagacgggggacgtgtgtatctccatcctccacccgccggtggacgacccccagagcggggagctgccctcagagaggtggaaccccacgcagaacgtcaggaccattctcctgagtgtgatctccctcctgaacgagcccaacaccttctcgcccgcaaacgtggacgcctccgtgatgtacaggaagtggaaagagagcaaggggaaggatcgggagtacacagacatcatccggaagcaggtcctggggaccaaggtggacgcggagcgtgacggcgtgaaggtgcccaccacgctggccgagtactgcgtgaagaccaaggcgccggcgcccgacgagggctcagacctcttctacgacgactactacgaggacggcgaggtggaggaggaggccgacagctgcttcggggacgatgaggatgactctggcacggaggagtcctgacaccaccagaataaacttgccgagtttacctcactagggccggacccgtggctccttagacgacagactacctcacggaggttttgtgctggtccccgtctcctctggttgtttcgttttggctttttctccctccccatgtctgttctgggttttcacgtgcttcagagaagaggggctgccccaccgccactcacgtcactcggggctcggtggacgggcccagggtgggagcggccggcccacctgtcccctcgggaggggagctgagcccgacttctaccggggtcccccagcttccggactggccgcaccccggaggagccacgggggcgctgctgggaacgtgggcggggggccgtttcctgacactaccagcctgggaggcccaggtgtagcggtccgaggggcccggtcctgcctgtcagctccaggtcctggagccacgtccagcacagagtggacggattcaccgtggccgactcttttccctgctttggtttgtttgaaatctaaataaaactactttatgaga

SEQ ID NO: 63644 - DNA, 946 bp, Homo sapiens
agagaagagccggaaggctggggtgccccgggccgccccactccgacccactctccccacaggaccattctcctgagtgtgatctccctcctgaacgagcccaacaccttctcgcccgcaaacgtggacgcctccgtgatgtacaggaagtggaaagagagcaaggggaaggatcgggagtacacagacatcatccggaagcaggtcctggggaccaaggtggacgcggagcgtgacggcgtgaaggtgcccaccacgctggccgagtactgcgtgaagaccaaggcgccggcgcccgacgagggctcagacctcttctacgacgactactacgaggacggcgaggtggaggaggaggccgacagctgcttcggggacgatgaggatgactctggcacggaggagtcctgacaccaccagaataaacttgccgagtttacctcactagggccggacccgtggctccttagacgacagactacctcacggaggttttgtgctggtccccgtctcctctggttgtttcgttttggctttttctccctccccatgtctgttctgggttttcacgtgcttcagagaagaggggctgccccaccgccactcacgtcactcggggctcggtggacgggcccagggtgggagcggccggcccacctgtcccctcgggaggggagctgagcccgacttctaccggggtcccccagcttccggactggccgcaccccggaggagccacgggggcgctgctgggaacgtgggcggggggccgtttcctgacactaccagcctgggaggcccaggtgtagcggtccgaggggcccggtcctgcctgtcagctccaggtcctggagccacgtccagcacagagtggacggattcaccgtggccgactcttttccctgctttggtttgtttgaaatctaaataaaactactttatgaga

SEQ ID NO: 63645 - DNA, 1319 bp, Homo sapiens
gggcggggcgcgcgggcccggccaaggcaagcgccggtggggcggcggcgccagagctgctggagcgctcggggtccccgggcggcggcggcggcgcagaggaggaggcaggcggcggccccggtggctcccccccggacggtgcgcggcccggcccgtctcgcgaactcgcggtggtcgcgcggccccgcgctgctccgaccccgggcccctccgccgccgccatggctcggccgctagtgcccagctcgcagaaggcgctgctgctggagctcaaggggctgcaggaagagccggtcgagggattccgcgtgacactggtggacgagggcgatctatacaactgggaggtggccatcttcgggccccccaacacctactacgagggcggctacttcaaggcgcgcctcaagttccccatcgactacccatactctccaccagcctttcggttcctgaccaagatgtggcaccctaacatctacgagacgggggacgtgtgtatctccatcctccacccgccggtggacgacccccagagcggggagctgccctcagagaggtggaaccccacgcagaacgtcaggaccattctcctgagtgtgatctccctcctgaacgagcccaacaccttctcgcccgcaaacgtggacgcctccgtgatgtacaggaagtggaaagagagcaaggggaaggatcgggagtacacagacatcatccggaagcaggtcctggggaccaaggtggacgcggagcgtgacggcgtgaaggtgcccaccacgctggccgagtactgcgtgaagaccaaggcgccggcgcccgacgagggctcagacctcttctacgacagactacctcacggaggttttgtgctggtccccgtctcctctggttgtttcgttttggctttttctccctccccatgtctgttctgggttttcacgtgcttcagagaagaggggctgccccaccgccactcacgtcactcggggctcggtggacgggcccagggtgggagcggccggcccacctgtcccctcgggaggggagctgagcccgacttctaccggggtcccccagcttccggactggccgcaccccggaggagccacgggggcgctgctgggaacgtgggcggggggccgtttcctgacactaccagcctgggaggcccaggtgtagcggtccgaggggcccggtcctgcctgtcagctccaggtcctggagccacgtccagcacagagtggacggattcaccgtggccgactcttttccctgctttggtttgtttgaaatctaaataaaactactttatgaga

SEQ ID NO: 63646 - DNA, 1181 bp, Homo sapiens
gggcggggcgcgcgggcccggccaaggcaagcgccggtggggcggcggcgccagagctgctggagcgctcggggtccccgggcggcggcggcggcgcagaggaggaggcaggcggcggccccggtggctcccccccggacggtgcgcggcccggcccgtctcgcgaactcgcggtggtcgcgcggccccgcgctgctccgaccccgggcccctccgccgccgccatggctcggccgctagtgcccagctcgcagaaggcgctgctgctggagctcaaggggctgcaggaagagccggtcgagggattccgcgtgacactggtggacgagggcgatctatacaactgggaggtggccatcttcgggccccccaacacctactacgagggcggctacttcaaggcgcgcctcaagttccccatcgactacccatactctccaccagcctttcggttcctgaccaagatgtggcaccctaacatctacgagacgggggacgtgtgtatctccatcctccacccgccggtggacgacccccagagcggggagctgccctcagagaggtggaaccccacgcagaacgtcaggaccattctcctgagtgtgatctccctcctgaacgagcccaacaccttctcgcccgcaaacgtggacgcctccgtgatgtacaggaagtggaaagagagcaaggggaaggatcgggagtacacagacatcatccggaagcaggtcctggggaccaaggtggacgcggagcgtgacggcgtgaaggtgcccaccacgctggccgagtactgcgtgaagaccaaggcgccggcgcccgacgagggctcagacctcttctacgacgactactacgaggacggcgaggtggaggaggaggccgacagctgcttcggggacgatgaggatgactctggcacggaggagtcctgacaccaccagaataaacttgccgagtttacctcactaggcgggggcgctgctgggaacgtgggcggggggccgtttcctgacactaccagcctgggaggcccaggtgtagcggtccgaggggcccggtcctgcctgtcagctccaggtcctggagccacgtccagcacagagtggacggattcaccgtggccgactcttttccctgctttggtttgtttgaaatctaaataaaactactttatgaga

SEQ ID NO: 63647 - DNA, 913 bp, Homo sapiens
gggcggggcgcgcgggcccggccaaggcaagcgccggtggggcggcggcgccagagctgctggagcgctcggggtccccgggcggcggcggcggcgcagaggaggaggcaggcggcggccccggtggctcccccccggacggtgcgcggcccggcccgtctcgcgaactcgcggtggtcgcgcggccccgcgctgctccgaccccgggcccctccgccgccgccatggctcggccgctagtgcccagctcgcagaaggcgctgctgctggagctcaaggggctgcaggaagagccggtcgagggattccgcgtgacactggtggacgagggcgatctatacaactgggaggtggccatcttcgggccccccaacacctactacgagggcggctacttcaaggcgcgcctcaagttccccatcgactacccatactctccaccagcctttcggttcctgaccaagatgtggcaccctaacatctacgagacgggggacgtgtgtatctccatcctccacccgccggtggacgacccccagagcggggagctgccctcagagaggtggaaccccacgcagaacgtcaggaccattctcctgagtgtgatctccctcctgaacgagcccaacaccttctcgcccgcaaacgtggacgcctccgtgatgtacaggaagtggaaagagagcaaggggaaggatcgggagtacacagacatcatccggacccaggagcatccagggcaccttccatcctgcactcgctggtacctggtgtcgtggggtcatctcggggcagcatcctggtgctgggcggtctcggcttccttggcccggttcttcccggccacctccctgaggcaccacctccttgagatcccagcacagaaataaaagccacactatttttatccctc

SEQ ID NO: 63648 - DNA, 892 bp, Homo sapiens
gggcggggcgcgcgggcccggccaaggcaagcgccggtggggcggcggcgccagagctgctggagcgctcggggtccccgggcggcggcggcggcgcagaggaggaggcaggcggcggccccggtggctcccccccggacggtgcgcggcccggcccgtctcgcgaactcgcggtggtcgcgcggccccgcgctgctccgaccccgggcccctccgccgccgccatggctcggccgctagtgcccagctcgcagaaggcgctgctgctggagctcaaggggctgcaggaagagccggtcgagggattccgcgtgacactggtggacgagggcgatctatacaactgggaggtggccatcttcgggccccccaacacctactacgagggcggctacttcaaggcgcgcctcaagttccccatcgactacccatactctccaccagcctttcggttcctgaccaagatgtggcaccctaacatctacgagacgggggacgtgtgtatctccatcctccacccgccggtggacgacccccagagcggggagctgccctcagagaggtggaaccccacgcagaacgtcaggaccattctcctgagtgtgatctccctcctgaacgagcccaacaccttctcgcccgcaaacgtggacgcctccgtgatgtacaggaagtggaaagagacgggggcgctgctgggaacgtgggcggggggccgtttcctgacactaccagcctgggaggcccaggtgtagcggtccgaggggcccggtcctgcctgtcagctccaggtcctggagccacgtccagcacagagtggacggattcaccgtggccgactcttttccctgctttggtttgtttgaaatctaaataaaactactttatgaga

SEQ ID NO: 63649 - DNA, 754 bp, Homo sapiens
gggcggggcgcgcgggcccggccaaggcaagcgccggtggggcggcggcgccagagctgctggagcgctcggggtccccgggcggcggcggcggcgcagaggaggaggcaggcggcggccccggtggctcccccccggacggtgcgcggcccggcccgtctcgcgaactcgcggtggtcgcgcggccccgcgctgctccgaccccgggcccctccgccgccgccatggctcggccgctagtgcccagctcgcagaaggcgctgctgctggagctcaaggggctgcaggaagagccggtcgagggattccgcgtgacactggtggacgagggcgatctatacaactgggaggtggccatcttcgggccccccaacacctactacgagggcggctacttcaaggcgcgcctcaagttccccatcgactacccatactctccaccagcctttcggttcctgaccaagatgtggcaccctaacatctacgagacgggggacgtgtgtatctccatcctccacccgccggtggacgcggagcgtgacggcgtgaaggtgcccaccacgctggccgagtactgcgtgaagaccaaggcgccggcgcccgacgagggctcagacctcttctacgacgactactacgaggacggcgaggtggaggaggaggccgacagctgcttcggggacgatgaggatgactctggcacggaggagtcctgacaccaccagaataaacttgccgagtttacctcactagg

SEQ ID NO: 63650 - DNA, 1470 bp, Homo sapiens
gggcggggcgcgcgggcccggccaaggcaagcgccggtggggcggcggcgccagagctgctggagcgctcggggtccccgggcggcggcggcggcgcagaggaggaggcaggcggcggccccggtggctcccccccggacggtgcgcggcccggcccgtctcgcgaactcgcggtggtcgcgcggccccgcgctgctccgaccccgggcccctccgccgccgccatggctcggccgctagtgcccagctcgcagaaggcgctgctgctggagctcaaggggctgcaggaagagccggtcgagggattccgcgtgacactggtggacgagggcgatctatacaactgggaggtggccatcttcgggccccccaacacctactacgagggcggctacttcaaggcgcgcctcaagttccccatcgactacccatactctccaccagcctttcggttcctgaccaagatgtggcaccctaacatctacgagacgggggacgtgtgtatctccatcctccacccgccggtggacgacccccagagcggggagctgccctcagagaggtggaaccccacgcagaacgtcaggaccattctcctgagtgtgatctccctcctgaacgagcccaacaccttctcgcccgcaaacgtggacgcctccgtgatgtacaggaagtggaaagagagcaaggggaaggatcgggagtacacagacatcatccggaagcaggtcctggggaccaaggtggacgcggagcgtgacggcgtgaaggtgcccaccacgctggccgagtactgcgtgaagaccaaggcgccggcgcccgacgagggctcagacctcttctacgacgactactacgaggacggcgaggtggaggaggaggccgacagctgcttcggggacgatgaggatgactctggcacggaggagtcctgacaccaccagaataaacttgccgagtttacctcactagggccggacccgtggctccttagacgacagactacctcacggaggttttgtgctggtccccgtctcctctggttgtttcgttttggctttttctccctccccatgtctgttctgggttttcacgtgcttcagagaagaggggctgccccaccgccactcacgtcactcggggctcggtggacgggcccagggtgggagcggccggcccacctgtcccctcgggaggggagctgagcccgacttctaccggggtcccccagcttccggactggccgcaccccggaggagccacgggggcgctgctgggaacgtgggcggggggccgtttcctgacactaccagcctgggaggcccaggtgtagcggtccgaggggcccggtcctgcctgtcagctccaggtcctggagccacgtccagcacagagtggacggattcaccgtggccgactcttttccctgctttggtttgtttgaaatctaaataaaactactttatgaga

SEQ ID NO: 63651 - DNA, 1586 bp, Homo sapiens
  misc_feature (1502)..(1502): n is a, c, g, or t
  misc_feature (1521)..(1521): n is a, c, g, or t
  misc_feature (1531)..(1531): n is a, c, g, or t
  misc_feature (1534)..(1534): n is a, c, g, or t
  misc_feature (1570)..(1572): n is a, c, g, or t
  misc_feature (1583)..(1583): n is a, c, g, or t
gggcggggcgcgcgggcccggccaaggcaagcgccggtggggcggcggcgccagagctgctggagcgctcggggtccccgggcggcggcggcggcgcagaggaggaggcaggcggcggccccggtggctcccccccggacggtgcgcggcccggcccgtctcgcgaactcgcggtggtcgcgcggccccgcgctgctccgaccccgggcccctccgccgccgccatggctcggccgctagtgcccagctcgcagaaggcgctgctgctggagctcaaggggctgcaggaagagccggtcgagggattccgcgtgacactggtggacgagggcgatctatacaactgggaggtggccatcttcgggccccccaacacctactacgagggcggctacttcaaggcgcgcctcaagttccccatcgactacccatactctccaccagcctttcggttcctgaccaagatgtggcaccctaacatctacgagacgggggacgtgtgtatctccatcctccacccgccggtggacgacccccagagcggggagctgccctcagagaggtggaaccccacgcagaacgtcaggaccattctcctgagtgtgatctccctcctgaacgagcccaacaccttctcgcccgcaaacgtggacgcctccgtgatgtacaggaagtggaaagagagcaaggggaaggatcgggagtacacagacatcatccggaagcaggtcctggggaccaaggtggacgcggagcgtgacggcgtgaaggtgcccaccacgctggccgagtactgcgtgaagaccaaggcgccggcgcccgacgagggctcagacctcttctacgacgactactacgaggacggcgaggtggaggaggaggccgacagctgcttcggggacgatgaggatgactctggcacggaggagtcctgacaccaccagaataaacttgccgagtttacctcactagggccggacccgtggctccttagacgacagactacctcacggaggttttgtgctggtccccgtctcctctggttgtttcgttttggctttttctccctccccatgtctgttctgggttttcacgtgcttcagagaagaggggctgccccaccgccactcacgtcactcggggctcggtggacgggcccagggtgggagcggccggcccacctgtcccctcgggaggggagctgagcccgacttctaccggggtcccccagcttccggactggccgcaccccggaggagccacgggggcgctgctgggaacgtgggcggggggccgtttcctgacactaccagcctgggaggcccaggtgtagcggtccgaggggcccggtcctgcctgtcagctccaggtcctggagccacgtccagcacagagtggacggattcaccgtggccgactcttttccctgctttggtttgtttgaaatctaaataaaactactttatgagaaaaaaaaaaaaaaaaaaaaaaaaaaagaaaanaaacaaaaaaaaaaaaaanaaaaaaaaanaanaaaaaaaaaaaaacaacaaaaaaaaaaaaacaaaannnaacaaaaaaanaaa

SEQ ID NO: 63652 - DNA, 1152 bp, Homo sapiens
gcctcctgtccttgggccctcccagctgcttcctttgctcctgcgctgaggaaggcttttgccccccagtggggcagcatgggccctccctgttgccggcatcgttattttctcccagctcctgatgggtcccttgggttgtgcttcggggcggggcaggcgggtgtgactgcactgcgcccgtccagcctcccacccgcacctcctgcccttcccgagccccctcctctgtcatttctccccctggagttcctcacgcacagggctttgtcctaagtggtcgcacacgccgttttaagagaaacctgagcgttggggtgagcgtcggacctgggggaggggggccgggcaggggccgagtccaggcacgtgggtggcgccctcacccaccctgtccccccaggaagcaggtcctggggaccaaggtggacgcggagcgtgacggcgtgaaggtgcccaccacgctggccgagtactgcgtgaagaccaaggcgccggcgcccgacgagggctcagacctcttctacgacgactactacgaggacggcgaggtggaggaggaggccgacagctgcttcggggacgatgaggatgactctggcacggaggagtcctgacaccaccagaataaacttgccgagtttacctcactagggccggacccgtggctccttagacgacagactacctcacggaggttttgtgctggtccccgtctcctctggttgtttcgttttggctttttctccctccccatgtctgttctgggttttcacgtgcttcagagaagaggggctgccccaccgccactcacgtcactcggggctcggtggacgggcccagggtgggagcggccggcccacctgtcccctcgggaggggagctgagcccgacttctaccggggtcccccagcttccggactggccgcaccccggaggagccacgggggcgctgctgggaacgtgggcggggggccgtttcctgacactaccagcctgggaggcccaggtgtagcggtccgaggggcccggtcctgcctgtcagctccaggtcctggagccacgtccagcacagagtggacggattcaccgtggccgactcttttccctgctttggtttgtttgaaatctaaataaaactactttatgaga

SEQ ID NO: 63653 - DNA, 973 bp, Homo sapiens
gggcggggcgcgcgggcccggccaaggcaagcgccggtggggcggcggcgccagagctgctggagcgctcggggtccccgggcggcggcggcggcgcagaggaggaggcaggcggcggccccggtggctcccccccggacggtgcgcggcccggcccgtctcgcgaactcgcggtggtcgcgcggccccgcgctgctccgaccccgggcccctccgccgccgccatggctcggccgctagtgcccagctcgcagaaggcgctgctgctggagctcaaggggctgcaggaagagccggtcgagggattccgcgtgacactggtggacgagggcgatctatacaactgggaggtggccatcttcgggccccccaacacctactacgagggcggctacttcaaggcgcgcctcaagttccccatcgactacccatactctccaccagcctttcggttcctgaccaagatgtggcaccctaacatctacgagacgggggacgtgtgtatctccatcctccacccgccggtggacgacccccagagcggggagctgccctcagagaggtggaaccccacgcagaacgtcaggaccattctcctgagtgtgatctccctcctgaacgagcccaacaccttctcgcccgcaaacgtggacgcctccgtgatgtacaggaagtggaaagagagcaaggggaaggatcgggagtacacagacatcatccggaagcaggtcctggggaccaaggtggacgcggagcgtgacggcgtgaaggtgcccaccacgctggccgagtactgcgtgaagaccaaggcgccggcgcccgacgagggctcagacctcttctacgacgactactacgaggacggcgaggtggaggaggaggccgacagctgcttcggggacgatgaggatgactctggcacggaggagtcctgacaccaccagaataaacttgccgagtttacctcactagg

SEQ ID NO: 63654 - DNA, 1076 bp, Homo sapiens
gggcggggcgcgcgggcccggccaaggcaagcgccggtggggcggcggcgccagagctgctggagcgctcggggtccccgggcggcggcggcggcgcagaggaggaggcaggcggcggccccggtggctcccccccggacggtgcgcggcccggcccgtctcgcgaactcgcggtggtcgcgcggccccgcgctgctccgaccccgggcccctccgccgccgccatggctcggccgctagtgcccagctcgcagaaggcgctgctgctggagctcaaggggctgcaggaagagccggtcgagggattccgcgtgacactggtggacgagggcgatctatacaactgggaggtggccatcttcgggccccccaacacctactacgagggcggctacttcaaggcgcgcctcaagttccccatcgactacccatactctccaccagcctttcggttcctgaccaagatgtggcaccctaacatctacgagacgggggacgtgtgtatctccatcctccacccgccggtggacgacccccagagcggggagctgccctcagagaggtggaaccccacgcagaacgtcaggaccattctcctgagtgtgatctccctcctgaacgagcccaacaccttctcgcccgcaaacgtggacgcctccgtgatgtacaggaagtggaaagagagcaaggggaaggatcgggagtacacagacatcatccggacccaggagcatccagggcaccttccatcctgcactcgctggtacctggtgtcgtggggtcatctcggggcagcatcctggtgctgggcggtctcggctctgagcagccatggtgggcgggccccgtgcggcctcctgggaagtggcctgcaagcacctgctggcctctggaggtcacagggtagctgccctggccgtccctctggtgcagatgtcctcggtggccccggtccggtcgtgtcacctggcccaggtggctggctccttggcccggttcttcccggccacctccctgaggcaccacctccttgagatcccagcacagaaataaaagccacactatttttatccctc

SEQ ID NO: 63655 - DNA, 961 bp, Homo sapiens
gggcggggcgcgcgggcccggccaaggcaagcgccggtggggcggcggcgccagagctgctggagcgctcggggtccccgggcggcggcggcggcgcagaggaggaggcaggcggcggccccggtggctcccccccggacggtgcgcggcccggcccgtctcgcgaactcgcggtggtcgcgcggccccgcgctgctccgaccccgggcccctccgccgccgccatggctcggccgctagtgcccagctcgcagaaggcgctgctgctggagctcaaggggctgcaggaagagccggtcgagggattccgcgtgacactggtggacgagggcgatctatacaactgggaggtggccatcttcgggccccccaacacctactacgagggcggctacttcaaggcgcgcctcaagttccccatcgactacccatactctccaccagcctttcggttcctgaccaagatgtggcaccctaacatctacgagacgggggacgtgtgtatctccatcctccacccgccggtggacgacccccagagcggggagctgccctcagagaggtggaaccccacgcagaacgtcaggtaagccggcccaaccccctgtgtccacccagaacatcaggtaggccgggctccgtcccgtatccacccagaccatcaggtaggccgggctcccccacaggctgtggcgccaaggcctgattcgggacctgccagctggcggtcctgggcctcgctgtacctgcacggtaggtgctttcacggggcctgcggcaccgtgtgtcggtgcagactcccaccaggaccccaggccggccccaccgtctggaaccacctagaggtgtcccgccatcctcagtcctggggccttctccttacccagccgtctctgggttggtcacctcgtgccacgtgtgccgcctgggcctcgtccccaggtacaagcactgggccgtg

SEQ ID NO: 63656 - DNA, 346 bp, Homo sapiens
acaatattaaatgggaaatgtacttatgattggacaaaagtattgcatatatgacaagacagaatcaaggccactctttaggactgcacgcaggctgttcacgatacctttacccacattggaccactctttggcctatacctggaatggagctttcacattttcagtagcaccatgagccccttggtcaggatgggcagtactccattcctcacatatgactgccttgaaggttatacctactcttagactaacagtgtactgtggtcactatttacagagctctgatatagagcaccgtattactgaaacaagaagctcaggttaaaaatttaaatctaaagaa

SEQ ID NO: 63657 - DNA, 494 bp, Homo sapiens
cactgctgagctaagggaggatctcgaccaagccaagacccagatcgggatgactgaatccctcttaaaagccctgtctccttctgacagcttggagatcttcactaaactagaggagatacaacagcagattctacagcaaaaacacagtatgatattacttgagaatcaaataggttgtctgactcctgaactctctgaattgaaaaagcaatatgaaagtgtcagtgatttatttaataccaaaaaaagtgttttgcaagatcacttttctaagttattgaatgatcaatgcaagaactttaatgactggttcagcaacattaaagtgaaccttaaggagtgttttgaatcatcagaaacaaaaaagagtgtggaacaaaagctacaaaaactttctgatttcttgactcttgaaggaagaaacagtaaaataaagcaggtggacagcgtactgaagcatgtgaagaagcatctgcccaaagcacatgtga

SEQ ID NO: 63658 - DNA, 2008 bp, Homo sapiens
ttacgtagatagttcggatgcaaatggtcatttggcttgaatgttctctactttctttgtatggatcttttgccaataaactggttatctgttaccagtaaaacagtccagattttgactctgaatctgaacgggttcactaaatataataacaaaaggaaatatttgtttccccttgatttcctcaactcacgtaattcttgaaacaaacccgtaacgtgggtattattttattcctattttacaggtgaggaaactgagctttagagaggtcaagtctatttttaaatttacacagctccattatttcagtaacagaactgacatttgaaaagcagtctaacttcagaatctattgttttaactattctagaaattaacacgctatagagaatgagcagacgttttgagacagaacttttaaaaaaaagcatttccatgataatcccctgctattcaaaatcaatgacaaaaattgctcgtcattttgttctttcttttccttcactagctatcagttctcatctgggaaaactactaacaacgtatggaatagtttcatgtaaagtatctagtatgaagttagacatcgatgatcataaatttcacttttttgggcattttagataaggagattatccgagtttataacacatagttcaatggaaattaggtttgataagacacaagtcaatgcgatatagtaaacagtagacacatcaaatgtgtcaaatttcagaagtgttgatattttaatagttatatcttttagtatctatagtgtgtaccaagttttggtttaatatctcctgataaccaacccaaaaaataagaaatgtataaaataatattctgtactccctagctaagtttttatgtaacatgtaataattatacctttgttacaaaagcaaacaagaaaaaagccctgaataattgtgttcccataagtagaacttcgggcagggatcactgattgcagtttgaaaaccagaagccccttggcaagagtgtgccactgttcacagcacttttgaggttcggaggttcagggctatttgttcaccataacgaagaaaagctcaaagcatgagatttattggcagaaaccatccatagcatgattgctgtcattttctaggaagatcaaatgaccaacatatttattttgccataggggggtagtcaaatttgttaactcagggttacacaatctcttttcctgtaaatagcataatcactgtgtataaatgcatattttacatcccacattttaactattttatattgttttcaaatcaacaaaacaacaaacaattttatattgtttcaaatcttattggcatactgtcacatgagtccccaacaaaaacatgtctttgcatttcagtttatagtttaaggggaaaatagaatgtatgtgatcaagtgttgtaagacaggtaagaacaggtcatgagaacccagataaggtagctaatacataaatctgaaacaaaatgcatgactatagaaaaagagagtcttgaaatacgggcaggttttcaacaaggggagagggaagtgattaggtagtgatactccagatgaagtaaaacctgggaagcaaaggctctgagtttcaaaaccacagggtgtgttggaggtcagtagcacagtttggctgagatgcatggtacttgttagaaaacaagattagaaaatattactgaaagtggccaggtgcggtggctcatgcctgtaatcccagccctttggaaggccgaggtgggcggatcacgaggtcaggagattgagaccatcctggctaacacggtgaaaccccatctccactaaaaaaaaaaaaaaaaaaaaaaaaattagccgggcatggtggcgggagcatgtagtcccagctaatctggaggctgaggcaggagaatggcgtgaacccgggaggcagaggttgcggtgagccgagatcatgccactgcactccagcctgggcaactgagcaagactctgcctc

SEQ ID NO: 63659 - DNA, 478 bp, Homo sapiens
atccacttcccagcctcatccggatgaacacaaattttctcagtgatataatgggcctactaaaaaaatcactaacccgtttactcaatcagcaccaaataaaaacaacagtcaaattgtatttattagaaaactttattttaaagctaactcaggcatgctttccaaagagatgaaggtttggaaaatgtgttagaatctaatcactaaaataagaacaatcaatgtttgcttgctttggggaagacagtatttactcctttcaattatttcccaaaataaccggctaaaagtagatgaaaaagaccaatcagctgagtacagaaaccatagcctttgtccacattgaaattatacagtgagaatgtttattcctgatttctcttgctttcttagaaaggagtgactttatgctccatgccccaggaaagaaatgtgtgggagagacacatctgactaatgcattcaataaaaaaaa

SEQ ID NO: 63660 - DNA, 1020 bp, Homo sapiens
cgagaccctgtctccactaaacataaaaacaaaattactggggccccatggcacacacctgtagtcccagctgctcgggaagctgagatgggcggattgcttgagcccaggtattcaagtctggagtgagctatgactgtgccactgcactccagcctgggcgacagagcaaaccctgtttccaaacaaacaaccaaacaaacaaacaaatacacagacagaagtagttaaacatctacaaggtaagtgcatcttgaagacgtgttaagttaaagaagccaattacaaaaggtttcacgttgtatgatttcgtttatatgaaatgtccagaataggcaaatctgtttgagagagagaaagtagatgagtacttgcctaggactgggaggaggattgcgaggaaatggagattcactgctaatgagtacagggtttcttttgggggcgcttatgaagatgctctgaaattgattgtgatggttgtacaactctgaatacatgaaacagcattaaacatcactttaagtaagtcaactgtatagtgtctgaattatgtctcaatactgttgtttttaaaaaacaaaacaggccaggcacggtgtctcattcctgaaatcccagaactctgagaggcctaggcaaggggattgcttgaatccaggagttcaagagcagcctgggcaacatggtgaaatcccatcttgacaaaatatacaaaaattagctgggtggtggcaaacccactgtttgggtagaactcagtgggggaagcctcatctgttccccggtgtctgaggcgtgatttagcagctgtaggctagggtcacctgaagacattcacttatcagctgctgtcattaactggcacacatgtggcctctgcatgtggcttccaagggagcacatctcaagcaatctaggcagaagccatgtggccttttatgtcccagcctcaggagtccatagcatcactcttgtgtcctgggaggggagtcaaagatacctgtacaaagagcattt

SEQ ID NO: 63661 - DNA, 336 bp, Homo sapiens
gttactaataaaatttaagtgttaatataagtttcagaaaaggcaggaccatagaatggcagtgttgggaatgacagtgggcttattttttccctcctgatatatggaaggggattttgagaatagcagtatttgagtaaaatttagagaggaggcctctttttaaagtgacctgtctatattccctggtggaactgactgccttaggctctgatacattggtgacagacctggagatgaataatatgcatcctcatttttattgtatacttgtgactcaggtgttctcaaaggttataattcatgaaactcatgaaggtgttgaacaaaagaggg

SEQ ID NO: 63662 - DNA, 488 bp, Homo sapiens
agtttcacttcatcaagattttagctgaaggttaatgcagttaagtaagattaatctggccatactgtttctgtcctcagattgtaaatgctattgttcaaacagggatgcttcaaatgtcattggagagcattctctgaaagctgtggacccccatttatgcttggttttctctcgcagttcactttagaatactccttccctttttccaacttggtaattgtttatggaaatgggtgaacacgctctgaagttctgacagacctacgtgagagccgtgctcttctttttgtttgtatgacccccaaattcagccttgttttggaactaccgttcacttgtaaatctgctttgtactatacagttttacaatctggccgcctcctcatcttgccaacttgtaaccttctctccagagctggttcagacactatcatctgccattcttacatgtgaaaccattagagaagcctaatgatcctttctaa

SEQ ID NO: 63663 - DNA, 987 bp, Homo sapiens
atgcaaataaaatatttaattggctctccactcctgcctctgtccccttaccgctaccaccctaagagattatcattgttaacatttgaggacatggtgttttgtaacctgttgttttttcttaatatgacaatggcccatattttagcagtaaacaaaaagatacagaagatgaaagcttagccaaacactgtaaatagaaatgggaagctttttcatatcggggaacggtggcttaattgattcttggggaatgggggatcaactaaccataaacaatttcatttaggatttttgcatcatgagggtatttggagagaaatatatcatcctataatgtgcacagtaagtttttcctaatttgttgctttgaggaaagacacaaagcaaactaaacagcctttcatagataaataagtatacagagagtgaaagatatgggtacaagtatatagagacctatcaaaaatacattgcttgtggtattaattctcatgtgtgattttagcatattaaaaggctgttttgtgtttttagaaccataagaataaatggggatgttacctttcagtttgttccaaagattgcatgcatcattaccaaagcttgagtctttttactcccctgtcttgttgagatacctactacttgagcatactctggaatgagaaagtttatcgattaacatgctgcttacgcagataggattagcatttccttaatttagtataccacgtgttgtatcaggcataaaagccagctttttttagtcataccccaatgtttaaaattgttaaatgcagacttcatgttcttttgatcatttaaatcatgacatggatatttttaatttttatattctagtaattatcaattgtcctggtctggctgcttagagtatcagtttgctcaaaattgcttgaatcattaaagcaaatactaattgtgagcattgaccagatcttaagttaaaaaaaaaaaaaaagc

SEQ ID NO: 63664 - DNA, 381 bp, Homo sapiens
gctcgacgtataccacgtgttgtatactaaattaacgaaatgctaatcctatctgcgtaagacagtgtttatcgattaacatgctgcttacgcagataggattagcatttccttaatttagtataccacgtgttgtatcaggcataaaagccagctttttttagtcataccccaatgtttaaaattgttaaatgcagacttcatgttcttttgatcatttaaatcatgacatggatatttttaatttttatattctagtaattatcaattgtcctggtctggctgcttagagtatcagtttgctcaaaattgcttgaatcattaaagcaaatactaattgtgagcattgaccagatcttaagttaaaaaaaaaaaaaaagc

SEQ ID NO: 63665 - DNA, 438 bp, Homo sapiens
tggagaatcaacgtggcattcctgactctcctagagtcctaggaaagacttaaagtaattttattgaatatttatctcttttggcaaaattgtatccaaagaatgttttttgacaaaaatagttctccaaaccatgctgaaaaggtacacttagagttccaaggccaggcgcagtggcttatgcctgtaatcctagcactttgggaggctgaggggaaggatcgcctgagcccaggagttcaagaccaggctggccagcagagggagacctgtctctacaaaaaatccaaaaattagctgggtgcagtggtacaccctgtggccctagctattcaggaggctgaggtgggaggattcttgcgcccaagagttagaagctgctgtgagttatgctccagccactgcactcagccttggtgacagagcaagaccccgttc

SEQ ID NO: 63666 - DNA, 1554 bp, Homo sapiens
agcggacgtgtcccatcatgtttcgtgcgctcccattacggatcatacctcgcacctcaccgcgtggcctctgtagttccagagctcgcgagggccaggccgttggcggcggttggaacgaaacgatgagtgcctcctcgtggccccagaatggaatgccgccgtcgtccctgtacgagcggttaagtcagaggatgctggacatctcgggggaccggggcgtgctgaaggacgtcatccgagaaggagctggagacctagtggcgcctgatgcttcggtgctagtgaaatactcgggatacctggaacacatggacagacccttcgattctaattactttaggaaaactcctcggctaatgaaacttggagaggatattacactgtggggcatggagctgggccttctgagcatgcggagaggagagctggccaggtttctgttcaaaccgaactacgcctatggaacgctgggctgccctcccttgatccccccaaacaccactgtcctgtttgagattgagctgcttgacttcctggactgtgctgagtcagacaagttttgtgctctctcagctgagcagcaagaccaatttccacttcagaaggtcctgaaagtggcagctacggaacgggagtttggcaactaccttttccgccagaatcgtttctatgatgccaaagtgagatataaaagggccctgttgcttctgcgccggcgatcagcaccccctgaagagcagcacctggtggaggccgccaagcttcctgttctcctgaacctgtcctttacatacctgaagctagaccgacccaccatagccctgtgctatggagagcaggctttgatcattgaccaaaagaatgccaaggccctcttcaggtgtggacaggcttgtcttctcctgactgagtatcaaaaggcccgggattttctagttcgagcccagaaggagcaacccttcaatcatgacatcaataatgagctgaagaaactggctagctgttacagggactatgtggataaagagaaagaaatgtggcaccgcatgttcgcgccctgtggcgatggttctacagcaggagaaagttgaaggttcttcacctaccaacgaggggagagagctgtggttctccatcattgggggagtggaagggagctcccagcgcagccgtggcagccaccttccaggagcaggggctggaatgtcctgtggccgcatctctcatggacgcggctgaaacgtgttttcacaggtgctgttttctgttttccgtgttcgtaacagaagggaggggaaagcgcagctactgacaagtagaacactgctactttttttaaggcagtttcttgtttttttagacggaattagtccttggcttccctcccagtcccagccctgcttccggctgcgaatgtccctgagtcaacaccaatagagattgctttgtgtattttgtagggttctctgttttgaagacagaattatgttacaaatgtttttgttgtaaataaataaaacacttccttgtccttgcaagatccagtataaa

SEQ ID NO: 63667 - DNA, 1448 bp, Homo sapiens
agcggacgtgtcccatcatgtttcgtgcgctcccattacggatcatacctcgcacctcaccgcgtggcctctgtagttccagagctcgcgagggccaggccgttggcggcggttggaacgaaacgatgagtgcctcctcgtggccccagaatggaatgccgccgtcgtccctgtacgagcggttaagtcagaggatgctggacatctcgggggaccggggcgtgctgaaggacgtcatccgagaaggagctggagacctagtggcgcctgatgcttcggtgctagtgaaatactcgggatacctggaacacatggacagacccttcgattctaattactttaggaaaactcctcggctaatgaaacttggagaggatattacactgtggggcatggagctgggccttctgagcatgcggagaggagagctggccaggtttctgttcaaaccgaactacgcctatggaacgctgggctgccctcccttgatccccccaaacaccactgtcctgtttgagattgagctgcttgacttcctggactgtgctgagtcagacaagttttgtgctctctcagctgagcagcaagaccaatttccacttcagaaggtcctgaaagtggcagctacggaacgggagtttggcaactaccttttccgccagaatcgtttctatgatgccaaagtgagatataaaagggccctgttgcttctgcgccggcgatcagcaccccctgaagagcagcacctggtggaggccgccaagcttcctgttctcctgaacctgtcctttacatacctgaagctagaccgacccaccatagccctgtgctatggagagcaggctttgatcattgaccaaaagaatgccaaggccctcttcaggtgtggacaggcttgtcttctcctgactgagtatcaaaaggcccgggattttctagttcgagcccagaaggagcaacccttcaatcatgacatcaataatgagctgaagaaactggctagctgttacagggactatgtggataaagagaaagaaatgtggcaccgcatgttcgcgccctgtggcgatggttctacagcaggagaaagttgaaggttcttcacctaccaacgaggggagagagctgtggttctccatcattgggggagtggaagggagctcccagcgcagccgtggcagccaccttccaggagcaggggctggaatgtcctgtggccgcatctctcatggacgcggctgaaacgtgttttcacagacggaattagtccttggcttccctcccagtcccagccctgcttccggctgcgaatgtccctgagtcaacaccaatagagattgctttgtgtattttgtagggttctctgttttgaagacagaattatgttacaaatgtttttgttgtaaataaataaaacacttccttgtccttgcaagatccagtataaa

SEQ ID NO: 63668 - DNA, 1505 bp, Homo sapiens
ccagggagggcagcggggcgcaccaggccgaagtccacgccacagggagggcagctaggacatggggggaagcgcgttaaaccagggagtcctggaaggggacgacgcccccggccagtccctgtacgagcggttaagtcagaggatgctggacatctcgggggaccggggcgtgctgaaggacgtcatccgagaaggagctggagacctagtggcgcctgatgcttcggtgctagtgaaatactcgggatacctggaacacatggacagacccttcgattctaattactttaggaaaactcctcggctaatgaaacttggagaggatattacactgtggggcatggagctgggccttctgagcatgcggagaggagagctggccaggtttctgttcaaaccgaactacgcctatggaacgctgggctgccctcccttgatccccccaaacaccactgtcctgtttgagattgagctgcttgacttcctggactgtgctgagtcagacaagttttgtgctctctcagctgagcagcaagaccaatttccacttcagaaggtcctgaaagtggcagctacggaacgggagtttggcaactaccttttccgccagaatcgtttctatgatgccaaagtgagatataaaagggccctgttgcttctgcgccggcgatcagcaccccctgaagagcagcacctggtggaggccgccaagcttcctgttctcctgaacctgtcctttacatacctgaagctagaccgacccaccatagccctgtgctatggagagcaggctttgatcattgaccaaaagaatgccaaggccctcttcaggtgtggacaggcttgtcttctcctgactgagtatcaaaaggcccgggattttctagttcgagcccagaaggagcaacccttcaatcatgacatcaataatgagctgaagaaactggctagctgttacagggactatgtggataaagagaaagaaatgtggcaccgcatgttcgcgccctgtggcgatggttctacagcaggagaaagttgaaggttcttcacctaccaacgaggggagagagctgtggttctccatcattgggggagtggaagggagctcccagcgcagccgtggcagccaccttccaggagcaggggctggaatgtcctgtggccgcatctctcatggacgcggctgaaacgtgttttcacaggtgctgttttctgttttccgtgttcgtaacagaagggaggggaaagcgcagctactgacaagtagaacactgctactttttttaaggcagtttcttgtttttttagacggaattagtccttggcttccctcccagtcccagccctgcttccggctgcgaatgtccctgagtcaacaccaatagagattgctttgtgtattttgtagggttctctgttttgaagacagaattatgttacaaatgtttttgttgtaaataaataaaacacttccttgtccttgcaagatccagtataaa

SEQ ID NO: 63669 - DNA, 1434 bp, Homo sapiens
agcggacgtgtcccatcatgtttcgtgcgctcccattacggatcatacctcgcacctcaccgcgtggcctctgtagttccagagctcgcgagggccaggccgttggcggcggttggaacgaaacgatgagtgcctcctcgtggccccagaatggaatgccgccgtcgtccctgtacgagcggttaagtcagaggatgctggacatctcgggggaccggggcgtgctgaaggacgtcatccgagaaggagctggagacctagtggcgcctgatgcttcggtgctagtgaaatactcgggatacctggaacacatggacagacccttcgattctaattactttaggaaaactcctcggctaatgaaacttggagaggatattacactgtggggcatggagctgggccttctgagcatgcggagaggagagctggccaggtttctgttcaaaccgaactacgcctatggaacgctgggctgccctcccttgatccccccaaacaccactgtcctgtttgagattgagctgcttgacttcctggactgtgctgagtcagacaagttttgtgctctctcagctgccctgttgcttctgcgccggcgatcagcaccccctgaagagcagcacctggtggaggccgccaagcttcctgttctcctgaacctgtcctttacatacctgaagctagaccgacccaccatagccctgtgctatggagagcaggctttgatcattgaccaaaagaatgccaaggccctcttcaggtgtggacaggcttgtcttctcctgactgagtatcaaaaggcccgggattttctagttcgagcccagaaggagcaacccttcaatcatgacatcaataatgagctgaagaaactggctagctgttacagggactatgtggataaagagaaagaaatgtggcaccgcatgttcgcgccctgtggcgatggttctacagcaggagaaagttgaaggttcttcacctaccaacgaggggagagagctgtggttctccatcattgggggagtggaagggagctcccagcgcagccgtggcagccaccttccaggagcaggggctggaatgtcctgtggccgcatctctcatggacgcggctgaaacgtgttttcacaggtgctgttttctgttttccgtgttcgtaacagaagggaggggaaagcgcagctactgacaagtagaacactgctactttttttaaggcagtttcttgtttttttagacggaattagtccttggcttccctcccagtcccagccctgcttccggctgcgaatgtccctgagtcaacaccaatagagattgctttgtgtattttgtagggttctctgttttgaagacagaattatgttacaaatgtttttgttgtaaataaataaaacacttccttgtccttgcaagatccagtataaa

SEQ ID NO: 63670 - DNA, 201 bp, Homo sapiens
ctgatgttgctactgtaatgtggcgaagaatgctaggcattttgggagatgtaaattcaatcatggatcctgaaatacatgctcaagtttttgattacctctgtgaactttggcagaatctagctaagattagagataaccttggcatttcaactgataacctgacctccccttctccaccagttttaattcctccactga

SEQ ID NO: 63671 - DNA, 636 bp, Homo sapiens
  misc_feature (568)..(568): n is a, c, g, or t
atgatacgaatccgagctgtacctagctgggtgaagggaagtgtgactcaatcttgcctgccttctgggagctctagaattgttcccaacccagtccatggcttctagccaccactacagggctgtttcatgtacttctctctctgactctgtcttgtccgactctcttgagaatttctcaacgattgctcatgcctgtcagtatcagtgcttccatcgttccatctttgattcacttctctttcctttctatttactcccaaaatggagtcattcatcctgatgtcctcaattgctgctgatatgctggtgattcccaaatacatagctccaacccccaacttcccccagactttagatctgtattggtattacctactggacatctctatggacagttccgtatagactcaactcatctgcccaaccaagtatgttcctcctgaattcctctcctggttacttcatcacaatctacataggctcaccagctagaaacatttatgagcttacattccttcttcccatatcttatcagcatatcatatccatttcactccttcacccnagctatagcttgggtgaaggagtgacattggctgacatcacagttgtctgcaccctgttgtggctcta

SEQ ID NO: 63672 - DNA, 911 bp, Homo sapiens
  misc_feature (311)..(311): n is a, c, g, or t
  misc_feature (313)..(313): n is a, c, g, or t
  misc_feature (316)..(316): n is a, c, g, or t
gcgggtttattagctccctgtcagaggttgtaacgttgtctaagtggctaattatagagcttagttaagttaccaggggtttgtattggagggggtttattatagaagacgatgtgagaactaagtcgggcgtgatctagaggttatgtaattgccggttttagggctctttgttgaagattttatggcgtcagcgaagggttgtagtaacccgtagggcctacaacgtttgggcctttgcgtagttgtatatagcctagaatttttcgtttcggtaagcattaggaatgccattgcgattagaatgggtncnatncctaatgctttcatcggctcagatgtggtggactggctgtaccacaatgtggaaggcttcacggaccggagggaggcccgcaagtatgccagcaacctgctgaaagctggcttcatccgccataccgtcaacaagatcaccttctccgagcagtgctactacatcttcggtgacctctgcggcaacatggccaacctgtctctccacgatcacgatggctccagtggcgcctctgaccaggacacactggcccctttgccgcacccgggggccgccccttggcccatggctttcccgtaccagtacccgccacccccgcacccatacaacccgcacccgggcttcccggagctgggctacagctacggcgggggcagcgccagcagtcagcacagcgaaggcagtcggagcagtggctccaaccgtagcggcagcgatcggaggaaggagaaggacccgaaggccggggactccaagtccgggggcagcggcagcgaatcggaccacaccacacgcagcagcctgcgggggccgcgggagcgggcgcccagcgagcgctcagcctctccgaattcacacccgcctctacctagcc

SEQ ID NO: 63673 - DNA, 474 bp, Homo sapiens
caaagagctgtctctgggtctccccaacctctgctttcatttgaacagtcttgtgctggtggtttgattcccagtttaggatggaggagcccctgagagttgggatttgaggatcctccatttgcaccctagaaggttctctgtgacatccccctttctctgcagagtggtgaaggaggagatctcggatgacaatgccaagctaccatgcttcaatggccgggtggtgtcctgggtaaggagccctcagccttccatccacctgcatccctgtgctgggctggacgagggaaaggcatcactgagattgtagctggtggttttaagcttcagtatctgaatctttctttacttttgcaaatgaactgcttctcaccccagattctgtaacctttgatgaaaagtgagaaattagtgggaagggggaagagggagagacggaaacacacagtggagacagtaacgtttcctatg

SEQ ID NO: 63674 - DNA, 5588 bp, Homo sapiens
atcgtctgtttcatcaagaggagtcgcggcggcaagtacccaggtgagatgtgcaagaggcgtgggcttgcagggtggggcacgtccactttcccgtgagtctccaggtctccagccagatccggggaatgtgttctctcagtgaagccgcggccaccggaagagtcgcggtcgccagtccagtcgggagagtggggagcggaagcgcggccgcggcggcggcgggcggcgctgggacccggtagcccccggagaacaagggagctggcgccgccagcagccgccgagctgggttgagccgctgggccgcgccgcgcgccgccgccgtctgggaggctcggcccggccgcccgagcaggccgcgcgcgggccgccgggcccgaggccagagccatgggcgagaccaagatcatctaccacttggatgggcaggagacgccgtaccttgtgaagctgcccctgcccgccgagcgcgtcaccttggcggactttaagggcgttttgcagcgacccagctataagttcttcttcaagtctatggacgacgatttcggagtggtgaaggaggagatctcggatgacaatgccaagctaccatgcttcaatggccgggtggtgtcctggctggtgtcagctgagggctcacacccagacccagcccccttctgtgctgataacccatcggagctgccaccacctatggagcgcacgggaggcatcggggactcccgacccccatccttccaccctcatgctggtgggggcagccaggagaacctggacaatgacacagagacggactctttggtgtctgcccagcgagagcggccacgccggagggatggcccagagcatgcaacccggctaaatggaactgcgaagggggaacggcggcgagaaccagggggttatgatagctcatccacccttatgagcagtgagctggagaccaccagcttctttgactcagatgaggatgactccaccagcaggttcagcagctccacagaacagagcagtgcctcacgcctgatgagaagacacaagcggcggcggcggaagcagaaggtttctcggattgagcggtcctcgtccttcagcagcatcacggactccaccatgtcactcaacatcatcacggtcactctcaacatggaaaaatataacttcttgggcatctccattgtgggccaaagcaacgagcgtggtgacggcggcatctacattggctctatcatgaagggtggggccgtggctgctgatggacgcatcgagccaggagatatgttgttacaggtaaacgagatcaactttgagaacatgagtaatgacgatgcagtccgggtactgcgggagattgtgcacaaaccggggcccatcaccctgactgtagccaagtgctgggacccaagtccacgtggttgcttcacattgcccaggagcgagcccatccggcccattgaccctgcggcctgggtctcccacactgcagccatgaccggcaccttccctgcatacggcatgagcccctccctgagcaccatcacctccaccagctcctccatcaccagttccatccctgacacagagcgcctagacgacttccacttgtccatccacagtgacatggctgccatcgtaaaagccatggcctcccctgaatcagggttggaggtccgtgaccgcatgtggctcaagattaccatccctaatgctttcatcggctcagatgtggtggactggctgtaccacaatgtggaaggcttcacggaccggagggaggcccgcaagtatgccagcaacctgctgaaagctggcttcatccgccataccgtcaacaagatcaccttctccgagcagtgctactacatcttcggtgacctctgcggcaacatggccaacctgtctctccacgatcacgatggctccagtggcgcctctgaccaggacacactggcccctttgccgcacccgggggccgccccttggcccatggctttcccgtaccagtacccgccacccccgcacccatacaacccgcacccgggcttcccggagctgggctacagctacggcgggggcagcgccagcagtcagcacagcgaaggcagtcggagcagtggctccaaccgtagcggcagcgatcggaggaaggagaaggacccgaaggccggggactccaagtccgggggcagcggcagcgaatcggaccacaccacacgcagcagcctgcgggggccgcgggagcgggcgcccagcgagcgctcagggccggcggccagcgagcacagccaccgcagccaccattccctggccagcagccttcgcagccaccacacacacccgagctacggtcctcccggagtgccccctctctacggcccccccatgctgatgatgcccccgccgcccgcggccatggggcccccaggagcccctccgggccgcgacctggcctcagtgcccccggaactgaccgccagcagacagtccttccgcatggccatgggaaaccccagtgagttctttgtggatgtgatgtgagcagggcccctcccccagctccattccgctcccaccccagccggctgcgttcctctctccatccgtccgtcttttttactttgtctggtacctgaaagggaaataaaaggaactaaatccaggtgcgctaactgctcgcagggtgctgcgagggtggggtgcacctaccgattggctctgcagccccctaacctgcctctggccccagttcgtttcctctgcccactaatccctgcgcaggacttcccaggaccccttttgtctctgggaccagacttgttggtgctaccccttactcccctctgcaacccccattttgggagttgaccccagcaatgaccttggtggcacgctcactccctcattctctcgtttcccctttagctccctttcaccatttattcagctacatcatccctctattaaccccaccccatcaggcacgtgtgcaaacctcttgactttaccccacattactgaaaccaaaatatatttgcttcatctgcccctactaaccatccccctgcctgctgcctcagtcctgcaacctaaagctgtagtcgcctccaatagccatccatgccatccctgcctgtgcctagatcagaggcccagagggccccctcagttgcctgagcagctggtggcttccagggagcatctctgctctacccctgccccatgcctgccctgcgtgctggttccttcagacccctaaccctactaaccagcaggctcatctcacctccaggcctgaaacatttcttttctttcttttttcctcccccaattttccctgggcctggagcagccaagaatttcgggctgtttgactttctgtgagcccccagcgaggggaggcccagcctccgaggagaccaggaaccctgcttcagcagcccctcagggcttcccaaggatgtccagcccccacacccacacgttaacataatgagtcactaggcttctggggagggcccaacttcacccatgcatgagagactctcctcctttccagagagaatcggatcgcaccacgtgtggcagcctgcggcggggggaggggggcctctttagctctctttatctttctctctcactcatgtatgcatacatgcacagagatgcatacacaggtgcctatgcaagttcatttaagcctcagggctggtccctgcccaaagggctggaccctcctaatcctctcctaggttgtggggctggtcccctgacacccttctccccttcctggtagaccttaaacctcgcacacatgtccccagcattttctcacctggataaagcccataagctgggtctcaggctgggctcagcaaaggactcgccttgcaaccgacaggccattcccacccccacacacaacctcccctgttttcacattcaccatggcatcccagagcaaggacacaggagcccacaggccagttgaggttgggcaaggagacttccaggacttccagacagagtaccaggttttatttttcaccttattctctactttaaacaaatcataactttctctttaagcctctgctataaattctcctggctctcctgggcttccatattttgggggctggggtgtcaaaagtgagatgaagttcttagctccaggttttggggtaaaccaaggtaggaacattttggcatttatttcaattaacaatacttccttggacgggtgcggtggctcacgtctgtaatcccagcactttgggaggctgagacaggtggatcacttgaggtcgggagttcgagaccagcctggccaacatagcaaaaccctgtctctactaaaaatacaaaaattagatgggtgttttggcacctgcctgtaatctcagctactcaggaggctgaggcacaagaatcgcttgaatccaggaagcaagcggaggttgcagtgagttgagatcgcactccagcctgggtgacagagtgagattctgtctcaaaagcaaactaacaaagaaaaacaatacttcctggggttttggtgtgcagagggctttgttggaagtgtgactcaatcttgcctgccttctgggagctctagaattgttcccaacccagtccatggcttctagccaccactacagggctgtttcatgtacttctctctctgactctgtcttgtccgactctcttgagaatttctcaacgattgctcatgcctgtcagtatcagtgcttccatcgttccatctttgattcacttctctttcctttctatttactcccaaaatggagtcattcatcctgatgtcctcaattgctgctgatatgctggtgattcccaaatacatagctccaacccccaacttcccccagactttagatctgtattggtattacctactggacatctctatggacagttccgtatagactcaactcatctgcccaaccaagtatgttcctcctgaattcctctcctggttacttcatcacaatctacataggctcaccagctagaaacatttatgagcttacattccttcttcccatatcttatcagcatatcatatccatttcactccaacactctgtcttgaatttggccctccctctcccctctctactttaattcattggagcatgggatttggagttaggtggttttgggtttgaattccagctctactatttttggttgtgtgatagagttatttaacctctctgagcctcagttccctcgtatgtaaaatgatgataataatacctacctcacagggttgttgtgaggatttaaattagatattgtacgaaaagtgcctagcacagtgcctggcacacagtagagtaggtgctcaataaatggtagctattattattattaaaaaaaaaaaaggggcgtctaaatttctcgaggggccagttagggtaccgtttctgtcaaggggccaaggagggtttagagacggcggtttaagtggtggaaaggtctgggtttggagggctctctggggattggaaacacaggtagcgaaaataggtggaaagtctggaatgcagttaaagaac

SEQ ID NO: 63675 - DNA, 5107 bp, Homo sapiens
agcggagagtggggagcggaagccgccgccgtctgggaggctcggcccggccgcccgagcaggccgcgcgcgggccgccgggcccgaggccagagccatgggcgagaccaagatcatctaccacttggatgggcaggagacgccgtaccttgtgaagctgcccctgcccgccgagcgcgtcaccttggcggactttaagggcgttttgcagcgacccagctataagttcttcttcaagtctatggacgacgatttcggagtggtgaaggaggagatctcggatgacaatgccaagctaccatgcttcaatggccgggtggtgtcctggctggtgtcagctgagggctcacacccagacccagcccccttctgtgctgataacccatcggagctgccaccacctatggagcgcacgggaggcatcggggactcccgacccccatccttccaccctcatgctggtgggggcagccaggagaacctggacaatgacacagagacggactctttggtgtctgcccagcgagagcggccacgccggagggatggcccagagcatgcaacccggctaaatggaactgcgaagggggaacggcggcgagaaccagggggttatgatagctcatccacccttatgagcagtgagctggagaccaccagcttctttgactcagatgaggatgactccaccagcaggttcagcagctccacagaacagagcagtgcctcacgcctgatgagaagacacaagcggcggcggcggaagcagaaggtttctcggattgagcggtcctcgtccttcagcagcatcacggactccaccatgtcactcaacatcatcacggtcactctcaacatggaaaaatataacttcttgggcatctccattgtgggccaaagcaacgagcgtggtgacggcggcatctacattggctctatcatgaagggtggggccgtggctgctgatggacgcatcgagccaggagatatgttgttacaggtaaacgagatcaactttgagaacatgagtaatgacgatgcagtccgggtactgcgggagattgtgcacaaaccggggcccatcaccctgactgtagccaagtgctgggacccaagtccacgtggttgcttcacattgcccaggagcgagcccatccggcccattgaccctgcggcctgggtctcccacactgcagccatgaccggcaccttccctgcatacggcatgagcccctccctgagcaccatcacctccaccagctcctccatcaccagttccatccctgacacagagcgcctagacgacttccacttgtccatccacagtgacatggctgccatcgtaaaagccatggcctcccctgaatcagggttggaggtccgtgaccgcatgtggctcaagattaccatccctaatgctttcatcggctcagatgtggtggactggctgtaccacaatgtggaaggcttcacggaccggagggaggcccgcaagtatgccagcaacctgctgaaagctggcttcatccgccataccgtcaacaagatcaccttctccgagcagtgctactacatcttcggtgacctctgcggcaacatggccaacctgtctctccacgatcacgatggctccagtggcgcctctgaccaggacacactggcccctttgccgcacccgggggccgccccttggcccatggctttcccgtaccagtacccgccacccccgcacccatacaacccgcacccgggcttcccggagctgggctacagctacggcgggggcagcgccagcagtcagcacagcgaaggcagtcggagcagtggctccaaccgtagcggcagcgatcggaggaaggagaaggacccgaaggccggggactccaagtccgggggcagcggcagcgaatcggaccacaccacacgcagcagcctgcgggggccgcgggagcgggcgcccagcgagcgctcagggccggcggccagcgagcacagccaccgcagccaccattccctggccagcagccttcgcagccaccacacacacccgagctacggtcctcccggagtgccccctctctacggcccccccatgctgatgatgcccccgccgcccgcggccatggggcccccaggagcccctccgggccgcgacctggcctcagtgcccccggaactgaccgccagcagacagtccttccgcatggccatgggaaaccccagtgagttctttgtggatgtgatgtgagcagggcccctcccccagctccattccgctcccaccccagccggctgcgttcctctctccatccgtccgtcttttttactttgtctggtacctgaaagggaaataaaaggaactaaatccaggtgcgctaactgctcgcagggtgctgcgagggtggggtgcacctaccgattggctctgcagccccctaacctgcctctggccccagttcgtttcctctgcccactaatccctgcgcaggacttcccaggaccccttttgtctctgggaccagacttgttggtgctaccccttactcccctctgcaacccccattttgggagttgaccccagcaatgaccttggtggcacgctcactccctcattctctcgtttcccctttagctccctttcaccatttattcagctacatcatccctctattaaccccaccccatcaggcacgtgtgcaaacctcttgactttaccccacattactgaaaccaaaatatatttgcttcatctgcccctactaaccatccccctgcctgctgcctcagtcctgcaacctaaagctgtagtcgcctccaatagccatccatgccatccctgcctgtgcctagatcagaggcccagagggccccctcagttgcctgagcagctggtggcttccagggagcatctctgctctacccctgccccatgcctgccctgcgtgctggttccttcagacccctaaccctactaaccagcaggctcatctcacctccaggcctgaaacatttcttttctttcttttttcctcccccaattttccctgggcctggagcagccaagaatttcgggctgtttgactttctgtgagcccccagcgaggggaggcccagcctccgaggagaccaggaaccctgcttcagcagcccctcagggcttcccaaggatgtccagcccccacacccacacgttaacataatgagtcactaggcttctggggagggcccaacttcacccatgcatgagagactctcctcctttccagagagaatcggatcgcaccacgtgtggcagcctgcggcggggggaggggggcctctttagctctctttatctttctctctcactcatgtatgcatacatgcacagagatgcatacacaggtgcctatgcaagttcatttaagcctcagggctggtccctgcccaaagggctggaccctcctaatcctctcctaggttgtggggctggtcccctgacacccttctccccttcctggtagaccttaaacctcgcacacatgtccccagcattttctcacctggataaagcccataagctgggtctcaggctgggctcagcaaaggactcgccttgcaaccgacaggccattcccacccccacacacaacctcccctgttttcacattcaccatggcatcccagagcaaggacacaggagcccacaggccagttgaggttgggcaaggagacttccaggacttccagacagagtaccaggttttatttttcaccttattctctactttaaacaaatcataactttctctttaagcctctgctataaattctcctggctctcctgggcttccatattttgggggctggggtgtcaaaagtgagatgaagttcttagctccaggttttggggtaaaccaaggtaggaacattttggcatttatttcaattaacaatacttccttggacgggtgcggtggctcacgtctgtaatcccagcactttgggaggctgagacaggtggatcacttgaggtcgggagttcgagaccagcctggccaacatagcaaaaccctgtctctactaaaaatacaaaaattagatgggtgttttggcacctgcctgtaatctcagctactcaggaggctgaggcacaagaatcgcttgaatccaggaagcaagcggaggttgcagtgagttgagatcgcactccagcctgggtgacagagtgagattctgtctcaaaagcaaactaacaaagaaaaacaatacttcctggggttttggtgtgcagagggctttgttggaagtgtgactcaatcttgcctgccttctgggagctctagaattgttcccaacccagtccatggcttctagccaccactacagggctgtttcatgtacttctctctctgactctgtcttgtccgactctcttgagaatttctcaacgattgctcatgcctgtcagtatcagtgcttccatcgttccatctttgattcacttctctttcctttctatttactcccaaaatggagtcattcatcctgatgtcctcaattgctgctgatatgctggtgattcccaaatacatagctccaacccccaacttcccccagactttagatctgtattggtattacctactggacatctctatggacagttccgtatagactcaactcatctgcccaaccaagtatgttcctcctgaattcctctcctggttacttcatcacaatctacataggctcaccagctagaaacatttatgagcttacattccttcttcccatatcttatcagcatatcatatccatttcactccaacactctgtcttgaatttggccctccctctcccctctctactttaattcattggagcatgggatttggagttaggtggttttgggtttgaattccagctctactatttttggttgtgtgatagagttatttaacctctctgagcctcagttccctcgtatgtaaaatgatgataataatacctacctcacagggttgttgtgaggatttaaattagatattgtacgaaaagtgcctagcacagtgcctggcacacagtagagtaggtgctcaataaatggtagctattattattatta

SEQ ID NO: 63676 - DNA, 5584 bp, Homo sapiens
atcgtctgtttcatcaagaggagtcgcggcggcaagtacccaggtgagatgtgcaagaggcgtgggcttgcagggtggggcacgtccactttcccgtgagtctccaggtctccagccagatccggggaatgtgttctctcagtgaagccgcggccaccggaagagtcgcggtcgccagtccagtcgggagagtggggagcggaagcgcggccgcggcggcggcgggcggcgctgggacccggtagcccccggagaacaagggagctggcgccgccagcagccgccgagctgggttgagccgctgggccgcgccgcgcgccgccgccgtctgggaggctcggcccggccgcccgagcaggccgcgcgcgggccgccgggcccgaggccagagccatgggcgagaccaagatcatctaccacttggatgggcaggagacgccgtaccttgtgaagctgcccctgcccgccgagcgcgtcaccttggcggactttaagggcgttttgcagcgacccagctataagttcttcttcaagtctatggacgacgatttcggagtggtgaaggaggagatctcggatgacaatgccaagctaccatgcttcaatggccgggtggtgtcctggctggtgtcagctgagggctcacacccagacccagcccccttctgtgctgataacccatcggagctgccaccacctatggagcgcacgggaggcatcggggactcccgacccccatccttccaccctcatgctggtgggggcagccaggagaacctggacaatgacacagagacggactctttggtgtctgcccagcgagagcggccacgccggagggatggcccagagcatgcaacccggctaaatggaactgcgaagggggaacggcggcgagaaccagggggttatgatagctcatccacccttatgagcagtgagctggagaccaccagcttctttgactcagatgaggatgactccaccagcaggtggggcttgagtttcatgggtattgtggggcaggtgaccctggaggagccctaaaccctgaggatgcggggcccctgggaggcttatgggctttgtgttggggacccaggccctgcagtgcctcccctcatgggggcagggctgggccagcctggtggggaacgactgtgggccccacaggttcagcagctccacagaacagagcagtgcctcacgcctgatgagaagacacaagcggcggcggcggaagcagaaggtttctcggattgagcggtcctcgtccttcagcagcatcacggactccaccatgtcactcaacatcatcacggtcactctcaacatggaaaaatataacttcttgggcatctccattgtgggccaaagcaacgagcgtggtgacggcggcatctacattggctctatcatgaagggtggggccgtggctgctgatggacgcatcgagccaggagatatgttgttacaggtaaacgagatcaactttgagaacatgagtaatgacgatgcagtccgggtactgcgggagattgtgcacaaaccggggcccatcaccctgactgtagccaagtgctgggacccaagtccacgtggttgcttcacattgcccaggagcgagcccatccggcccattgaccctgcggcctgggtctcccacactgcagccatgaccggcaccttccctgcatacggcatgagcccctccctgagcaccatcacctccaccagctcctccatcaccagttccatccctgacacagagcgcctagacgacttccacttgtccatccacagtgacatggctgccatcgtaaaagccatggcctcccctgaatcagggttggaggtccgtgaccgcatgtggctcaagattaccatccctaatgctttcatcggctcagatgtggtggactggctgtaccacaatgtggaaggcttcacggaccggagggaggcccgcaagtatgccagcaacctgctgaaagctggcttcatccgccataccgtcaacaagatcaccttctccgagcagtgctactacatcttcggtgacctctgcggcaacatggccaacctgtctctccacgatcacgatggctccagtggcgcctctgaccaggacacactggcccctttgccgcacccgggggccgccccttggcccatggctttcccgtaccagtacccgccacccccgcacccatacaacccgcacccgggcttcccggagctgggctacagctacggcgggggcagcgccagcagtcagcacagcgaaggcagtcggagcagtggctccaaccgtagcggcagcgatcggaggaaggagaaggacccgaaggccggggactccaagtccgggggcagcggcagcgaatcggaccacaccacacgcagcagcctgcgggggccgcgggagcgggcgcccagcgagcgctcagggccggcggccagcgagcacagccaccgcagccaccattccctggccagcagccttcgcagccaccacacacacccgagctacggtcctcccggagtgccccctctctacggcccccccatgctgatgatgcccccgccgcccgcggccatggggcccccaggagcccctccgggccgcgacctggcctcagtgcccccggaactgaccgccagcagacagtccttccgcatggccatgggaaaccccagtgagttctttgtggatgtgatgtgagcagggcccctcccccagctccattccgctcccaccccagccggctgcgttcctctctccatccgtccgtcttttttactttgtctggtacctgaaagggaaataaaaggaactaaatccaggtgcgctaactgctcgcagggtgctgcgagggtggggtgcacctaccgattggctctgcagccccctaacctgcctctggccccagttcgtttcctctgcccactaatccctgcgcaggacttcccaggaccccttttgtctctgggaccagacttgttggtgctaccccttactcccctctgcaacccccattttgggagttgaccccagcaatgaccttggtggcacgctcactccctcattctctcgtttcccctttagctccctttcaccatttattcagctacatcatccctctattaaccccaccccatcaggcacgtgtgcaaacctcttgactttaccccacattactgaaaccaaaatatatttgcttcatctgcccctactaaccatccccctgcctgctgcctcagtcctgcaacctaaagctgtagtcgcctccaatagccatccatgccatccctgcctgtgcctagatcagaggcccagagggccccctcagttgcctgagcagctggtggcttccagggagcatctctgctctacccctgccccatgcctgccctgcgtgctggttccttcagacccctaaccctactaaccagcaggctcatctcacctccaggcctgaaacatttcttttctttcttttttcctcccccaattttccctgggcctggagcagccaagaatttcgggctgtttgactttctgtgagcccccagcgaggggaggcccagcctccgaggagaccaggaaccctgcttcagcagcccctcagggcttcccaaggatgtccagcccccacacccacacgttaacataatgagtcactaggcttctggggagggcccaacttcacccatgcatgagagactctcctcctttccagagagaatcggatcgcaccacgtgtggcagcctgcggcggggggaggggggcctctttagctctctttatctttctctctcactcatgtatgcatacatgcacagagatgcatacacaggtgcctatgcaagttcatttaagcctcagggctggtccctgcccaaagggctggaccctcctaatcctctcctaggttgtggggctggtcccctgacacccttctccccttcctggtagaccttaaacctcgcacacatgtccccagcattttctcacctggataaagcccataagctgggtctcaggctgggctcagcaaaggactcgccttgcaaccgacaggccattcccacccccacacacaacctcccctgttttcacattcaccatggcatcccagagcaaggacacaggagcccacaggccagttgaggttgggcaaggagacttccaggacttccagacagagtaccaggttttatttttcaccttattctctactttaaacaaatcataactttctctttaagcctctgctataaattctcctggctctcctgggcttccatattttgggggctggggtgtcaaaagtgagatgaagttcttagctccaggttttggggtaaaccaaggtaggaacattttggcatttatttcaattaacaatacttccttggacgggtgcggtggctcacgtctgtaatcccagcactttgggaggctgagacaggtggatcacttgaggtcgggagttcgagaccagcctggccaacatagcaaaaccctgtctctactaaaaatacaaaaattagatgggtgttttggcacctgcctgtaatctcagctactcaggaggctgaggcacaagaatcgcttgaatccaggaagcaagcggaggttgcagtgagttgagatcgcactccagcctgggtgacagagtgagattctgtctcaaaagcaaactaacaaagaaaaacaatacttcctggggttttggtgtgcagagggctttgttggaagtgtgactcaatcttgcctgccttctgggagctctagaattgttcccaacccagtccatggcttctagccaccactacagggctgtttcatgtacttctctctctgactctgtcttgtccgactctcttgagaatttctcaacgattgctcatgcctgtcagtatcagtgcttccatcgttccatctttgattcacttctctttcctttctatttactcccaaaatggagtcattcatcctgatgtcctcaattgctgctgatatgctggtgattcccaaatacatagctccaacccccaacttcccccagactttagatctgtattggtattacctactggacatctctatggacagttccgtatagactcaactcatctgcccaaccaagtatgttcctcctgaattcctctcctggttacttcatcacaatctacataggctcaccagctagaaacatttatgagcttacattccttcttcccatatcttatcagcatatcatatccatttcactccaacactctgtcttgaatttggccctccctctcccctctctactttaattcattggagcatgggatttggagttaggtggttttgggtttgaattccagctctactatttttggttgtgtgatagagttatttaacctctctgagcctcagttccctcgtatgtaaaatgatgataataatacctacctcacagggttgttgtgaggatttaaattagatattgtacgaaaagtgcctagcacagtgcctggcacacagtagagtaggtgctcaataaatggtagctattattattatta

SEQ ID NO: 63677 - DNA, 4763 bp, Homo sapiens
tggtagcttggcattgtcatccgagatctcctccttcaccactccgaaatcgtcgtccatagacttgaagaagaacttatagctgggtcgctgcaaaacgcccttaaagtccgccaaggtgacgcgctcggcgggcaggggcagcttcacaaggtacggactctttggtgtctgcccagcgagagcggccacgccggagggatggcccagagcatgcaacccggctaaatggaactgcgaagggggaacggcggcgagaaccagggggttatgatagctcatccacccttatgagcagtgagctggagaccaccagcttctttgactcagatgaggatgactccaccagcaggttcagcagctccacagaacagagcagtgcctcacgcctgatgagaagacacaagcggcggcggcggaagcagaaggtttctcggattgagcggtcctcgtccttcagcagcatcacggactccaccatgtcactcaacatcatcacggtcactctcaacatggaaaaatataacttcttgggcatctccattgtgggccaaagcaacgagcgtggtgacggcggcatctacattggctctatcatgaagggtggggccgtggctgctgatggacgcatcgagccaggagatatgttgttacaggtaaacgagatcaactttgagaacatgagtaatgacgatgcagtccgggtactgcgggagattgtgcacaaaccggggcccatcaccctgactgtagccaagtgctgggacccaagtccacgtggttgcttcacattgcccaggagcgagcccatccggcccattgaccctgcggcctgggtctcccacactgcagccatgaccggcaccttccctgcatacggcatgagcccctccctgagcaccatcacctccaccagctcctccatcaccagttccatccctgacacagagcgcctagacgacttccacttgtccatccacagtgacatggctgccatcgtaaaagccatggcctcccctgaatcagggttggaggtccgtgaccgcatgtggctcaagattaccatccctaatgctttcatcggctcagatgtggtggactggctgtaccacaatgtggaaggcttcacggaccggagggaggcccgcaagtatgccagcaacctgctgaaagctggcttcatccgccataccgtcaacaagatcaccttctccgagcagtgctactacatcttcggtgacctctgcggcaacatggccaacctgtctctccacgatcacgatggctccagtggcgcctctgaccaggacacactggcccctttgccgcacccgggggccgccccttggcccatggctttcccgtaccagtacccgccacccccgcacccatacaacccgcacccgggcttcccggagctgggctacagctacggcgggggcagcgccagcagtcagcacagcgaaggcagtcggagcagtggctccaaccgtagcggcagcgatcggaggaaggagaaggacccgaaggccggggactccaagtccgggggcagcggcagcgaatcggaccacaccacacgcagcagcctgcgggggccgcgggagcgggcgcccagcgagcgctcagggccggcggccagcgagcacagccaccgcagccaccattccctggccagcagccttcgcagccaccacacacacccgagctacggtcctcccggagtgccccctctctacggcccccccatgctgatgatgcccccgccgcccgcggccatggggcccccaggagcccctccgggccgcgacctggcctcagtgcccccggaactgaccgccagcagacagtccttccgcatggccatgggaaaccccagtgagttctttgtggatgtgatgtgagcagggcccctcccccagctccattccgctcccaccccagccggctgcgttcctctctccatccgtccgtcttttttactttgtctggtacctgaaagggaaataaaaggaactaaatccaggtgcgctaactgctcgcagggtgctgcgagggtggggtgcacctaccgattggctctgcagccccctaacctgcctctggccccagttcgtttcctctgcccactaatccctgcgcaggacttcccaggaccccttttgtctctgggaccagacttgttggtgctaccccttactcccctctgcaacccccattttgggagttgaccccagcaatgaccttggtggcacgctcactccctcattctctcgtttcccctttagctccctttcaccatttattcagctacatcatccctctattaaccccaccccatcaggcacgtgtgcaaacctcttgactttaccccacattactgaaaccaaaatatatttgcttcatctgcccctactaaccatccccctgcctgctgcctcagtcctgcaacctaaagctgtagtcgcctccaatagccatccatgccatccctgcctgtgcctagatcagaggcccagagggccccctcagttgcctgagcagctggtggcttccagggagcatctctgctctacccctgccccatgcctgccctgcgtgctggttccttcagacccctaaccctactaaccagcaggctcatctcacctccaggcctgaaacatttcttttctttcttttttcctcccccaattttccctgggcctggagcagccaagaatttcgggctgtttgactttctgtgagcccccagcgaggggaggcccagcctccgaggagaccaggaaccctgcttcagcagcccctcagggcttcccaaggatgtccagcccccacacccacacgttaacataatgagtcactaggcttctggggagggcccaacttcacccatgcatgagagactctcctcctttccagagagaatcggatcgcaccacgtgtggcagcctgcggcggggggaggggggcctctttagctctctttatctttctctctcactcatgtatgcatacatgcacagagatgcatacacaggtgcctatgcaagttcatttaagcctcagggctggtccctgcccaaagggctggaccctcctaatcctctcctaggttgtggggctggtcccctgacacccttctccccttcctggtagaccttaaacctcgcacacatgtccccagcattttctcacctggataaagcccataagctgggtctcaggctgggctcagcaaaggactcgccttgcaaccgacaggccattcccacccccacacacaacctcccctgttttcacattcaccatggcatcccagagcaaggacacaggagcccacaggccagttgaggttgggcaaggagacttccaggacttccagacagagtaccaggttttatttttcaccttattctctactttaaacaaatcataactttctctttaagcctctgctataaattctcctggctctcctgggcttccatattttgggggctggggtgtcaaaagtgagatgaagttcttagctccaggttttggggtaaaccaaggtaggaacattttggcatttatttcaattaacaatacttccttggacgggtgcggtggctcacgtctgtaatcccagcactttgggaggctgagacaggtggatcacttgaggtcgggagttcgagaccagcctggccaacatagcaaaaccctgtctctactaaaaatacaaaaattagatgggtgttttggcacctgcctgtaatctcagctactcaggaggctgaggcacaagaatcgcttgaatccaggaagcaagcggaggttgcagtgagttgagatcgcactccagcctgggtgacagagtgagattctgtctcaaaagcaaactaacaaagaaaaacaatacttcctggggttttggtgtgcagagggctttgttggaagtgtgactcaatcttgcctgccttctgggagctctagaattgttcccaacccagtccatggcttctagccaccactacagggctgtttcatgtacttctctctctgactctgtcttgtccgactctcttgagaatttctcaacgattgctcatgcctgtcagtatcagtgcttccatcgttccatctttgattcacttctctttcctttctatttactcccaaaatggagtcattcatcctgatgtcctcaattgctgctgatatgctggtgattcccaaatacatagctccaacccccaacttcccccagactttagatctgtattggtattacctactggacatctctatggacagttccgtatagactcaactcatctgcccaaccaagtatgttcctcctgaattcctctcctggttacttcatcacaatctacataggctcaccagctagaaacatttatgagcttacattccttcttcccatatcttatcagcatatcatatccatttcactccaacactctgtcttgaatttggccctccctctcccctctctactttaattcattggagcatgggatttggagttaggtggttttgggtttgaattccagctctactatttttggttgtgtgatagagttatttaacctctctgagcctcagttccctcgtatgtaaaatgatgataataatacctacctcacagggttgttgtgaggatttaaattagatattgtacgaaaagtgcctagcacagtgcctggcacacagtagagtaggtgctcaataaatggtagctattattattatta

SEQ ID NO: 63678 - DNA, 4877 bp, Homo sapiens
cctcactttccacccagctacccaccttcttgccctacttcccgagctcaggatatgcctggccccagtgcagcccctggcttgcctctctccctccttcacccctgcactgggcactgtgtaaacccaactgcttccatcccctgcagcaacccggctaaatggaactgcgaagggggaacggcggcgagaaccagggggttatgatagctcatccacccttatgagcagtgagctggagaccaccagcttctttgactcagatgaggatgactccaccagcaggtggggcttgagtttcatgggtattgtggggcaggtgaccctggaggagccctaaaccctgaggatgcggggcccctgggaggcttatgggctttgtgttggggacccaggccctgcagtgcctcccctcatgggggcagggctgggccagcctggtggggaacgactgtgggccccacaggttcagcagctccacagaacagagcagtgcctcacgcctgatgagaagacacaagcggcggcggcggaagcagaaggtttctcggattgagcggtcctcgtccttcagcagcatcacggactccaccatgtcactcaacatcatcacggtcactctcaacatggaaaaatataacttcttgggcatctccattgtgggccaaagcaacgagcgtggtgacggcggcatctacattggctctatcatgaagggtggggccgtggctgctgatggacgcatcgagccaggagatatgttgttacaggtaaacgagatcaactttgagaacatgagtaatgacgatgcagtccgggtactgcgggagattgtgcacaaaccggggcccatcaccctgactgtagccaagtgctgggacccaagtccacgtggttgcttcacattgcccaggagcgagcccatccggcccattgaccctgcggcctgggtctcccacactgcagccatgaccggcaccttccctgcatacggcatgagcccctccctgagcaccatcacctccaccagctcctccatcaccagttccatccctgacacagagcgcctagacgacttccacttgtccatccacagtgacatggctgccatcgtaaaagccatggcctcccctgaatcagggttggaggtccgtgaccgcatgtggctcaagattaccatccctaatgctttcatcggctcagatgtggtggactggctgtaccacaatgtggaaggcttcacggaccggagggaggcccgcaagtatgccagcaacctgctgaaagctggcttcatccgccataccgtcaacaagatcaccttctccgagcagtgctactacatcttcggtgacctctgcggcaacatggccaacctgtctctccacgatcacgatggctccagtggcgcctctgaccaggacacactggcccctttgccgcacccgggggccgccccttggcccatggctttcccgtaccagtacccgccacccccgcacccatacaacccgcacccgggcttcccggagctgggctacagctacggcgggggcagcgccagcagtcagcacagcgaaggcagtcggagcagtggctccaaccgtagcggcagcgatcggaggaaggagaaggacccgaaggccggggactccaagtccgggggcagcggcagcgaatcggaccacaccacacgcagcagcctgcgggggccgcgggagcgggcgcccagcgagcgctcagggccggcggccagcgagcacagccaccgcagccaccattccctggccagcagccttcgcagccaccacacacacccgagctacggtcctcccggagtgccccctctctacggcccccccatgctgatgatgcccccgccgcccgcggccatggggcccccaggagcccctccgggccgcgacctggcctcagtgcccccggaactgaccgccagcagacagtccttccgcatggccatgggaaaccccagtgagttctttgtggatgtgatgtgagcagggcccctcccccagctccattccgctcccaccccagccggctgcgttcctctctccatccgtccgtcttttttactttgtctggtacctgaaagggaaataaaaggaactaaatccaggtgcgctaactgctcgcagggtgctgcgagggtggggtgcacctaccgattggctctgcagccccctaacctgcctctggccccagttcgtttcctctgcccactaatccctgcgcaggacttcccaggaccccttttgtctctgggaccagacttgttggtgctaccccttactcccctctgcaacccccattttgggagttgaccccagcaatgaccttggtggcacgctcactccctcattctctcgtttcccctttagctccctttcaccatttattcagctacatcatccctctattaaccccaccccatcaggcacgtgtgcaaacctcttgactttaccccacattactgaaaccaaaatatatttgcttcatctgcccctactaaccatccccctgcctgctgcctcagtcctgcaacctaaagctgtagtcgcctccaatagccatccatgccatccctgcctgtgcctagatcagaggcccagagggccccctcagttgcctgagcagctggtggcttccagggagcatctctgctctacccctgccccatgcctgccctgcgtgctggttccttcagacccctaaccctactaaccagcaggctcatctcacctccaggcctgaaacatttcttttctttcttttttcctcccccaattttccctgggcctggagcagccaagaatttcgggctgtttgactttctgtgagcccccagcgaggggaggcccagcctccgaggagaccaggaaccctgcttcagcagcccctcagggcttcccaaggatgtccagcccccacacccacacgttaacataatgagtcactaggcttctggggagggcccaacttcacccatgcatgagagactctcctcctttccagagagaatcggatcgcaccacgtgtggcagcctgcggcggggggaggggggcctctttagctctctttatctttctctctcactcatgtatgcatacatgcacagagatgcatacacaggtgcctatgcaagttcatttaagcctcagggctggtccctgcccaaagggctggaccctcctaatcctctcctaggttgtggggctggtcccctgacacccttctccccttcctggtagaccttaaacctcgcacacatgtccccagcattttctcacctggataaagcccataagctgggtctcaggctgggctcagcaaaggactcgccttgcaaccgacaggccattcccacccccacacacaacctcccctgttttcacattcaccatggcatcccagagcaaggacacaggagcccacaggccagttgaggttgggcaaggagacttccaggacttccagacagagtaccaggttttatttttcaccttattctctactttaaacaaatcataactttctctttaagcctctgctataaattctcctggctctcctgggcttccatattttgggggctggggtgtcaaaagtgagatgaagttcttagctccaggttttggggtaaaccaaggtaggaacattttggcatttatttcaattaacaatacttccttggacgggtgcggtggctcacgtctgtaatcccagcactttgggaggctgagacaggtggatcacttgaggtcgggagttcgagaccagcctggccaacatagcaaaaccctgtctctactaaaaatacaaaaattagatgggtgttttggcacctgcctgtaatctcagctactcaggaggctgaggcacaagaatcgcttgaatccaggaagcaagcggaggttgcagtgagttgagatcgcactccagcctgggtgacagagtgagattctgtctcaaaagcaaactaacaaagaaaaacaatacttcctggggttttggtgtgcagagggctttgttggaagtgtgactcaatcttgcctgccttctgggagctctagaattgttcccaacccagtccatggcttctagccaccactacagggctgtttcatgtacttctctctctgactctgtcttgtccgactctcttgagaatttctcaacgattgctcatgcctgtcagtatcagtgcttccatcgttccatctttgattcacttctctttcctttctatttactcccaaaatggagtcattcatcctgatgtcctcaattgctgctgatatgctggtgattcccaaatacatagctccaacccccaacttcccccagactttagatctgtattggtattacctactggacatctctatggacagttccgtatagactcaactcatctgcccaaccaagtatgttcctcctgaattcctctcctggttacttcatcacaatctacataggctcaccagctagaaacatttatgagcttacattccttcttcccatatcttatcagcatatcatatccatttcactccaacactctgtcttgaatttggccctccctctcccctctctactttaattcattggagcatgggatttggagttaggtggttttgggtttgaattccagctctactatttttggttgtgtgatagagttatttaacctctctgagcctcagttccctcgtatgtaaaatgatgataataatacctacctcacagggttgttgtgaggatttaaattagatattgtacgaaaagtgcctagcacagtgcctggcacacagtagagtaggtgctcaataaatggtagctattattattatta

SEQ ID NO: 63679 - DNA, 4919 bp, Homo sapiens
agcggagagtggggagcggaagccgccgccgtctgggaggctcggcccggccgcccgagcaggccgcgcgcgggccgccgggcccgaggccagagccatgggcgagaccaagatcatctaccacttggatgggcaggagacgccgtaccttgtgaagctgcccctgcccgccgagcgcgtcaccttggcggactttaagggcgttttgcagcgacccagctataagttcttcttcaagtctatggacgacgatttcggagtggtgaaggaggagatctcggatgacaatgccaagctaccatgcttcaatggccgggtggtgtcctggctggtgtcagctgagggctcacacccagacccagcccccttctgtgctgataacccatcggagctgccaccacctatggagcgcacgggaggcatcggggactcccgacccccatccttccaccctcatgctggtgggggcagccaggagaacctggacaatgacacagagacggactctttggtgtctgcccagcgagagcggccacgccggagggatggcccagagcatgcaacccggctaaatggaactgcgaagggggaacggcggcgagaaccagggggttatgatagctcatccacccttatgagcagtgagctggagaccaccagcttctttgactcagatgaggatgactccaccagcaggttcagcagctccacagaacagagcagtgcctcacgcctgatgagaagacacaagcggcggcggcggaagcagaaggtttctcggattgagcggtcctcgtccttcagcagcatcacggactccaccatgtcactcaacatcatcacggtcactctcaacatggaaaaatataacttcttgggcatctccattgtgggccaaagcaacgagcgtggtgacggcggcatctacattggctctatcatgaagggtggggccgtggctgctgatggacgcatcgagccaggagatatgttgttacaggtaaacgagatcaactttgagaacatgagtaatgacgatgcagtccgggtactgcgggagattgtgcacaaaccggggcccatcaccctgactgtagccaagtgctgggacccaagtccacgtggttgcttcacattgcccaggagcgagcccatccggcccattgaccctgcggcctgggtctcccacactgcagccatgaccggcaccttccctgcatacggcatgagcccctccctgagcaccatcacctccaccagctcctccatcaccagttccatccctgacacagagcgcctagacgacttccacttgtccatccacagtgacatggctgccatcgtaaaagccatggcctcccctgaatcagggttggaggtccgtgaccgcatgtggctcaagattaccatccctaatgctttcatcggctcagatgtggtggactggctgtaccacaatgtggaaggcttcacggaccggagggaggcccgcaagtatgccagcaacctgctgaaagctggcttcatccgccataccgtcaacaagatcaccttctccgagcagtgctactacatcttcggtgacctctgcggcaacatggccaacctgtctctccacgatcacgatggctccagtggcgcctctgaccaggacacactggcccctttgccgcacccgggggccgccccttggcccatggctttcccgtaccagtacccgccacccccgcacccatacaacccgcacccgggcttcccggagctgggctacagctacggcgggggcagcgccagcagtcagcacagcgaaggcagtcggagcagtggctccaaccgtagcggcagcgatcggaggaaggagaaggacccgaaggccggggactccaagtccgggggcagcggcagcgaatcggaccacaccacacgcagcagccatggggcccccaggagcccctccgggccgcgacctggcctcagtgcccccggaactgaccgccagcagacagtccttccgcatggccatgggaaaccccagtgagttctttgtggatgtgatgtgagcagggcccctcccccagctccattccgctcccaccccagccggctgcgttcctctctccatccgtccgtcttttttactttgtctggtacctgaaagggaaataaaaggaactaaatccaggtgcgctaactgctcgcagggtgctgcgagggtggggtgcacctaccgattggctctgcagccccctaacctgcctctggccccagttcgtttcctctgcccactaatccctgcgcaggacttcccaggaccccttttgtctctgggaccagacttgttggtgctaccccttactcccctctgcaacccccattttgggagttgaccccagcaatgaccttggtggcacgctcactccctcattctctcgtttcccctttagctccctttcaccatttattcagctacatcatccctctattaaccccaccccatcaggcacgtgtgcaaacctcttgactttaccccacattactgaaaccaaaatatatttgcttcatctgcccctactaaccatccccctgcctgctgcctcagtcctgcaacctaaagctgtagtcgcctccaatagccatccatgccatccctgcctgtgcctagatcagaggcccagagggccccctcagttgcctgagcagctggtggcttccagggagcatctctgctctacccctgccccatgcctgccctgcgtgctggttccttcagacccctaaccctactaaccagcaggctcatctcacctccaggcctgaaacatttcttttctttcttttttcctcccccaattttccctgggcctggagcagccaagaatttcgggctgtttgactttctgtgagcccccagcgaggggaggcccagcctccgaggagaccaggaaccctgcttcagcagcccctcagggcttcccaaggatgtccagcccccacacccacacgttaacataatgagtcactaggcttctggggagggcccaacttcacccatgcatgagagactctcctcctttccagagagaatcggatcgcaccacgtgtggcagcctgcggcggggggaggggggcctctttagctctctttatctttctctctcactcatgtatgcatacatgcacagagatgcatacacaggtgcctatgcaagttcatttaagcctcagggctggtccctgcccaaagggctggaccctcctaatcctctcctaggttgtggggctggtcccctgacacccttctccccttcctggtagaccttaaacctcgcacacatgtccccagcattttctcacctggataaagcccataagctgggtctcaggctgggctcagcaaaggactcgccttgcaaccgacaggccattcccacccccacacacaacctcccctgttttcacattcaccatggcatcccagagcaaggacacaggagcccacaggccagttgaggttgggcaaggagacttccaggacttccagacagagtaccaggttttatttttcaccttattctctactttaaacaaatcataactttctctttaagcctctgctataaattctcctggctctcctgggcttccatattttgggggctggggtgtcaaaagtgagatgaagttcttagctccaggttttggggtaaaccaaggtaggaacattttggcatttatttcaattaacaatacttccttggacgggtgcggtggctcacgtctgtaatcccagcactttgggaggctgagacaggtggatcacttgaggtcgggagttcgagaccagcctggccaacatagcaaaaccctgtctctactaaaaatacaaaaattagatgggtgttttggcacctgcctgtaatctcagctactcaggaggctgaggcacaagaatcgcttgaatccaggaagcaagcggaggttgcagtgagttgagatcgcactccagcctgggtgacagagtgagattctgtctcaaaagcaaactaacaaagaaaaacaatacttcctggggttttggtgtgcagagggctttgttggaagtgtgactcaatcttgcctgccttctgggagctctagaattgttcccaacccagtccatggcttctagccaccactacagggctgtttcatgtacttctctctctgactctgtcttgtccgactctcttgagaatttctcaacgattgctcatgcctgtcagtatcagtgcttccatcgttccatctttgattcacttctctttcctttctatttactcccaaaatggagtcattcatcctgatgtcctcaattgctgctgatatgctggtgattcccaaatacatagctccaacccccaacttcccccagactttagatctgtattggtattacctactggacatctctatggacagttccgtatagactcaactcatctgcccaaccaagtatgttcctcctgaattcctctcctggttacttcatcacaatctacataggctcaccagctagaaacatttatgagcttacattccttcttcccatatcttatcagcatatcatatccatttcactccaacactctgtcttgaatttggccctccctctcccctctctactttaattcattggagcatgggatttggagttaggtggttttgggtttgaattccagctctactatttttggttgtgtgatagagttatttaacctctctgagcctcagttccctcgtatgtaaaatgatgataataatacctacctcacagggttgttgtgaggatttaaattagatattgtacgaaaagtgcctagcacagtgcctggcacacagtagagtaggtgctcaataaatggtagctattattattatta

SEQ ID NO: 63680 - DNA, 4077 bp, Homo sapiens
tacatacatgagcactgtctctcctttcttctctcacccagaacccccatatctatcctgttgggcccagcagtgggtggggtgggtagcccatgactcctcatcctccctgcaggcgagcccatccggcccattgaccctgcggcctgggtctcccacactgcagccatgaccggcaccttccctgcatacggcatgagcccctccctgagcaccatcacctccaccagctcctccatcaccagttccatccctgacacagagcgcctagacgacttccacttgtccatccacagtgacatggctgccatcgtaaaagccatggcctcccctgaatcagggttggaggtccgtgaccgcatgtggctcaagattaccatccctaatgctttcatcggctcagatgtggtggactggctgtaccacaatgtggaaggcttcacggaccggagggaggcccgcaagtatgccagcaacctgctgaaagctggcttcatccgccataccgtcaacaagatcaccttctccgagcagtgctactacatcttcggtgacctctgcggcaacatggccaacctgtctctccacgatcacgatggctccagtggcgcctctgaccaggacacactggcccctttgccgcacccgggggccgccccttggcccatggctttcccgtaccagtacccgccacccccgcacccatacaacccgcacccgggcttcccggagctgggctacagctacggcgggggcagcgccagcagtcagcacagcgaaggcagtcggagcagtggctccaaccgtagcggcagcgatcggaggaaggagaaggacccgaaggccggggactccaagtccgggggcagcggcagcgaatcggaccacaccacacgcagcagcctgcgggggccgcgggagcgggcgcccagcgagcgctcagggccggcggccagcgagcacagccaccgcagccaccattccctggccagcagccttcgcagccaccacacacacccgagctacggtcctcccggagtgccccctctctacggcccccccatgctgatgatgcccccgccgcccgcggccatggggcccccaggagcccctccgggccgcgacctggcctcagtgcccccggaactgaccgccagcagacagtccttccgcatggccatgggaaaccccagtgagttctttgtggatgtgatgtgagcagggcccctcccccagctccattccgctcccaccccagccggctgcgttcctctctccatccgtccgtcttttttactttgtctggtacctgaaagggaaataaaaggaactaaatccaggtgcgctaactgctcgcagggtgctgcgagggtggggtgcacctaccgattggctctgcagccccctaacctgcctctggccccagttcgtttcctctgcccactaatccctgcgcaggacttcccaggaccccttttgtctctgggaccagacttgttggtgctaccccttactcccctctgcaacccccattttgggagttgaccccagcaatgaccttggtggcacgctcactccctcattctctcgtttcccctttagctccctttcaccatttattcagctacatcatccctctattaaccccaccccatcaggcacgtgtgcaaacctcttgactttaccccacattactgaaaccaaaatatatttgcttcatctgcccctactaaccatccccctgcctgctgcctcagtcctgcaacctaaagctgtagtcgcctccaatagccatccatgccatccctgcctgtgcctagatcagaggcccagagggccccctcagttgcctgagcagctggtggcttccagggagcatctctgctctacccctgccccatgcctgccctgcgtgctggttccttcagacccctaaccctactaaccagcaggctcatctcacctccaggcctgaaacatttcttttctttcttttttcctcccccaattttccctgggcctggagcagccaagaatttcgggctgtttgactttctgtgagcccccagcgaggggaggcccagcctccgaggagaccaggaaccctgcttcagcagcccctcagggcttcccaaggatgtccagcccccacacccacacgttaacataatgagtcactaggcttctggggagggcccaacttcacccatgcatgagagactctcctcctttccagagagaatcggatcgcaccacgtgtggcagcctgcggcggggggaggggggcctctttagctctctttatctttctctctcactcatgtatgcatacatgcacagagatgcatacacaggtgcctatgcaagttcatttaagcctcagggctggtccctgcccaaagggctggaccctcctaatcctctcctaggttgtggggctggtcccctgacacccttctccccttcctggtagaccttaaacctcgcacacatgtccccagcattttctcacctggataaagcccataagctgggtctcaggctgggctcagcaaaggactcgccttgcaaccgacaggccattcccacccccacacacaacctcccctgttttcacattcaccatggcatcccagagcaaggacacaggagcccacaggccagttgaggttgggcaaggagacttccaggacttccagacagagtaccaggttttatttttcaccttattctctactttaaacaaatcataactttctctttaagcctctgctataaattctcctggctctcctgggcttccatattttgggggctggggtgtcaaaagtgagatgaagttcttagctccaggttttggggtaaaccaaggtaggaacattttggcatttatttcaattaacaatacttccttggacgggtgcggtggctcacgtctgtaatcccagcactttgggaggctgagacaggtggatcacttgaggtcgggagttcgagaccagcctggccaacatagcaaaaccctgtctctactaaaaatacaaaaattagatgggtgttttggcacctgcctgtaatctcagctactcaggaggctgaggcacaagaatcgcttgaatccaggaagcaagcggaggttgcagtgagttgagatcgcactccagcctgggtgacagagtgagattctgtctcaaaagcaaactaacaaagaaaaacaatacttcctggggttttggtgtgcagagggctttgttggaagtgtgactcaatcttgcctgccttctgggagctctagaattgttcccaacccagtccatggcttctagccaccactacagggctgtttcatgtacttctctctctgactctgtcttgtccgactctcttgagaatttctcaacgattgctcatgcctgtcagtatcagtgcttccatcgttccatctttgattcacttctctttcctttctatttactcccaaaatggagtcattcatcctgatgtcctcaattgctgctgatatgctggtgattcccaaatacatagctccaacccccaacttcccccagactttagatctgtattggtattacctactggacatctctatggacagttccgtatagactcaactcatctgcccaaccaagtatgttcctcctgaattcctctcctggttacttcatcacaatctacataggctcaccagctagaaacatttatgagcttacattccttcttcccatatcttatcagcatatcatatccatttcactccaacactctgtcttgaatttggccctccctctcccctctctactttaattcattggagcatgggatttggagttaggtggttttgggtttgaattccagctctactatttttggttgtgtgatagagttatttaacctctctgagcctcagttccctcgtatgtaaaatgatgataataatacctacctcacagggttgttgtgaggatttaaattagatattgtacgaaaagtgcctagcacagtgcctggcacacagtagagtaggtgctcaataaatggtagctattattattatta

SEQ ID NO: 63681 - DNA, 2770 bp, Homo sapiens
ccacgcgtcgcggacgcgtggggctaaatccaggtgcgctaactgctcgcagggtgctgcgagggtggggtgcacctaccgattggctctgcagccccctaacctgcctctggccccagttcgtttcctctgcccactaatccctgcgcaggacttcccaggaccccttttgtctctgggaccagacttgttggtgctaccccttactcccctctgcaacccccattttgggagttgaccccagcaatgaccttggtggcacgctcactccctcattctctcgtttcccctttagctccctttcaccatttattcagctacatcatccctctattaaccccaccccatcaggcacgtgtgcaaacctcttgactttaccccacattactgaaaccaaaatatatttgcttcatctgcccctactaaccatccccctgcctgctgcctcagtcctgcaacctaaagctgtagtcgcctccaatagccatccatgccatccctgcctgtgcctagatcagaggcccagagggccccctcagttgcctgagcagctggtggcttccagggagcatctctgctctacccctgccccatgcctgccctgcgtgctggttccttcagacccctaaccctactaaccagcaggctcatctcacctccaggcctgaaacatttcttttctttcttttttcctcccccaattttccctgggcctggagcagccaagaatttcgggctgtttgactttctgtgagcccccagcgaggggaggcccagcctccgaggagaccaggaaccctgcttcagcagcccctcagggcttcccaaggatgtccagcccccacacccacacgttaacataatgagtcactaggcttctggggagggcccaacttcacccatgcatgagagactctcctcctttccagagagaatcggatcgcaccacgtgtggcagcctgcggcggggggaggggggcctctttagctctctttatctttctctctcactcatgtatgcatacatgcacagagatgcatacacaggtgcctatgcaagttcatttaagcctcagggctggtccctgcccaaagggctggaccctcctaatcctctcctaggttgtggggctggtcccctgacacccttctccccttcctggtagaccttaaacctcgcacacatgtccccagcattttctcacctggataaagcccataagctgggtctcaggctgggctcagcaaaggactcgccttgcaaccgacaggccattcccacccccacacacaacctcccctgttttcacattcaccatggcatcccagagcaaggacacaggagcccacaggccagttgaggttgggcaaggagacttccaggacttccagacagagtaccaggttttatttttcaccttattctctactttaaacaaatcataactttctctttaagcctctgctataaattctcctggctctcctgggcttccatattttgggggctggggtgtcaaaagtgagatgaagttcttagctccaggttttggggtaaaccaaggtaggaacattttggcatttatttcaattaacaatacttccttggacgggtgcggtggctcacgtctgtaatcccagcactttgggaggctgagacaggtggatcacttgaggtcgggagttcgagaccagcctggccaacatagcaaaaccctgtctctactaaaaatacaaaaattagatgggtgttttggcacctgcctgtaatctcagctactcaggaggctgaggcacaagaatcgcttgaatccaggaagcaagcggaggttgcagtgagttgagatcgcactccagcctgggtgacagagtgagattctgtctcaaaagcaaactaacaaagaaaaacaatacttcctggggttttggtgtgcagagggctttgttggaagtgtgactcaatcttgcctgccttctgggagctctagaattgttcccaacccagtccatggcttctagccaccactacagggctgtttcatgtacttctctctctgactctgtcttgtccgactctcttgagaatttctcaacgattgctcatgcctgtcagtatcagtgcttccatcgttccatctttgattcacttctctttcctttctatttactcccaaaatggagtcattcatcctgatgtcctcaattgctgctgatatgctggtgattcccaaatacatagctccaacccccaacttcccccagactttagatctgtattggtattacctactggacatctctatggacagttccgtatagactcaactcatctgcccaaccaagtatgttcctcctgaattcctctcctggttacttcatcacaatctacataggctcaccagctagaaacatttatgagcttacattccttcttcccatatcttatcagcatatcatatccatttcactccaacactctgtcttgaatttggccctccctctcccctctctactttaattcattggagcatgggatttggagttaggtggttttgggtttgaattccagctctactatttttggttgtgtgatagagttatttaacctctctgagcctcagttccctcgtatgtaaaatgatgataataatacctacctcacagggttgttgtgaggatttaaattagatattgtacgaaaagtgcctagcacagtgcctggcacacagtagagtaggtgctcaataaatggtagctattattattatta

SEQ ID NO: 63682 - DNA, 2516 bp, Homo sapiens
agcggagagtggggagcggaagccgccgccgtctgggaggctcggcccggccgcccgagcaggccgcgcgcgggccgccgggcccgaggccagagccatgggcgagaccaagatcatctaccacttggatgggcaggagacgccgtaccttgtgaagctgcccctgcccgccgagcgcgtcaccttggcggactttaagggcgttttgcagcgacccagctataagttcttcttcaagtctatggacgacgatttcggagtggtgaaggaggagatctcggatgacaatgccaagctaccatgcttcaatggccgggtggtgtcctggctggtgtcagctgagggctcacacccagacccagcccccttctgtgctgataacccatcggagctgccaccacctatggagcgcacgggaggcatcggggactcccgacccccatccttccaccctcatgctggtgggggcagccaggagaacctggacaatgacacagagacggactctttggtgtctgcccagcgagagcggccacgccggagggatggcccagagcatgcaacccggctaaatggaactgcgaagggggaacggcggcgagaaccagggggttatgatagctcatccacccttatgagcagtgagctggagaccaccagcttctttgactcagatgaggatgactccaccagcaggttcagcagctccacagaacagagcagtgcctcacgcctgatgagaagacacaagcggcggcggcggaagcagaaggtttctcggattgagcggtcctcgtccttcagcagcatcacggactccaccatgtcactcaacatcatcacggtcactctcaacatggaaaaatataacttcttgggcatctccattgtgggccaaagcaacgagcgtggtgacggcggcatctacattggctctatcatgaagggtggggccgtggctgctgatggacgcatcgagccaggagatatgttgttacaggtaaacgagatcaactttgagaacatgagtaatgacgatgcagtccgggtactgcgggagattgtgcacaaaccggggcccatcaccctgactgtagccaagtgctgggacccaagtccacgtggttgcttcacattgcccaggagcgagcccatccggcccattgaccctgcggcctgggtctcccacactgcagccatgaccggcaccttccctgcatacggcatgagcccctccctgagcaccatcacctccaccagctcctccatcaccagttccatccctgacacagagcgcctagacgacttccacttgtccatccacagtgacatggctgccatcgtaaaagccatggcctcccctgaatcagggttggaggtccgtgaccgcatgtggctcaagattaccatccctaatgctttcatcggctcagatgtggtggactggctgtaccacaatgtggaaggcttcacggaccggagggaggcccgcaagtatgccagcaacctgctgaaagctggcttcatccgccataccgtcaacaagatcaccttctccgagcagtgctactacatcttcggtgacctctgcggcaacatggccaacctgtctctccacgatcacgatggctccagtggcgcctctgaccaggacacactggcccctttgccgcacccgggggccgccccttggcccatggctttcccgtaccagtacccgccacccccgcacccatacaacccgcacccgggcttcccggagctgggctacagctacggcgggggcagcgccagcagtcagcacagcgaaggcagtcggagcagtggctccaaccgtagcggcagcgatcggaggaaggagaaggacccgaaggccggggactccaagtccgggggcagcggcagcgaatcggaccacaccacacgcagcagcctgcgggggccgcgggagcgggcgcccagcgagcgctcagggccggcggccagcgagcacagccaccgcagccaccattccctggccagcagccttcgcagccaccacacacacccgagctacggtcctcccggagtgccccctctctacggcccccccatgctgatgatgcccccgccgcccgcggccatggggcccccaggagcccctccgggccgcgacctggcctcagtgcccccggaactgaccgccagcagacagtccttccgcatggccatgggaaaccccagtgagttctttgtggatgtgatgtgagcagggcccctcccccagctccattccgctcccaccccagccggctgcgttcctctctccatccgtccgtcttttttactttgtctggtacctgaaagggaaataaaaggaagggccttcaagaccaaccagcccgggcctcctcgctctgcagactggggcaactgagacccagagagggcaggaggctgcccacaatcaaagagcaagggccggaccttgggctcctacctctggtccagggtgggctcgcattcctggggaattc

SEQ ID NO: 63683 - DNA, 1827 bp, Homo sapiens
ttagaggatccctgtgctcgtagggggggaggggggcctctttagctctctttatctttctctctcactcatgtatgcatacatgcacagagatgcatacacaggtgcctatgcaagttcatttaagcctcagggctggtccctgcccaaagggctggaccctcctaatcctctcctaggttgtggggctggtcccctgacacccttctccccttcctggtagaccttaaacctcgcacacatgtccccagcattttctcacctggataaagcccataagctgggtctcaggctgggctcagcaaaggactcgccttgcaaccgacaggccattcccacccccacacacaacctcccctgttttcacattcaccatggcatcccagagcaaggacacaggagcccacaggccagttgaggttgggcaaggagacttccaggacttccagacagagtaccaggttttatttttcaccttattctctactttaaacaaatcataactttctctttaagcctctgctataaattctcctggctctcctgggcttccatattttgggggctggggtgtcaaaagtgagatgaagttcttagctccaggttttggggtaaaccaaggtaggaacattttggcatttatttcaattaacaatacttccttggacgggtgcggtggctcacgtctgtaatcccagcactttgggaggctgagacaggtggatcacttgaggtcgggagttcgagaccagcctggccaacatagcaaaaccctgtctctactaaaaatacaaaaattagatgggtgttttggcacctgcctgtaatctcagctactcaggaggctgaggcacaagaatcgcttgaatccaggaagcaagcggaggttgcagtgagttgagatcgcactccagcctgggtgacagagtgagattctgtctcaaaagcaaactaacaaagaaaaacaatacttcctggggttttggtgtgcagagggctttgttggaagtgtgactcaatcttgcctgccttctgggagctctagaattgttcccaacccagtccatggcttctagccaccactacagggctgtttcatgtacttctctctctgactctgtcttgtccgactctcttgagaatttctcaacgattgctcatgcctgtcagtatcagtgcttccatcgttccatctttgattcacttctctttcctttctatttactcccaaaatggagtcattcatcctgatgtcctcaattgctgctgatatgctggtgattcccaaatacatagctccaacccccaacttcccccagactttagatctgtattggtattacctactggacatctctatggacagttccgtatagactcaactcatctgcccaaccaagtatgttcctcctgaattcctctcctggttacttcatcacaatctacataggctcaccagctagaaacatttatgagcttacattccttcttcccatatcttatcagcatatcatatccatttcactccaacactctgtcttgaatttggccctccctctcccctctctactttaattcattggagcatgggatttggagttaggtggttttgggtttgaattccagctctactatttttggttgtgtgatagagttatttaacctctctgagcctcagttccctcgtatgtaaaatgatgataataatacctacctcacagggttgttgtgaggatttaaattagatattgtacgaaaagtgcctagcacagtgcctggcacacagtagagtaggtgctcaataaatggtagctattattattatta

SEQ ID NO: 63684 - DNA, 855 bp, Homo sapiens
tgaggtcgtctagaggatccctcgcagatggcggaagtgtgactcaatcttgcctgccttctgggagctctagaattgttcccaacccagtccatggcttctagccaccactacagggctgtttcatgtacttctctctctgactctgtcttgtccgactctcttgagaatttctcaacgattgctcatgcctgtcagtatcagtgcttccatcgttccatctttgattcacttctctttcctttctatttactcccaaaatggagtcattcatcctgatgtcctcaattgctgctgatatgctggtgattcccaaatacatagctccaacccccaacttcccccagactttagatctgtattggtattacctactggacatctctatggacagttccgtatagactcaactcatctgcccaaccaagtatgttcctcctgaattcctctcctggttacttcatcacaatctacataggctcaccagctagaaacatttatgagcttacattccttcttcccatatcttatcagcatatcatatccatttcactccaacactctgtcttgaatttggccctccctctcccctctctactttaattcattggagcatgggatttggagttaggtggttttgggtttgaattccagctctactatttttggttgtgtgatagagttatttaacctctctgagcctcagttccctcgtatgtaaaatgatgataataatacctacctcacagggttgttgtgaggatttaaattagatattgtacgaaaagtgcctagcacagtgcctggcacacagtagagtaggtgctcaataaatggtagctattattattatta

SEQ ID NO: 63685 - DNA, 1589 bp, Homo sapiens
agcggagagtggggagcggaagccgccgccgtctgggaggctcggcccggccgcccgagcaggccgcgcgcgggccgccgggcccgaggccagagccatgggcgagaccaagatcatctaccacttggatgggcaggagacgccgtaccttgtgaagctgcccctgcccgccgagcgcgtcaccttggcggactttaagggcgttttgcagcgacccagctataagttcttcttcaagtctatggacgacgatttcggagtggtgaaggaggagatctcggatgacaatgccaagctaccatgcttcaatggccgggtggtgtcctggctggtgtcagctgagggctcacacccagacccagcccccttctgtgctgataacccatcggagctgccaccacctatggagcgcacgggaggcatcggggactcccgacccccatccttccaccctcatgctggtgggggcagccaggagaacctggacaatgacacagagacggactctttggtgtctgcccagcgagagcggccacgccggagggatggcccagagcatgcaacccggctaaatggaactgcgaagggggaacggcggcgagaaccagggggttatgatagctcatccacccttatgagcagtgagctggagaccaccagcttctttgactcagatgaggatgactccaccagcaggttcagcagctccacagaacagagcagtgcctcacgcctgatgagaagacacaagcggcggcggcggaagcagaaggtttctcggattgagcggtcctcgtccttcagcagcatcacggactccaccatgtcactcaacatcatcacggtcactctcaacatggaaaaatataacttcttgggcatctccattgtgggccaaagcaacgagcgtggtgacggcggcatctacattggctctatcatgaagggtggggccgtggctgctgatggacgcatcgagccaggagatatgttgttacaggtaaacgagatcaactttgagaacatgagtaatgacgatgcagtccgggtactgcgggagattgtgcacaaaccggggcccatcaccctgactgtagccaagtgctgggacccaagtccacgtggttgcttcacattgcccaggagcgagcccatccggcccattgaccctgcggcctgggtctcccacactgcagccatgaccggcaccttccctgcatacggcatgagcccctccctgagcaccatcacctccaccagctcctccatcaccagttccatccctgacacagagcgcctagacgacttccacttgtccatccacagtgacatggctgccatcgtaaaagccatggcctcccctggatggagccccaacccgggcgttgctggggagcttgctgcaaagtcacagcaagaggcttagagggaagtgtttgccttcagtaccctggcacaggtccccatctatcagctgccatttacgtgcactgcccgtgcttcccgggtgcactgaaaggggccatgaatgtagagctaaacccgtccctgatggagccccaaaggggatctctagatcgacacagcac

SEQ ID NO: 63686 - DNA, 1279 bp, Homo sapiens
agcggagagtggggagcggaagccgccgccgtctgggaggctcggcccggccgcccgagcaggccgcgcgcgggccgccgggcccgaggccagagccatgggcgagaccaagatcatctaccacttggatgggcaggagacgccgtaccttgtgaagctgcccctgcccgccgagcgcgtcaccttggcggactttaagggcgttttgcagcgacccagctataagttcttcttcaagtctatggacgacgatttcggagtggtgaaggaggagatctcggatgacaatgccaagctaccatgcttcaatggccgggtggtgtcctggctggtgtcagctgagggctcacacccagacccagcccccttctgtgctgataacccatcggagctgccaccacctatggagcgcacgggaggcatcggggactcccgacccccatccttccaccctcatgctggtgggggcagccaggagaacctggacaatgacacagagacggactctttggtgtctgcccagcgagagcggccacgccggagggatggcccagagcatgcaacccggctaaatggaactgcgaagggggaacggcggcgagaaccagggggttatgatagctcatccacccttatgagcagtgagctggagaccaccagcttctttgactcagatgaggatgactccaccagcaggttcagcagctccacagaacagagcagtgcctcacgcctgatgagaagacacaagcggcggcggcggaagcagaaggtttctcggattgagcggtcctcgtccttcagcagcatcacggactccaccatgtcactcaacatcatcacggtcactctcaacatggaaaaatataacttcttgggcatctccattgtgggccaaagcaacgagcgtggtgacggcggcatctacattggctctatcatgaagggtggggccgtggctgctgatggacgcatcgagccaggagatatgttgttacaggtaaacgagatcaactttgagaacatgagtaatgacgatgcagtccgggtactgcgggagattgtgcacaaaccggggcccatcaccctgactgtagccaagtgctgggacccaagtccacgtggttgcttcacattgcccaggagcgagcccatccggcccattgaccctgcggcctgggtctcccacactgcagccatgaccggcaccttccctgcatacggcatgagcccctccctgagcaccaagcgccgtcccaaagcaagaagatcctctaga

SEQ ID NO: 63687 - DNA, 1270 bp, Homo sapiens
agcggagagtggggagcggaagccgccgccgtctgggaggctcggcccggccgcccgagcaggccgcgcgcgggccgccgggcccgaggccagagccatgggcgagaccaagatcatctaccacttggatgggcaggagacgccgtaccttgtgaagctgcccctgcccgccgagcgcgtcaccttggcggactttaagggcgttttgcagcgacccagctataagttcttcttcaagtctatggacgacgatttcggagtggtgaaggaggagatctcggatgacaatgccaagctaccatgcttcaatggccgggtggtgtcctggctggtgtcagctgagggctcacacccagacccagcccccttctgtgctgataacccatcggagctgccaccacctatggagcgcacgggaggcatcggggactcccgacccccatccttccaccctcatgctggtgggggcagccaggagaacctggacaatgacacagagacggactctttggtgtctgcccagcgagagcggccacgccggagggatggcccagagcatgcaacccggctaaatggaactgcgaagggggaacggcggcgagaaccagggggttatgatagctcatccacccttatgagcagtgagctggagaccaccagcttctttgactcagatgaggatgactccaccagcaggttcagcagctccacagaacagagcagtgcctcacgcctgatgagaagacacaagcggcggcggcggaagcagaaggtttctcggattgagcggtcctcgtccttcagcagcatcacggactccaccatgtcactcaacatcatcacggtcactctcaacatggaaaaatataacttcttgggcatctccattgtgggccaaagcaacgagcgtggtgacggcggcatctacattggctctatcatgaagggtggggccgtggctgctgatggacgcatcgagccaggagatatgttgttacaggtaaacgagatcaactttgagaacatgagtaatgacgatgcagtccgggtactgcgggagattgtgcacaaaccggggcccatcaccctgactgtagccaagtgctgggacccaagtccacgtggttgcttcacattgcccaggagcgagcccatccggcccaacacggtgcgttggcgttgggccaacgcaccgtgttggccaacgcaccgtgttgggccaacgcaccgtggggttggtgtaaaataggcggacagtgtagacgaacgg

SEQ ID NO: 63688 - DNA, 1182 bp, Homo sapiens
agcggagagtggggagcggaagccgccgccgtctgggaggctcggcccggccgcccgagcaggccgcgcgcgggccgccgggcccgaggccagagccatgggcgagaccaagatcatctaccacttggatgggcaggagacgccgtaccttgtgaagctgcccctgcccgccgagcgcgtcaccttggcggactttaagggcgttttgcagcgacccagctataagttcttcttcaagtctatggacgacgatttcggagtggtgaaggaggagatctcggatgacaatgccaagctaccatgcttcaatggccgggtggtgtcctggctggtgtcagctgagggctcacacccagacccagcccccttctgtgctgataacccatcggagctgccaccacctatggagcgcacgggaggcatcggggactcccgacccccatccttccaccctcatgctggtgggggcagccaggagaacctggacaatgacacagagacggactctttggtgtctgcccagcgagagcggccacgccggagggatggcccagagcatgcaacccggctaaatggaactgcgaagggggaacggcggcgagaaccagggggttatgatagctcatccacccttatgagcagtgagctggagaccaccagcttctttgactcagatgaggatgactccaccagcaggttcagcagctccacagaacagagcagtgcctcacgcctgatgagaagacacaagcggcggcggcggaagcagaaggtttctcggattgagcggtcctcgtccttcagcagcatcacggactccaccatgtcactcaacatcatcacggtcactctcaacatggaaaaatataacttcttgggcatctccattgtgggccaaagcaacgagcgtggtgacggcggcatctacattggctctatcatgaagggtggggccgtggctgctgatggacgcatcgagccaggagatatgttgttacaggtaaacgagatcaactttgagaacatgagtaatgacgatgcagtccgggtactgcgggagattgtgcacaaaccggggcccatcaccctgactgtagccaagtgctgggacccaagtccacgtggttgcttcacattgcccaggagcgagcccacccgacctcaattaaggtccttaatcag

SEQ ID NO: 63689 - DNA, 508 bp, Homo sapiens
tcagacacttgcctcaggtttccttctgccatctgctcatctctgccttagacctctgagccttgttctttgtccccattccacttcaccaccccatgccttccaacaaccccgtcaatagcaggaagtggcagaggggccactgttcatctcagccaccctcgcacagccctgtcttttctccctcgatatttcctgcttccttcctcttaggccttcatgccttgctggaagtgaactatccccttctccttgatgctcctgtaacatactactcactcagtttctccctttcagctggtgtcagctgagggctcacacccagacccagcccccttctgtgctgataacccatcggagctgccaccacctatggagcgcacgggaggcatcggggactcccgacccccatccttccagtgagtgtgacctgagggtggggagggccgcatcagttcagcccagggctgggggagggagcccccagcctgccccctcccccatcaag

SEQ ID NO: 63690 - DNA, 5403 bp, Homo sapiens
atcgtctgtttcatcaagaggagtcgcggcggcaagtacccaggtgagatgtgcaagaggcgtgggcttgcagggtggggcacgtccactttcccgtgagtctccaggtctccagccagatccggggaatgtgttctctcagtgaagccgcggccaccggaagagtcgcggtcgccagtccagtcgggagagtggggagcggaagcgcggccgcggcggcggcgggcggcgctgggacccggtagcccccggagaacaagggagctggcgccgccagcagccgccgagctgggttgagccgctgggccgcgccgcgcgccgccgccgtctgggaggctcggcccggccgcccgagcaggccgcgcgcgggccgccgggcccgaggccagagccatgggcgagaccaagatcatctaccacttggatgggcaggagacgccgtaccttgtgaagctgcccctgcccgccgagcgcgtcaccttggcggactttaagggcgttttgcagcgacccagctataagttcttcttcaagtctatggacgacgatttcggagtggtgaaggaggagatctcggatgacaatgccaagctaccatgcttcaatggccgggtggtgtcctggctggtgtcagctgagggctcacacccagacccagcccccttctgtgctgataacccatcggagctgccaccacctatggagcgcacgggaggcatcggggactcccgacccccatccttccaccctcatgctggtgggggcagccaggagaacctggacaatgacacagagacggactctttggtgtctgcccagcgagagcggccacgccggagggatggcccagagcatgcaacccggctaaatggaactgcgaagggggaacggcggcgagaaccagggggttatgatagctcatccacccttatgagcagtgagctggagaccaccagcttctttgactcagatgaggatgactccaccagcaggttcagcagctccacagaacagagcagtgcctcacgcctgatgagaagacacaagcggcggcggcggaagcagaaggtttctcggattgagcggtcctcgtccttcagcagcatcacggactccaccatgtcactcaacatcatcacggtcactctcaacatggaaaaatataacttcttgggcatctccattgtgggccaaagcaacgagcgtggtgacggcggcatctacattggctctatcatgaagggtggggccgtggctgctgatggacgcatcgagccaggagatatgttgttacaggtaaacgagatcaactttgagaacatgagtaatgacgatgcagtccgggtactgcgggagattgtgcacaaaccggggcccatcaccctgactgtagccaagtgctgggacccaagtccacgtggttgcttcacattgcccaggagcgagcccatccggcccattgaccctgcggcctgggtctcccacactgcagccatgaccggcaccttccctgcatacggcatgagcccctccctgagcaccatcacctccaccagctcctccatcaccagttccatccctgacacagagcgcctagacgacttccacttgtccatccacagtgacatggctgccatcgtaaaagccatggcctcccctgaatcagggttggaggtccgtgaccgcatgtggctcaagattaccatccctaatgctttcatcggctcagatgtggtggactggctgtaccacaatgtggaaggcttcacggaccggagggaggcccgcaagtatgccagcaacctgctgaaagctggcttcatccgccataccgtcaacaagatcaccttctccgagcagtgctactacatcttcggtgacctctgcggcaacatggccaacctgtctctccacgatcacgatggctccagtggcgcctctgaccaggacacactggcccctttgccgcacccgggggccgccccttggcccatggctttcccgtaccagtacccgccacccccgcacccatacaacccgcacccgggcttcccggagctgggctacagctacggcgggggcagcgccagcagtcagcacagcgaaggcagtcggagcagtggctccaaccgtagcggcagcgatcggaggaaggagaaggacccgaaggccggggactccaagtccgggggcagcggcagcgaatcggaccacaccacacgcagcagcctgcgggggccgcgggagcgggcgcccagcgagcgctcagggccggcggccagcgagcacagccaccgcagccaccattccctggccagcagccttcgcagccaccacacacacccgagctacggtcctcccggagtgccccctctctacggcccccccatgctgatgatgcccccgccgcccgcggccatggggcccccaggagcccctccgggccgcgacctggcctcagtgcccccggaactgaccgccagcagacagtccttccgcatggccatgggaaaccccagtgagttctttgtggatgtgatgtgagcagggcccctcccccagctccattccgctcccaccccagccggctgcgttcctctctccatccgtccgtcttttttactttgtctggtacctgaaagggaaataaaaggaactaaatccaggtgcgctaactgctcgcagggtgctgcgagggtggggtgcacctaccgattggctctgcagccccctaacctgcctctggccccagttcgtttcctctgcccactaatccctgcgcaggacttcccaggaccccttttgtctctgggaccagacttgttggtgctaccccttactcccctctgcaacccccattttgggagttgaccccagcaatgaccttggtggcacgctcactccctcattctctcgtttcccctttagctccctttcaccatttattcagctacatcatccctctattaaccccaccccatcaggcacgtgtgcaaacctcttgactttaccccacattactgaaaccaaaatatatttgcttcatctgcccctactaaccatccccctgcctgctgcctcagtcctgcaacctaaagctgtagtcgcctccaatagccatccatgccatccctgcctgtgcctagatcagaggcccagagggccccctcagttgcctgagcagctggtggcttccagggagcatctctgctctacccctgccccatgcctgccctgcgtgctggttccttcagacccctaaccctactaaccagcaggctcatctcacctccaggcctgaaacatttcttttctttcttttttcctcccccaattttccctgggcctggagcagccaagaatttcgggctgtttgactttctgtgagcccccagcgaggggaggcccagcctccgaggagaccaggaaccctgcttcagcagcccctcagggcttcccaaggatgtccagcccccacacccacacgttaacataatgagtcactaggcttctggggagggcccaacttcacccatgcatgagagactctcctcctttccagagagaatcggatcgcaccacgtgtggcagcctgcggcggggggaggggggcctctttagctctctttatctttctctctcactcatgtatgcatacatgcacagagatgcatacacaggtgcctatgcaagttcatttaagcctcagggctggtccctgcccaaagggctggaccctcctaatcctctcctaggttgtggggctggtcccctgacacccttctccccttcctggtagaccttaaacctcgcacacatgtccccagcattttctcacctggataaagcccataagctgggtctcaggctgggctcagcaaaggactcgccttgcaaccgacaggccattcccacccccacacacaacctcccctgttttcacattcaccatggcatcccagagcaaggacacaggagcccacaggccagttgaggttgggcaaggagacttccaggacttccagacagagtaccaggttttatttttcaccttattctctactttaaacaaatcataactttctctttaagcctctgctataaattctcctggctctcctgggcttccatattttgggggctggggtgtcaaaagtgagatgaagttcttagctccaggttttggggtaaaccaaggtaggaacattttggcatttatttcaattaacaatacttccttggacgggtgcggtggctcacgtctgtaatcccagcactttgggaggctgagacaggtggatcacttgaggtcgggagttcgagaccagcctggccaacatagcaaaaccctgtctctactaaaaatacaaaaattagatgggtgttttggcacctgcctgtaatctcagctactcaggaggctgaggcacaagaatcgcttgaatccaggaagcaagcggaggttgcagtgagttgagatcgcactccagcctgggtgacagagtgagattctgtctcaaaagcaaactaacaaagaaaaacaatacttcctggggttttggtgtgcagagggctttgttggaagtgtgactcaatcttgcctgccttctgggagctctagaattgttcccaacccagtccatggcttctagccaccactacagggctgtttcatgtacttctctctctgactctgtcttgtccgactctcttgagaatttctcaacgattgctcatgcctgtcagtatcagtgcttccatcgttccatctttgattcacttctctttcctttctatttactcccaaaatggagtcattcatcctgatgtcctcaattgctgctgatatgctggtgattcccaaatacatagctccaacccccaacttcccccagactttagatctgtattggtattacctactggacatctctatggacagttccgtatagactcaactcatctgcccaaccaagtatgttcctcctgaattcctctcctggttacttcatcacaatctacataggctcaccagctagaaacatttatgagcttacattccttcttcccatatcttatcagcatatcatatccatttcactccaacactctgtcttgaatttggccctccctctcccctctctactttaattcattggagcatgggatttggagttaggtggttttgggtttgaattccagctctactatttttggttgtgtgatagagttatttaacctctctgagcctcagttccctcgtatgtaaaatgatgataataatacctacctcacagggttgttgtgaggatttaaattagatattgtacgaaaagtgcctagcacagtgcctggcacacagtagagtaggtgctcaataaatggtagctattattattatta

SEQ ID NO: 63691 - DNA, 5180 bp, Homo sapiens
  misc_feature (5112)..(5112): n is a, c, g, or t
atcgtctgtttcatcaagaggagtcgcggcggcaagtacccaggtgagatgtgcaagaggcgtgggcttgcagggtggggcacgtccactttcccgtgagtctccaggtctccagccagatccggggaatgtgttctctcagtgaagccgcggccaccggaagagtcgcggtcgccagtccagtcgggagagtggggagcggaagcgcggccgcggcggcggcgggcggcgctgggacccggtagcccccggagaacaagggagctggcgccgccagcagccgccgagctgggttgagccgctgggccgcgccgcgcgccgccgccgtctgggaggctcggcccggccgcccgagcaggccgcgcgcgggccgccgggcccgaggccagagccatgggcgagaccaagatcatctaccacttggatgggcaggagacgccgtaccttgtgaagctgcccctgcccgccgagcgcgtcaccttggcggactttaagggcgttttgcagcgacccagctataagttcttcttcaagtctatggacgacgatttcggagtggtgaaggaggagatctcggatgacaatgccaagctaccatgcttcaatggccgggtggtgtcctggctggtgtcagctgagggctcacacccagacccagcccccttctgtgctgataacccatcggagctgccaccacctatggagcgcacgggaggcatcggggactcccgacccccatccttccaccctcatgctggtgggggcagccaggagaacctggacaatgacacagagacggactctttggtgtctgcccagcgagagcggccacgccggagggatggcccagagcatgcaacccggctaaatggaactgcgaagggggaacggcggcgagaaccagggggttatgatagctcatccacccttatgagcagtgagctggagaccaccagcttctttgactcagatgaggatgactccaccagcaggttcagcagctccacagaacagagcagtgcctcacgcctgatgagaagacacaagcggcggcggcggaagcagaaggtttctcggattgagcggtcctcgtccttcagcagcatcacggactccaccatgtcactcaacatcatcacggtcactctcaacatggaaaaatataacttcttgggcatctccattgtgggccaaagcaacgagcgtggtgacggcggcatctacattggctctatcatgaagggtggggccgtggctgctgatggacgcatcgagccaggagatatgttgttacaggtaaacgagatcaactttgagaacatgagtaatgacgatgcagtccgggtactgcgggagattgtgcacaaaccggggcccatcaccctgactgtagccaagtgctgggacccaagtccacgtggttgcttcacattgcccaggagcgagcccatccggcccattgaccctgcggcctgggtctcccacactgcagccatgaccggcaccttccctgcatacggcatgagcccctccctgagcaccatcacctccaccagctcctccatcaccagttccatccctgacacagagcgcctagacgacttccacttgtccatccacagtgacatggctgccatcgtaaaagccatggcctcccctgaatcagggttggaggtccgtgaccgcatgtggctcaagattaccatccctaatgctttcatcggctcagatgtggtggactggctgtaccacaatgtggaaggcttcacggaccggagggaggcccgcaagtatgccagcaacctgctgaaagctggcttcatccgccataccgtcaacaagatcaccttctccgagcagtgctactacatcttcggtgacctctgcggcaacatggccaacctgtctctccacgatcacgatggctccagtggcgcctctgaccaggacacactggcccctttgccgcacccgggggccgccccttggcccatggctttcccgtaccagtacccgccacccccgcacccatacaacccgcacccgggcttcccggagctgggctacagctacggcgggggcagcgccagcagtcagcacagcgaaggcagtcggagcagtggctccaaccgtagcggcagcgatcggaggaaggagaaggacccgaaggccggggactccaagtccgggggcagcggcagcgaatcggaccacaccacacgcagcagcctgcgggggccgcgggagcgggcgcccagcgagcgctcagggccggcggccagcgagcacagccaccgcagccaccattccctggccagcagccttcgcagccaccacacacacccgagctacggtcctcccggagtgccccctctctacggcccccccatgctgatgatgcccccgccgcccgcggccatggggcccccaggagcccctccgggccgcgacctggcctcagtgcccccggaactgaccgccagcagacagtccttccgcatggccatgggaaaccccagtgagttctttgtggatgtgatgtgagcagggcccctcccccagctccattccgctcccaccccagccggctgcgttcctctctccatccgtccgtcttttttactttgtctggtacctgaaagggaaataaaaggaactaaatccaggtgcgctaactgctcgcagggtgctgcgagggtggggtgcacctaccgattggctctgcagccccctaacctgcctctggccccagttcgtttcctctgcccactaatccctgcgcaggacttcccaggaccccttttgtctctgggaccagacttgttggtgctaccccttactcccctctgcaacccccattttgggagttgaccccagcaatgaccttggtggcacgctcactccctcattctctcgtttcccctttagctccctttcaccatttattcagctacatcatccctctattaaccccaccccatcaggcacgtgtgcaaacctcttgactttaccccacattactgaaaccaaaatatatttgcttcatctgcccctactaaccatccccctgcctgctgcctcagtcctgcaacctaaagctgtagtcgcctccaatagccatccatgccatccctgcctgtgcctagatcagaggcccagagggccccctcagttgcctgagcagctggtggcttccagggagcatctctgctctacccctgccccatgcctgccctgcgtgctggttccttcagacccctaaccctactaaccagcaggctcatctcacctccaggcctgaaacatttcttttctttcttttttcctcccccaattttccctgggcctggagcagccaagaatttcgggctgtttgactttctgtgagcccccagcgaggggaggcccagcctccgaggagaccaggaaccctgcttcagcagcccctcagggcttcccaaggatgtccagcccccacacccacacgttaacataatgagtcactaggcttctggggagggcccaacttcacccatgcatgagagactctcctcctttccagagagaatcggatcgcaccacgtgtggcagcctgcggcggggggaggggggcctctttagctctctttatctttctctctcactcatgtatgcatacatgcacagagatgcatacacaggtgcctatgcaagttcatttaagcctcagggctggtccctgcccaaagggctggaccctcctaatcctctcctaggttgtggggctggtcccctgacacccttctccccttcctggtagaccttaaacctcgcacacatgtccccagcattttctcacctggataaagcccataagctgggtctcaggctgggctcagcaaaggactcgccttgcaaccgacaggccattcccacccccacacacaacctcccctgttttcacattcaccatggcatcccagagcaaggacacaggagcccacaggccagttgaggttgggcaaggagacttccaggacttccagacagagtaccaggttttatttttcaccttattctctactttaaacaaatcataactttctctttaagcctctgctataaattctcctggctctcctgggcttccatattttgggggctggggtgtcaaaagtgagatgaagttcttagctccaggttttggggtaaaccaaggtaggaacattttggcatttatttcaattaacaatacttccttggacgggtgcggtggctcacgtctgtaatcccagcactttgggaggctgagacaggtggatcacttgaggtcgggagttcgagaccagcctggccaacatagcaaaaccctgtctctactaaaaatacaaaaattagatgggtgttttggcacctgcctgtaatctcagctactcaggaggctgaggcacaagaatcgcttgaatccaggaagcaagcggaggttgcagtgagttgagatcgcactccagcctgggtgacagagtgagattctgtctcaaaagcaaactaacaaagaaaaacaatacttcctggggttttggtgtgcagagggctttgttggaagtgtgactcaatcttgcctgccttctgggagctctagaattgttcccaacccagtccatggcttctagccaccactacagggctgtttcatgtacttctctctctgactctgtcttgtccgactctcttgagaatttctcaacgattgctcatgcctgtcagtatcagtgcttccatcgttccatctttgattcacttctctttcctttctatttactcccaaaatggagtcattcatcctgatgtcctcaattgctgctgatatgctggtgattcccaaatacatagctccaacccccaacttcccccagactttagatctgtattggtattacctactggacatctctatggacagttccgtatagactcaactcatctgcccaaccaagtatgttcctcctgaattcctctcctggttacttcatcacaatctacataggctcaccagctagaaacatttatgagcttacattccttcttcccatatcttatcagcatatcatatccatttcactccttcacccnagctatagcttgggtgaaggagtgacattggctgacatcacagttgtctgcaccctgttgtggctcta

SEQ ID NO: 63692 - DNA, 4826 bp, Homo sapiens
atcgtctgtttcatcaagaggagtcgcggcggcaagtacccaggtgagatgtgcaagaggcgtgggcttgcagggtggggcacgtccactttcccgtgagtctccaggtctccagccagatccggggaatgtgttctctcagtgaagccgcggccaccggaagagtcgcggtcgccagtccagtcgggagagtggggagcggaagcgcggccgcggcggcggcgggcggcgctgggacccggtagcccccggagaacaagggagctggcgccgccagcagccgccgagctgggttgagccgctgggccgcgccgcgcgccgccgccgtctgggaggctcggcccggccgcccgagcaggccgcgcgcgggccgccgggcccgaggccagagccatgggcgagaccaagatcatctaccacttggatgggcaggagacgccgtaccttgtgaagctgcccctgcccgccgagcgcgtcaccttggcggactttaagggcgttttgcagcgacccagctataagttcttcttcaagtctatggacgacgatttcggagtggtgaaggaggagatctcggatgacaatgccaagctaccatgcttcaatggccgggtggtgtcctggctggtgtcagctgagggctcacacccagacccagcccccttctgtgctgataacccatcggagctgccaccacctatggagcgcacgggaggcatcggggactcccgacccccatccttccaccctcatgctggtgggggcagccaggagaacctggacaatgacacagagacggactctttggtgtctgcccagcgagagcggccacgccggagggatggcccagagcatgcaacccggctaaatggaactgcgaagggggaacggcggcgagaaccagggggttatgatagctcatccacccttatgagcagtgagctggagaccaccagcttctttgactcagatgaggatgactccaccagcaggttcagcagctccacagaacagagcagtgcctcacgcctgatgagaagacacaagcggcggcggcggaagcagaaggtttctcggattgagcggtcctcgtccttcagcagcatcacggactccaccatgtcactcaacatcatcacggtcactctcaacatggaaaaatataacttcttgggcatctccattgtgggccaaagcaacgagcgtggtgacggcggcatctacattggctctatcatgaagggtggggccgtggctgctgatggacgcatcgagccaggagatatgttgttacaggtaaacgagatcaactttgagaacatgagtaatgacgatgcagtccgggtactgcgggagattgtgcacaaaccggggcccatcaccctgactgtagccaagtgctgggacccaagtccacgtggttgcttcacattgcccaggagcgagcccatccggcccattgaccctgcggcctgggtctcccacactgcagccatgaccggcaccttccctgcatacggcatgagcccctccctgagcaccatcacctccaccagctcctccatcaccagttccatccctgacacagagcgcctagacgacttccacttgtccatccacagtgacatggctgccatcgtaaaagccatggcctcccctgaatcagggttggaggtccgtgaccgcatgtggctcaagattaccatccctaatgctttcatcggctcagatgtggtggactggctgtaccacaatgtggaaggcttcacggaccggagggaggcccgcaagtatgccagcaacctgctgaaagctggcttcatccgccataccgtcaacaagatcaccttctccgagcagtgctactacatcttcggtgacctctgcggcaacatggccaacctgtctctccacgatcacgatggctccagtggcgcctctgaccaggacacactggcccctttgccgcacccgggggccgccccttggcccatggctttcccgtaccagtacccgccacccccgcacccatacaacccgcacccgggcttcccggagctgggctacagctacggcgggggcagcgccagcagtcagcacagcgaaggcagtcggagcagtggctccaaccgtagcggcagcgatcggaggaaggagaaggacccgaaggccggggactccaagtccgggggcagcggcagcgaatcggaccacaccacacgcagcagcctgcgggggccgcgggagcgggcgcccagcgagcgctcagggccggcggccagcgagcacagccaccgcagccaccattccctggccagcagccttcgcagccaccacacacacccgagctacggtcctcccggagtgccccctctctacggcccccccatgctgatgatgcccccgccgcccgcggccatggggcccccaggagcccctccgggccgcgacctggcctcagtgcccccggaactgaccgccagcagacagtccttccgcatggccatgggaaaccccagtgagttctttgtggatgtgatgtgagcagggcccctcccccagctccattccgctcccaccccagccggctgcgttcctctctccatccgtccgtcttttttactttgtctggtacctgaaagggaaataaaaggaactaaatccaggtgcgctaactgctcgcagggtgctgcgagggtggggtgcacctaccgattggctctgcagccccctaacctgcctctggccccagttcgtttcctctgcccactaatccctgcgcaggacttcccaggaccccttttgtctctgggaccagacttgttggtgctaccccttactcccctctgcaacccccattttgggagttgaccccagcaatgaccttggtggcacgctcactccctcattctctcgtttcccctttagctccctttcaccatttattcagctacatcatccctctattaaccccaccccatcaggcacgtgtgcaaacctcttgactttaccccacattactgaaaccaaaatatatttgcttcatctgcccctactaaccatccccctgcctgctgcctcagtcctgcaacctaaagctgtagtcgcctccaatagccatccatgccatccctgcctgtgcctagatcagaggcccagagggccccctcagttgcctgagcagctggtggcttccagggagcatctctgctctacccctgccccatgcctgccctgcgtgctggttccttcagacccctaaccctactaaccagcaggctcatctcacctccaggcctgaaacatttcttttctttcttttttcctcccccaattttccctgggcctggagcagccaagaatttcgggctgtttgactttctgtgagcccccagcgaggggaggcccagcctccgaggagaccaggaaccctgcttcagcagcccctcagggcttcccaaggatgtccagcccccacacccacacgttaacataatgagtcactaggcttctggggagggcccaacttcacccatgcatgagagactctcctcctttccagagagaatcggatcgcaccacgtgtggcagcctgcggcggggggaggggggcctctttagctctctttatctttctctctcactcatgtatgcatacatgcacagagatgcatacacaggtgcctatgcaagttcatttaagcctcagggctggtccctgcccaaagggctggaccctcctaatcctctcctaggttgtggggctggtcccctgacacccttctccccttcctggtagaccttaaacctcgcacacatgtccccagcattttctcacctggataaagcccataagctgggtctcaggctgggctcagcaaaggactcgccttgcaaccgacaggccattcccacccccacacacaacctcccctgttttcacattcaccatggcatcccagagcaaggacacaggagcccacaggccagttgaggttgggcaaggagacttccaggacttccagacagagtaccaggttttatttttcaccttattctctactttaaacaaatcataactttctctttaagcctctgctataaattctcctggctctcctgggcttccatattttgggggctggggtgtcaaaagtgagatgaagttcttagctccaggttttggggtaaaccaaggtaggaacattttggcatttatttcaattaacaatacttccttggacgggtgcggtggctcacgtctgtaatcccagcactttgggaggctgagacaggtggatcacttgaggtcgggagttcgagaccagcctggccaacatagcaaaaccctgtctctactaaaaatacaaaaattagatgggtgttttggcacctgcctgtaatctcagctactcaggaggctgaggcacaagaatcgcttgaatccaggaagcaagcggaggttgcagtgagttgagatcgcactccagcctgggtgacagagtgagattctgtctcaaaagcaaactaacaaagaaaaacaatacttcctggggttttggtgtgcagagggctttgttggaagtgtgactcaatcttgcctgccttctgggagctctagaattgttcccaacccagtccatggcttctagccaccactacagggctgtttcatgtacttctctctctgactctgtcttgtccgactctcttgagaatttctcaacgattgctcatgcctgtcagtatcagtgcttccatcgttccattgagaaatcagctttcagtcttactatcaatcttttcatgctatcatgtctttctct

SEQ ID NO: 63693 - DNA, 4913 bp, Homo sapiens
ttgcgttataggtgttctcacagatttcccgacgctgtcatccttatgctacgactttgggtagtttctgcctccgttagcgtgatccggggtcagccaggagaacctggacaatgacacagagacggactctttggtgtctgcccagcgagagcggccacgccggagggatggcccagagcatgcaacccggctaaatggaactgcgaagggggaacggcggcgagaaccagggggttatgatagctcatccacccttatgagcagtgagctggagaccaccagcttctttgactcagatgaggatgactccaccagcaggtggggcttgagtttcatgggtattgtggggcaggtgaccctggaggagccctaaaccctgaggatgcggggcccctgggaggcttatgggctttgtgttggggacccaggccctgcagtgcctcccctcatgggggcagggctgggccagcctggtggggaacgactgtgggccccacaggttcagcagctccacagaacagagcagtgcctcacgcctgatgagaagacacaagcggcggcggcggaagcagaaggtttctcggattgagcggtcctcgtccttcagcagcatcacggactccaccatgtcactcaacatcatcacggtcactctcaacatggaaaaatataacttcttgggcatctccattgtgggccaaagcaacgagcgtggtgacggcggcatctacattggctctatcatgaagggtggggccgtggctgctgatggacgcatcgagccaggagatatgttgttacaggtaaacgagatcaactttgagaacatgagtaatgacgatgcagtccgggtactgcgggagattgtgcacaaaccggggcccatcaccctgactgtagccaagtgctgggacccaagtccacgtggttgcttcacattgcccaggagcgagcccatccggcccattgaccctgcggcctgggtctcccacactgcagccatgaccggcaccttccctgcatacggcatgagcccctccctgagcaccatcacctccaccagctcctccatcaccagttccatccctgacacagagcgcctagacgacttccacttgtccatccacagtgacatggctgccatcgtaaaagccatggcctcccctgaatcagggttggaggtccgtgaccgcatgtggctcaagattaccatccctaatgctttcatcggctcagatgtggtggactggctgtaccacaatgtggaaggcttcacggaccggagggaggcccgcaagtatgccagcaacctgctgaaagctggcttcatccgccataccgtcaacaagatcaccttctccgagcagtgctactacatcttcggtgacctctgcggcaacatggccaacctgtctctccacgatcacgatggctccagtggcgcctctgaccaggacacactggcccctttgccgcacccgggggccgccccttggcccatggctttcccgtaccagtacccgccacccccgcacccatacaacccgcacccgggcttcccggagctgggctacagctacggcgggggcagcgccagcagtcagcacagcgaaggcagtcggagcagtggctccaaccgtagcggcagcgatcggaggaaggagaaggacccgaaggccggggactccaagtccgggggcagcggcagcgaatcggaccacaccacacgcagcagcctgcgggggccgcgggagcgggcgcccagcgagcgctcagggccggcggccagcgagcacagccaccgcagccaccattccctggccagcagccttcgcagccaccacacacacccgagctacggtcctcccggagtgccccctctctacggcccccccatgctgatgatgcccccgccgcccgcggccatggggcccccaggagcccctccgggccgcgacctggcctcagtgcccccggaactgaccgccagcagacagtccttccgcatggccatgggaaaccccagtgagttctttgtggatgtgatgtgagcagggcccctcccccagctccattccgctcccaccccagccggctgcgttcctctctccatccgtccgtcttttttactttgtctggtacctgaaagggaaataaaaggaactaaatccaggtgcgctaactgctcgcagggtgctgcgagggtggggtgcacctaccgattggctctgcagccccctaacctgcctctggccccagttcgtttcctctgcccactaatccctgcgcaggacttcccaggaccccttttgtctctgggaccagacttgttggtgctaccccttactcccctctgcaacccccattttgggagttgaccccagcaatgaccttggtggcacgctcactccctcattctctcgtttcccctttagctccctttcaccatttattcagctacatcatccctctattaaccccaccccatcaggcacgtgtgcaaacctcttgactttaccccacattactgaaaccaaaatatatttgcttcatctgcccctactaaccatccccctgcctgctgcctcagtcctgcaacctaaagctgtagtcgcctccaatagccatccatgccatccctgcctgtgcctagatcagaggcccagagggccccctcagttgcctgagcagctggtggcttccagggagcatctctgctctacccctgccccatgcctgccctgcgtgctggttccttcagacccctaaccctactaaccagcaggctcatctcacctccaggcctgaaacatttcttttctttcttttttcctcccccaattttccctgggcctggagcagccaagaatttcgggctgtttgactttctgtgagcccccagcgaggggaggcccagcctccgaggagaccaggaaccctgcttcagcagcccctcagggcttcccaaggatgtccagcccccacacccacacgttaacataatgagtcactaggcttctggggagggcccaacttcacccatgcatgagagactctcctcctttccagagagaatcggatcgcaccacgtgtggcagcctgcggcggggggaggggggcctctttagctctctttatctttctctctcactcatgtatgcatacatgcacagagatgcatacacaggtgcctatgcaagttcatttaagcctcagggctggtccctgcccaaagggctggaccctcctaatcctctcctaggttgtggggctggtcccctgacacccttctccccttcctggtagaccttaaacctcgcacacatgtccccagcattttctcacctggataaagcccataagctgggtctcaggctgggctcagcaaaggactcgccttgcaaccgacaggccattcccacccccacacacaacctcccctgttttcacattcaccatggcatcccagagcaaggacacaggagcccacaggccagttgaggttgggcaaggagacttccaggacttccagacagagtaccaggttttatttttcaccttattctctactttaaacaaatcataactttctctttaagcctctgctataaattctcctggctctcctgggcttccatattttgggggctggggtgtcaaaagtgagatgaagttcttagctccaggttttggggtaaaccaaggtaggaacattttggcatttatttcaattaacaatacttccttggacgggtgcggtggctcacgtctgtaatcccagcactttgggaggctgagacaggtggatcacttgaggtcgggagttcgagaccagcctggccaacatagcaaaaccctgtctctactaaaaatacaaaaattagatgggtgttttggcacctgcctgtaatctcagctactcaggaggctgaggcacaagaatcgcttgaatccaggaagcaagcggaggttgcagtgagttgagatcgcactccagcctgggtgacagagtgagattctgtctcaaaagcaaactaacaaagaaaaacaatacttcctggggttttggtgtgcagagggctttgttggaagtgtgactcaatcttgcctgccttctgggagctctagaattgttcccaacccagtccatggcttctagccaccactacagggctgtttcatgtacttctctctctgactctgtcttgtccgactctcttgagaatttctcaacgattgctcatgcctgtcagtatcagtgcttccatcgttccatctttgattcacttctctttcctttctatttactcccaaaatggagtcattcatcctgatgtcctcaattgctgctgatatgctggtgattcccaaatacatagctccaacccccaacttcccccagactttagatctgtattggtattacctactggacatctctatggacagttccgtatagactcaactcatctgcccaaccaagtatgttcctcctgaattcctctcctggttacttcatcacaatctacataggctcaccagctagaaacatttatgagcttacattccttcttcccatatcttatcagcatatcatatccatttcactccaacactctgtcttgaatttggccctccctctcccctctctactttaattcattggagcatgggatttggagttaggtggttttgggtttgaattccagctctactatttttggttgtgtgatagagttatttaacctctctgagcctcagttccctcgtatgtaaaatgatgataataatacctacctcacagggttgttgtgaggatttaaattagatattgtacgaaaagtgcctagcacagtgcctggcacacagtagagtaggtgctcaataaatggtagctattattattatta

SEQ ID NO: 63694 - DNA, 4522 bp, Homo sapiens
tcagaggatcccgtggctcatcaggggttatgatagctcatccacccttatgagcagtgagctggagaccaccagcttctttgactcagatgaggatgactccaccagcaggttcagcagctccacagaacagagcagtgcctcacgcctgatgagaagacacaagcggcggcggcggaagcagaaggtttctcggattgagcggtcctcgtccttcagcagcatcacggactccaccatgtcactcaacatcatcacggtcactctcaacatggaaaaatataacttcttgggcatctccattgtgggccaaagcaacgagcgtggtgacggcggcatctacattggctctatcatgaagggtggggccgtggctgctgatggacgcatcgagccaggagatatgttgttacaggtaaacgagatcaactttgagaacatgagtaatgacgatgcagtccgggtactgcgggagattgtgcacaaaccggggcccatcaccctgactgtagccaagtgctgggacccaagtccacgtggttgcttcacattgcccaggagcgagcccatccggcccattgaccctgcggcctgggtctcccacactgcagccatgaccggcaccttccctgcatacggcatgagcccctccctgagcaccatcacctccaccagctcctccatcaccagttccatccctgacacagagcgcctagacgacttccacttgtccatccacagtgacatggctgccatcgtaaaagccatggcctcccctgaatcagggttggaggtccgtgaccgcatgtggctcaagattaccatccctaatgctttcatcggctcagatgtggtggactggctgtaccacaatgtggaaggcttcacggaccggagggaggcccgcaagtatgccagcaacctgctgaaagctggcttcatccgccataccgtcaacaagatcaccttctccgagcagtgctactacatcttcggtgacctctgcggcaacatggccaacctgtctctccacgatcacgatggctccagtggcgcctctgaccaggacacactggcccctttgccgcacccgggggccgccccttggcccatggctttcccgtaccagtacccgccacccccgcacccatacaacccgcacccgggcttcccggagctgggctacagctacggcgggggcagcgccagcagtcagcacagcgaaggcagtcggagcagtggctccaaccgtagcggcagcgatcggaggaaggagaaggacccgaaggccggggactccaagtccgggggcagcggcagcgaatcggaccacaccacacgcagcagcctgcgggggccgcgggagcgggcgcccagcgagcgctcagggccggcggccagcgagcacagccaccgcagccaccattccctggccagcagccttcgcagccaccacacacacccgagctacggtcctcccggagtgccccctctctacggcccccccatgctgatgatgcccccgccgcccgcggccatggggcccccaggagcccctccgggccgcgacctggcctcagtgcccccggaactgaccgccagcagacagtccttccgcatggccatgggaaaccccagtgagttctttgtggatgtgatgtgagcagggcccctcccccagctccattccgctcccaccccagccggctgcgttcctctctccatccgtccgtcttttttactttgtctggtacctgaaagggaaataaaaggaactaaatccaggtgcgctaactgctcgcagggtgctgcgagggtggggtgcacctaccgattggctctgcagccccctaacctgcctctggccccagttcgtttcctctgcccactaatccctgcgcaggacttcccaggaccccttttgtctctgggaccagacttgttggtgctaccccttactcccctctgcaacccccattttgggagttgaccccagcaatgaccttggtggcacgctcactccctcattctctcgtttcccctttagctccctttcaccatttattcagctacatcatccctctattaaccccaccccatcaggcacgtgtgcaaacctcttgactttaccccacattactgaaaccaaaatatatttgcttcatctgcccctactaaccatccccctgcctgctgcctcagtcctgcaacctaaagctgtagtcgcctccaatagccatccatgccatccctgcctgtgcctagatcagaggcccagagggccccctcagttgcctgagcagctggtggcttccagggagcatctctgctctacccctgccccatgcctgccctgcgtgctggttccttcagacccctaaccctactaaccagcaggctcatctcacctccaggcctgaaacatttcttttctttcttttttcctcccccaattttccctgggcctggagcagccaagaatttcgggctgtttgactttctgtgagcccccagcgaggggaggcccagcctccgaggagaccaggaaccctgcttcagcagcccctcagggcttcccaaggatgtccagcccccacacccacacgttaacataatgagtcactaggcttctggggagggcccaacttcacccatgcatgagagactctcctcctttccagagagaatcggatcgcaccacgtgtggcagcctgcggcggggggaggggggcctctttagctctctttatctttctctctcactcatgtatgcatacatgcacagagatgcatacacaggtgcctatgcaagttcatttaagcctcagggctggtccctgcccaaagggctggaccctcctaatcctctcctaggttgtggggctggtcccctgacacccttctccccttcctggtagaccttaaacctcgcacacatgtccccagcattttctcacctggataaagcccataagctgggtctcaggctgggctcagcaaaggactcgccttgcaaccgacaggccattcccacccccacacacaacctcccctgttttcacattcaccatggcatcccagagcaaggacacaggagcccacaggccagttgaggttgggcaaggagacttccaggacttccagacagagtaccaggttttatttttcaccttattctctactttaaacaaatcataactttctctttaagcctctgctataaattctcctggctctcctgggcttccatattttgggggctggggtgtcaaaagtgagatgaagttcttagctccaggttttggggtaaaccaaggtaggaacattttggcatttatttcaattaacaatacttccttggacgggtgcggtggctcacgtctgtaatcccagcactttgggaggctgagacaggtggatcacttgaggtcgggagttcgagaccagcctggccaacatagcaaaaccctgtctctactaaaaatacaaaaattagatgggtgttttggcacctgcctgtaatctcagctactcaggaggctgaggcacaagaatcgcttgaatccaggaagcaagcggaggttgcagtgagttgagatcgcactccagcctgggtgacagagtgagattctgtctcaaaagcaaactaacaaagaaaaacaatacttcctggggttttggtgtgcagagggctttgttggaagtgtgactcaatcttgcctgccttctgggagctctagaattgttcccaacccagtccatggcttctagccaccactacagggctgtttcatgtacttctctctctgactctgtcttgtccgactctcttgagaatttctcaacgattgctcatgcctgtcagtatcagtgcttccatcgttccatctttgattcacttctctttcctttctatttactcccaaaatggagtcattcatcctgatgtcctcaattgctgctgatatgctggtgattcccaaatacatagctccaacccccaacttcccccagactttagatctgtattggtattacctactggacatctctatggacagttccgtatagactcaactcatctgcccaaccaagtatgttcctcctgaattcctctcctggttacttcatcacaatctacataggctcaccagctagaaacatttatgagcttacattccttcttcccatatcttatcagcatatcatatccatttcactccaacactctgtcttgaatttggccctccctctcccctctctactttaattcattggagcatgggatttggagttaggtggttttgggtttgaattccagctctactatttttggttgtgtgatagagttatttaacctctctgagcctcagttccctcgtatgtaaaatgatgataataatacctacctcacagggttgttgtgaggatttaaattagatattgtacgaaaagtgcctagcacagtgcctggcacacagtagagtaggtgctcaataaatggtagctattattattatta

SEQ ID NO: 63695 - DNA, 3813 bp, Homo sapiens
  misc_feature (112)..(112): n is a, c, g, or t
  misc_feature (114)..(114): n is a, c, g, or t
  misc_feature (117)..(117): n is a, c, g, or t
agctgactggcaaccatctgcctttccacttccagttctcgggtgagtcgctgaaactgaagctcctgctccttcacggatgctagaatagtggtggctgtggtctcgggtncnatncctaatgctttcatcggctcagatgtggtggactggctgtaccacaatgtggaaggcttcacggaccggagggaggcccgcaagtatgccagcaacctgctgaaagctggcttcatccgccataccgtcaacaagatcaccttctccgagcagtgctactacatcttcggtgacctctgcggcaacatggccaacctgtctctccacgatcacgatggctccagtggcgcctctgaccaggacacactggcccctttgccgcacccgggggccgccccttggcccatggctttcccgtaccagtacccgccacccccgcacccatacaacccgcacccgggcttcccggagctgggctacagctacggcgggggcagcgccagcagtcagcacagcgaaggcagtcggagcagtggctccaaccgtagcggcagcgatcggaggaaggagaaggacccgaaggccggggactccaagtccgggggcagcggcagcgaatcggaccacaccacacgcagcagcctgcgggggccgcgggagcgggcgcccagcgagcgctcagggccggcggccagcgagcacagccaccgcagccaccattccctggccagcagccttcgcagccaccacacacacccgagctacggtcctcccggagtgccccctctctacggcccccccatgctgatgatgcccccgccgcccgcggccatggggcccccaggagcccctccgggccgcgacctggcctcagtgcccccggaactgaccgccagcagacagtccttccgcatggccatgggaaaccccagtgagttctttgtggatgtgatgtgagcagggcccctcccccagctccattccgctcccaccccagccggctgcgttcctctctccatccgtccgtcttttttactttgtctggtacctgaaagggaaataaaaggaactaaatccaggtgcgctaactgctcgcagggtgctgcgagggtggggtgcacctaccgattggctctgcagccccctaacctgcctctggccccagttcgtttcctctgcccactaatccctgcgcaggacttcccaggaccccttttgtctctgggaccagacttgttggtgctaccccttactcccctctgcaacccccattttgggagttgaccccagcaatgaccttggtggcacgctcactccctcattctctcgtttcccctttagctccctttcaccatttattcagctacatcatccctctattaaccccaccccatcaggcacgtgtgcaaacctcttgactttaccccacattactgaaaccaaaatatatttgcttcatctgcccctactaaccatccccctgcctgctgcctcagtcctgcaacctaaagctgtagtcgcctccaatagccatccatgccatccctgcctgtgcctagatcagaggcccagagggccccctcagttgcctgagcagctggtggcttccagggagcatctctgctctacccctgccccatgcctgccctgcgtgctggttccttcagacccctaaccctactaaccagcaggctcatctcacctccaggcctgaaacatttcttttctttcttttttcctcccccaattttccctgggcctggagcagccaagaatttcgggctgtttgactttctgtgagcccccagcgaggggaggcccagcctccgaggagaccaggaaccctgcttcagcagcccctcagggcttcccaaggatgtccagcccccacacccacacgttaacataatgagtcactaggcttctggggagggcccaacttcacccatgcatgagagactctcctcctttccagagagaatcggatcgcaccacgtgtggcagcctgcggcggggggaggggggcctctttagctctctttatctttctctctcactcatgtatgcatacatgcacagagatgcatacacaggtgcctatgcaagttcatttaagcctcagggctggtccctgcccaaagggctggaccctcctaatcctctcctaggttgtggggctggtcccctgacacccttctccccttcctggtagaccttaaacctcgcacacatgtccccagcattttctcacctggataaagcccataagctgggtctcaggctgggctcagcaaaggactcgccttgcaaccgacaggccattcccacccccacacacaacctcccctgttttcacattcaccatggcatcccagagcaaggacacaggagcccacaggccagttgaggttgggcaaggagacttccaggacttccagacagagtaccaggttttatttttcaccttattctctactttaaacaaatcataactttctctttaagcctctgctataaattctcctggctctcctgggcttccatattttgggggctggggtgtcaaaagtgagatgaagttcttagctccaggttttggggtaaaccaaggtaggaacattttggcatttatttcaattaacaatacttccttggacgggtgcggtggctcacgtctgtaatcccagcactttgggaggctgagacaggtggatcacttgaggtcgggagttcgagaccagcctggccaacatagcaaaaccctgtctctactaaaaatacaaaaattagatgggtgttttggcacctgcctgtaatctcagctactcaggaggctgaggcacaagaatcgcttgaatccaggaagcaagcggaggttgcagtgagttgagatcgcactccagcctgggtgacagagtgagattctgtctcaaaagcaaactaacaaagaaaaacaatacttcctggggttttggtgtgcagagggctttgttggaagtgtgactcaatcttgcctgccttctgggagctctagaattgttcccaacccagtccatggcttctagccaccactacagggctgtttcatgtacttctctctctgactctgtcttgtccgactctcttgagaatttctcaacgattgctcatgcctgtcagtatcagtgcttccatcgttccatctttgattcacttctctttcctttctatttactcccaaaatggagtcattcatcctgatgtcctcaattgctgctgatatgctggtgattcccaaatacatagctccaacccccaacttcccccagactttagatctgtattggtattacctactggacatctctatggacagttccgtatagactcaactcatctgcccaaccaagtatgttcctcctgaattcctctcctggttacttcatcacaatctacataggctcaccagctagaaacatttatgagcttacattccttcttcccatatcttatcagcatatcatatccatttcactccaacactctgtcttgaatttggccctccctctcccctctctactttaattcattggagcatgggatttggagttaggtggttttgggtttgaattccagctctactatttttggttgtgtgatagagttatttaacctctctgagcctcagttccctcgtatgtaaaatgatgataataatacctacctcacagggttgttgtgaggatttaaattagatattgtacgaaaagtgcctagcacagtgcctggcacacagtagagtaggtgctcaataaatggtagctattattattatta

SEQ ID NO: 63696 - DNA, 4114 bp, Homo sapiens
agcggagagtggggagcggaagccgccgccgtctgggaggctcggcccggccgcccgagcaggccgcgcgcgggccgccgggcccgaggccagagccatgggcgagaccaagatcatctaccacttggatgggcaggagacgccgtaccttgtgaagctgcccctgcccgccgagcgcgtcaccttggcggactttaagggcgttttgcagcgacccagctataagttcttcttcaagtctatggacgacgatttcggagtggtgaaggaggagatctcggatgacaatgccaagctaccatgcttcaatggccgggtggtgtcctggctggtgtcagctgagggctcacacccagacccagcccccttctgtgctgataacccatcggagctgccaccacctatggagcgcacgggaggcatcggggactcccgacccccatccttccaccctcatgctggtgggggcagccaggagaacctggacaatgacacagagacggactctttggtgtctgcccagcgagagcggccacgccggagggatggcccagagcatgcaacccggctaaatggaactgcgaagggggaacggcggcgagaaccagggggttatgatagctcatccacccttatgagcagtgagctggagaccaccagcttctttgactcagatgaggatgactccaccagcaggttcagcagctccacagaacagagcagtgcctcacgcctgatgagaagacacaagcggcggcggcggaagcagaaggtttctcggattgagcggtcctcgtccttcagcagcatcacggactccaccatgtcactcaacatcatcacggtcactctcaacatggaaaaatataacttcttgggcatctccattgtgggccaaagcaacgagcgtggtgacggcggcatctacattggctctatcatgaagggtggggccgtggctgctgatggacgcatcgagccaggagatatgttgttacaggtaaacgagatcaactttgagaacatgagtaatgacgatgcagtccgggtactgcgggagattgtgcacaaaccggggcccatcaccctgactgtagccaagtgctgggacccaagtccacgtggttgcttcacattgcccaggagcgagcccatccggcccattgaccctgcggcctgggtctcccacactgcagccatgaccggcaccttccctgcatacggcatgagcccctccctgagcaccatcacctccaccagctcctccatcaccagttccatccctgacacagagcccggctgcgttcctctctccatccgtccgtcttttttactttgtctggtacctgaaagggaaataaaaggaactaaatccaggtgcgctaactgctcgcagggtgctgcgagggtggggtgcacctaccgattggctctgcagccccctaacctgcctctggccccagttcgtttcctctgcccactaatccctgcgcaggacttcccaggaccccttttgtctctgggaccagacttgttggtgctaccccttactcccctctgcaacccccattttgggagttgaccccagcaatgaccttggtggcacgctcactccctcattctctcgtttcccctttagctccctttcaccatttattcagctacatcatccctctattaaccccaccccatcaggcacgtgtgcaaacctcttgactttaccccacattactgaaaccaaaatatatttgcttcatctgcccctactaaccatccccctgcctgctgcctcagtcctgcaacctaaagctgtagtcgcctccaatagccatccatgccatccctgcctgtgcctagatcagaggcccagagggccccctcagttgcctgagcagctggtggcttccagggagcatctctgctctacccctgccccatgcctgccctgcgtgctggttccttcagacccctaaccctactaaccagcaggctcatctcacctccaggcctgaaacatttcttttctttcttttttcctcccccaattttccctgggcctggagcagccaagaatttcgggctgtttgactttctgtgagcccccagcgaggggaggcccagcctccgaggagaccaggaaccctgcttcagcagcccctcagggcttcccaaggatgtccagcccccacacccacacgttaacataatgagtcactaggcttctggggagggcccaacttcacccatgcatgagagactctcctcctttccagagagaatcggatcgcaccacgtgtggcagcctgcggcggggggaggggggcctctttagctctctttatctttctctctcactcatgtatgcatacatgcacagagatgcatacacaggtgcctatgcaagttcatttaagcctcagggctggtccctgcccaaagggctggaccctcctaatcctctcctaggttgtggggctggtcccctgacacccttctccccttcctggtagaccttaaacctcgcacacatgtccccagcattttctcacctggataaagcccataagctgggtctcaggctgggctcagcaaaggactcgccttgcaaccgacaggccattcccacccccacacacaacctcccctgttttcacattcaccatggcatcccagagcaaggacacaggagcccacaggccagttgaggttgggcaaggagacttccaggacttccagacagagtaccaggttttatttttcaccttattctctactttaaacaaatcataactttctctttaagcctctgctataaattctcctggctctcctgggcttccatattttgggggctggggtgtcaaaagtgagatgaagttcttagctccaggttttggggtaaaccaaggtaggaacattttggcatttatttcaattaacaatacttccttggacgggtgcggtggctcacgtctgtaatcccagcactttgggaggctgagacaggtggatcacttgaggtcgggagttcgagaccagcctggccaacatagcaaaaccctgtctctactaaaaatacaaaaattagatgggtgttttggcacctgcctgtaatctcagctactcaggaggctgaggcacaagaatcgcttgaatccaggaagcaagcggaggttgcagtgagttgagatcgcactccagcctgggtgacagagtgagattctgtctcaaaagcaaactaacaaagaaaaacaatacttcctggggttttggtgtgcagagggctttgttggaagtgtgactcaatcttgcctgccttctgggagctctagaattgttcccaacccagtccatggcttctagccaccactacagggctgtttcatgtacttctctctctgactctgtcttgtccgactctcttgagaatttctcaacgattgctcatgcctgtcagtatcagtgcttccatcgttccatctttgattcacttctctttcctttctatttactcccaaaatggagtcattcatcctgatgtcctcaattgctgctgatatgctggtgattcccaaatacatagctccaacccccaacttcccccagactttagatctgtattggtattacctactggacatctctatggacagttccgtatagactcaactcatctgcccaaccaagtatgttcctcctgaattcctctcctggttacttcatcacaatctacataggctcaccagctagaaacatttatgagcttacattccttcttcccatatcttatcagcatatcatatccatttcactccaacactctgtcttgaatttggccctccctctcccctctctactttaattcattggagcatgggatttggagttaggtggttttgggtttgaattccagctctactatttttggttgtgtgatagagttatttaacctctctgagcctcagttccctcgtatgtaaaatgatgataataatacctacctcacagggttgttgtgaggatttaaattagatattgtacgaaaagtgcctagcacagtgcctggcacacagtagagtaggtgctcaataaatggtagctattattattatta

SEQ ID NO: 63697 - DNA, 1917 bp, Homo sapiens
  misc_feature (37)..(38): n is a, c, g, or t
  misc_feature (42)..(42): n is a, c, g, or t
  misc_feature (47)..(48): n is a, c, g, or t
aaaactccgctatgctccacgcgtagggagctctccnnatangtcgnnctgcaggcgcgcgaattcactagtgattgtgagctgagatcgcaccacgtgtggcagcctgcggcggggggaggggggcctctttagctctctttatctttctctctcactcatgtatgcatacatgcacagagatgcatacacaggtgcctatgcaagttcatttaagcctcagggctggtccctgcccaaagggctggaccctcctaatcctctcctaggttgtggggctggtcccctgacacccttctccccttcctggtagaccttaaacctcgcacacatgtccccagcattttctcacctggataaagcccataagctgggtctcaggctgggctcagcaaaggactcgccttgcaaccgacaggccattcccacccccacacacaacctcccctgttttcacattcaccatggcatcccagagcaaggacacaggagcccacaggccagttgaggttgggcaaggagacttccaggacttccagacagagtaccaggttttatttttcaccttattctctactttaaacaaatcataactttctctttaagcctctgctataaattctcctggctctcctgggcttccatattttgggggctggggtgtcaaaagtgagatgaagttcttagctccaggttttggggtaaaccaaggtaggaacattttggcatttatttcaattaacaatacttccttggacgggtgcggtggctcacgtctgtaatcccagcactttgggaggctgagacaggtggatcacttgaggtcgggagttcgagaccagcctggccaacatagcaaaaccctgtctctactaaaaatacaaaaattagatgggtgttttggcacctgcctgtaatctcagctactcaggaggctgaggcacaagaatcgcttgaatccaggaagcaagcggaggttgcagtgagttgagatcgcactccagcctgggtgacagagtgagattctgtctcaaaagcaaactaacaaagaaaaacaatacttcctggggttttggtgtgcagagggctttgttggaagtgtgactcaatcttgcctgccttctgggagctctagaattgttcccaacccagtccatggcttctagccaccactacagggctgtttcatgtacttctctctctgactctgtcttgtccgactctcttgagaatttctcaacgattgctcatgcctgtcagtatcagtgcttccatcgttccatctttgattcacttctctttcctttctatttactcccaaaatggagtcattcatcctgatgtcctcaattgctgctgatatgctggtgattcccaaatacatagctccaacccccaacttcccccagactttagatctgtattggtattacctactggacatctctatggacagttccgtatagactcaactcatctgcccaaccaagtatgttcctcctgaattcctctcctggttacttcatcacaatctacataggctcaccagctagaaacatttatgagcttacattccttcttcccatatcttatcagcatatcatatccatttcactccaacactctgtcttgaatttggccctccctctcccctctctactttaattcattggagcatgggatttggagttaggtggttttgggtttgaattccagctctactatttttggttgtgtgatagagttatttaacctctctgagcctcagttccctcgtatgtaaaatgatgataataatacctacctcacagggttgttgtgaggatttaaattagatattgtacgaaaagtgcctagcacagtgcctggcacacagtagagtaggtgctcaataaatggtagctattattattatta

SEQ ID NO: 63698 - DNA, 1280 bp, Homo sapiens
agcggagagtggggagcggaagccgccgccgtctgggaggctcggcccggccgcccgagcaggccgcgcgcgggccgccgggcccgaggccagagccatgggcgagaccaagatcatctaccacttggatgggcaggagacgccgtaccttgtgaagctgcccctgcccgccgagcgcgtcaccttggcggactttaagggcgttttgcagcgacccagctataagttcttcttcaagtctatggacgacgatttcggagtggtgaaggaggagatctcggatgacaatgccaagctaccatgcttcaatggccgggtggtgtcctggctggtgtcagctgagggctcacacccagacccagcccccttctgtgctgataacccatcggagctgccaccacctatggagcgcacgggaggcatcggggactcccgacccccatccttccaccctcatgctggtgggggcagccaggagaacctggacaatgacacagagacggactctttggtgtctgcccagcgagagcggccacgccggagggatggcccagagcatgcaacccggctaaatggaactgcgaagggggaacggcggcgagaaccagggggttatgatagctcatccacccttatgagcagtgagctggagaccaccagcttctttgactcagatgaggatgactccaccagcaggttcagcagctccacagaacagagcagtgcctcacgcctgatgagaagacacaagcggcggcggcggaagcagaaggtttctcggattgagcggtcctcgtccttcagcagcatcacggactccaccatgtcactcaacatcatcacggtcactctcaacatggaaaaatataacttcttgggcatctccattgtgggccaaagcaacgagcgtggtgacggcggcatctacattggctctatcatgaagggtggggccgtggctgctgatggacgcatcgagccaggagatatgttgttacaggtaaacgagatcaactttgagaacatgagtaatgacgatgcagtccgggtactgcgggagattgtgcacaaaccggggcccatcaccctgactgtagccaagtgctgggacccaagtccacgtggttgcttcacattgcccaggagcgagcccatccggcccattgaccctgcggcctgggtctcccacactgcagccatgaccggcaccttccctgcatacggcatgagcccctccctgagcaccattgagcctgtgtctccatcttgagcctgtgtct

SEQ ID NO: 63699 - DNA, 1252 bp, Homo sapiens
  misc_feature (1209)..(1209): n is a, c, g, or t
  misc_feature (1252)..(1252): n is a, c, g, or t
agcggagagtggggagcggaagccgccgccgtctgggaggctcggcccggccgcccgagcaggccgcgcgcgggccgccgggcccgaggccagagccatgggcgagaccaagatcatctaccacttggatgggcaggagacgccgtaccttgtgaagctgcccctgcccgccgagcgcgtcaccttggcggactttaagggcgttttgcagcgacccagctataagttcttcttcaagtctatggacgacgatttcggagtggtgaaggaggagatctcggatgacaatgccaagctaccatgcttcaatggccgggtggtgtcctggctggtgtcagctgagggctcacacccagacccagcccccttctgtgctgataacccatcggagctgccaccacctatggagcgcacgggaggcatcggggactcccgacccccatccttccaccctcatgctggtgggggcagccaggagaacctggacaatgacacagagacggactctttggtgtctgcccagcgagagcggccacgccggagggatggcccagagcatgcaacccggctaaatggaactgcgaagggggaacggcggcgagaaccagggggttatgatagctcatccacccttatgagcagtgagctggagaccaccagcttctttgactcagatgaggatgactccaccagcaggttcagcagctccacagaacagagcagtgcctcacgcctgatgagaagacacaagcggcggcggcggaagcagaaggtttctcggattgagcggtcctcgtccttcagcagcatcacggactccaccatgtcactcaacatcatcacggtcactctcaacatggaaaaatataacttcttgggcatctccattgtgggccaaagcaacgagcgtggtgacggcggcatctacattggctctatcatgaagggtggggccgtggctgctgatggacgcatcgagccaggagatatgttgttacaggtaaacgagatcaactttgagaacatgagtaatgacgatgcagtccgggtactgcgggagattgtgcacaaaccggggcccatcaccctgactgtagccaagtgctgggacccaagtccacgtggttgcttcacattgcccaggaaccgaagcccatttccgggccatttgaccccttgggggcctgggggctttccacaacttggaancccttgaaccgggaaccctttcccttggattaccgggatggan

SEQ ID NO: 63700 - DNA, 1257 bp, Homo sapiens
agcggagagtggggagcggaagccgccgccgtctgggaggctcggcccggccgcccgagcaggccgcgcgcgggccgccgggcccgaggccagagccatgggcgagaccaagatcatctaccacttggatgggcaggagacgccgtaccttgtgaagctgcccctgcccgccgagcgcgtcaccttggcggactttaagggcgttttgcagcgacccagctataagttcttcttcaagtctatggacgacgatttcggagtggtgaaggaggagatctcggatgacaatgccaagctaccatgcttcaatggccgggtggtgtcctggctggtgtcagctgagggctcacacccagacccagcccccttctgtgctgataacccatcggagctgccaccacctatggagcgcacgggaggcatcggggactcccgacccccatccttccaccctcatgctggtgggggcagccaggagaacctggacaatgacacagagacggactctttggtgtctgcccagcgagagcggccacgccggagggatggcccagagcatgcaacccggctaaatggaactgcgaagggggaacggcggcgagaaccagggggttatgatagctcatccacccttatgagcagtgagctggagaccaccagcttctttgactcagatgaggatgactccaccagcaggttcagcagctccacagaacagagcagtgcctcacgcctgatgagaagacacaagcggcggcggcggaagcagaaggtttctcggattgagcggtcctcgtccttcagcagcatcacggactccaccatgtcactcaacatcatcacggtcactctcaacatggaaaaatataacttcttgggcatctccattgtgggccaaagcaacgagcgtggtgacggcggcatctacattggctctatcatgaagggtggggccgtggctgctgatggacgcatcgagccaggagatatgttgttacaggtaaacgagatcaactttgagaacatgagtaatgacgatgcagtccgggtactgcgggagattgtgcacaaaccggggtatggatggaatggggcactgggcaaggggcttggtctggcctatacgcatcctgccttcactaggacacccttgttttcaggcccatcaccctgactgtagccaagtgctgggacccaagtccacgtggttgcttcacattgcccaggagtaagtggatgggagactcagtcctaaag

SEQ ID NO: 63701 - DNA, 480 bp, Homo sapiens
aaaaaggattctatattctcaagcttgcggggaaatttggcacagcctagcacctaacagttattttttctgctcctccaaacgtccgccatcaaggaggcaccagcgtctcttattcccttctttgtgttcttgagttctcatcatttagctctcacttagaagtgagaacctgtggtatttggttttctgttcctgcgttagtttgctagggatgatagcctccacttccatccgcgttcctgcaaaacacatgatctcattctctctctctttttttttttttttttttttccctgagacagagattcgctcttgttacccaggctggagtgcaatggtgcgatcttggctcaccacaacctctccctcttgggttcaagtgattctcctgcctcagcctccgacatgtgtcaccacgcccggctaatttttgtattttcagtagagatggggtttctccatgttggtcagactggt

SEQ ID NO: 63702 - DNA, 190 bp, Homo sapiens
cgtagaatatcacaccaaaaaatgttaatacctgtactctaccactgtatatgtaactattgacatgtattctttcagtttccttcctatacatttatataataagagaattgggattatagttcacacattcataacttgattcacttaatgtgtcttgagtatttactattaaatattgatgtacatc

SEQ ID NO: 63703 - DNA, 324 bp, Homo sapiens
tggctctcttattcattcaccactgtgctgtgtaacacaatttccctgcaacaataaacttcaactttgcaatttgtcaccagtgcaatggctcatgtagttataaagtgaacgtggtgaccaatttggggcgtaatattgttctgcagtcaaagtatcctaatttgaagaaattttatgtatcgtgattttacaccaactggccaaagtcagatagtctgattaaatagatttggttttggctaactatatgtagttaattctacacactttaaatattttggtttgcaggtattttttgaaggcttaagtatttggtttctg

SEQ ID NO: 63704 - DNA, 335 bp, Homo sapiens
aacactgtaatgggagcaccagctaatgcaatgagcaaaggaaataaaaggtatgcacatagattaggaagaaagaaagaaaactttctttgttcattgataacatgatcaactatgcagctatcagaaagaatgaacagaaaaactcctgcaaccaatatgtgattatagcaaggtggccaggatatgcaaggttaacatacaaaactcattcacacccaggcacagtggcttatgccagtaaaccccagcactttgggatgtgagatcactgcagcccaggagttcaagacaagcctggccaacatgccaggaccttgtctctacaacaaatt

SEQ ID NO: 63705 - DNA, 790 bp, Homo sapiens
catttaactgactaaagttaagtcatctattgtattgacaaggagagatagcccaagattaaataaaaaccagattagacagcagaagttacagtgtagccttttgatgataccctaaaagtagagaaatgcacacaagttttgtggaagatgggaataacatactggattttctataattctatattattaactttaaaaaaaataaatctgctactttttgaaaattaaaaaacaaaccaaaaaaagcctccaatttttaatggtgatttccagcagtgatgaaagcgctggttaaagggagactcaaacaccacggatgggaaatgtcgcaccatttcgggaggtcatcttggcgaaaccgaatcaaaagtcttgaagcacatatatcaatttcacatccaggaatttataataaggaaataatcaaggatataaacaaaagtaagaatgttttccacagctttttatatcatgggagcaaaaaaaaaaattgcgaagcaacgtaaccatccagtgagagcaaggcagttggttaaataagctctgaacctgtcagaagatgcctcacagacagttgttaacttcattttggaaaagtactcagtgacataggaaaagtctactatgtatcctaaagagacaaaagcaggttacaaaattatgcacaattatggtcttaattttgttaaatatacatggtccaatcacagaaaataaaatagaaatcaagatcttggagtttaataatgcatggtgaattatagggggtttccttctgtatgttctt

SEQ ID NO: 63706 - DNA, 385 bp, Homo sapiens
tctaattgtggtctctggtgctcgtaatactttaattcaaaagaaatgttttgatggcctacactggagtgtgttaagccaccagattccggtgctttcgtgggggtgatatcagggcaaggctcatttaaacacttcagtatttgtctccaaagcatgaggataattgcccaggcatccaagatgacaagtttgcatttaaaaaagtaacagggattctgtaacagtatctgttactacagtgcctatcaggacttagccaccctcccaataacaacaggtcaggattcagttggttggtaacgtatctgtaattactttttgctttagaacagacccccttttcaccctcaatattgacttttttggagagtgctagagcatt

SEQ ID NO: 63707 - DNA, 7705 bp, Homo sapiens
cgcctcgcggcctctcccagcttctcctgggccggcgccatgaggcctgggcccgctctcctccttctgggcgtgggcctgagcctgagcgtcggccgcctcccgctgccgccggttcctcgcggggcacaagccgccgtctccggggcgcccggtggcctcctcaggggcgccccgggcctcggggtgcgcggcggccgcgccctcctcagtctgcggcccagcgcggtgcgggcgggcggcgctgtcctgagcggccgcggcagcctctgcttcccccatggcgggaccgggcggcgctggtactgcctcgacttgcgcgtcctgctcagcgcccaacgcctgccctggccggccgcgcccgcgctcgcgctcgtcgacctgcagctctccgcgcgcggcggccgcctctccctgacgtggtccgtgcggctgccgcgctcgcccgggcgcctggcctgggccttccgcctgcggctgctcggacccggcgccgcccgcccggcctcccccgcggcccgcgtctccccgcgctccgccgcgccaggcccgcggccccagcagggcttcgtggcccgcaccgagtgccccacagacggccccgcgcgcgtgatgttgcaggccgtcaactcgtccagccacagagccgtcgagtcgtccgtgtcctgtcagataaacgcctgcgtcatccagcgcgtgaggatcaacacggaccagaagggcgcccccgtgcgcctgagcatgcaggcggaggccaccatcaacgcctcggtgcagctggactgcccggccgcgcgcgccatcgcccagtactggcaggtgttctccgtgcccgccgtgggtcaggcgcccgactggacgcagcccttggatctgccccagctcgagatcaggaacagccccttgttcattcacatccccaataattcgttacagtggggagtgtatgtgtttaatttcacggtgtccatcaccacagggaaccccaagatgcccgaggtgaaagactcggacgccgtctatgtctggatcgtcaggagttccctgcaggcggtgatgcttggcgatgccaacataacagctaatttcacagagcagctgattctggacgggtccacgtcctcggacccagatgcggacagcccgttacagggactccagttcttttggtactgtaccacagatcccagaaactacggtggggatcgaataatcctggggagcaaggaagtctgtcaccccgagcaggccaatctgaaatggccctgggcctcgggccctgtactgacacttttgccagaaacacttaaaggcgaccacgtgtatttcttcagaatggtgattcggaaggactctaggacagcgttttctgataagagggtccacgtgctccaaggaccaaaagccatagcacacatcacatgtatcgaaaattgtgagagaaacttcattgtctctgatagattttctttgttcctaaattgcacaaattgtgcaagccgtgatttctataaatggtcaattttgtcttcttcaggtggtgagatgctatttgattggatgggggaaactgtaacaggaaggaatggtgcttatctgtctataaaagcttttgcttttcggcattttttggaagctgagttttcgatttctctgtatctagcatgttggagtggagtgacctcggtcttcaggcattcttttattattaaccatggccctcagatcggagaatgcaaaattaatccagctaaaggaattgcacttattactaaatttgttgtccagtgtagtaattttagggataagcacgtccctcttacatataaaataattgtttctgatttgcacagtgttggtgaaatcagttcagtaaaagagaacaccctggggaccatcctgtacttggggcctcagtccacagtacccccttcctttctccctgttggtatgttggctagtcaatatggcttgaagatatatgcccaggtctatgattctctaggagctttttctcaggtgactttgcatgccaccgcacaggctcccactgacaaaaattcatcaaagacagtgttgaatcagttactcagtttcaccgtgggaccaagttcattgctgtctactttgattcaaaagaaggattttttacctgcaggttacttactgtatatagtagcttccgttttgaataacatgaaaactgaattacctctccgagatgacagagtcaatctccgaaaacacctcatcgatcagtctttccttcttcctgtaagcactttggtagaaattggccaggtagtcatgactattaccaaattaacccagaaaccctctgaattcacttgggatgctcagaaacgtgccaccatgagggtatggcaagcaaatcaagccctacaagagtatcagcaaaaagataaacgctttcgatctgaacaaatagaaatcgtgagtactggaatactaatgagtttgtctaatattcttaaaatgacttctcctcaccaagtagttaaagatcctttctatgtaatagaatctctatcagacacaatactggctaataaagtgccagggaacaaaaccacctcaatgagaacccccaatttcaacatgtatgtcaagaaagttgaaaagtggggtatcaaccagctcttcagaaatgagaaacactgcagaaattgtttttatccaacactcaatgtgagcagtgttcctggtctgtctgcaaatggtcccatttctacaatgttttgtgatttcacaaatgacctctttccttggttaaatgatcaggaaaacacttcggtggaggtgtctggattcagaatgacaggagttgcagataacggtagtgtgctagagatcacacctgatgtagcggaagtgtaccttgtcaggaaaaacttgacctttgcagcttttaatctcacagtgggacccaacagcgaggttgatgggtccttgaagaagacgacaggtgggtttagctttcaagtggacagcacagtgcttagggaggttctggtccacatagtaacagaagtgatggtgctgttcacagtgttggtgtacacaggcagtcagatcactcccacagcgctggtcgccaccttcctggtgcctcatgacatccctccatttgccagccagagtgccctgtttgacccagcctgcacagtgaagaaggcccgtgtagtctgcctccctgtgtccctgctgcaactcatagctcagcacagccactctccccactgtactgtatccatagttctgcaggcacctcgttttgtcatgaagctcaatgacaagctagtgagaatttctattttcagcgtccagtgcttggacatgtatgggatccagagtgaatggagagagggttattgcattcttggtgagaagaccagctggtatgaggtgcactgcatctgcaagaatgtagtaagggctaggcggcagctgggcacaatcggactcacgggcattcacctgcatacccactatgtgatggccaaggtgattgtgatccctaatcctgtggatctacggttaaacatcatcaagagccttcaccaaaaccccgtgaccctcttcactgtgcttttcattattctcttatacgtgggcctagctttttgggctttatacagggatgaaatggaccagcatcttcgggggcatgtgatagttctaccagataatgatccttatgataatttatgctacttggtgactatttttacaggaagtcgttgggggtctgggaccagggccaatgtctttgtgcaacttagaggaactgtgagtaccagcgacgtgcattgtttaagccatccacatttcacaactctctaccgaggtagcatcaacactttcctcctaacgacaaaaagtgacttgggggacatccattccatccgtgtgtggcacaacaacgagggtcgatcgcctagctggtatttaagtagaatcaaagtggaaaatctgtttagcaggcacatttggctgttcatatgccagaaatggctttctgttgataccactttggacagaacatttcacgttacccatccagatgagcgtctgactagaaaagactttttctttatagatgtgagtagtaatctccggaaaaaccacatgtggttctctatttttgctagtgttgttgctaaaacattcaataggctccagagattgtcctgttgtttagcaatgttgcttagctctcttctttgtaacattatgttctttaatctaaatagacaagaacaaactgagtcaagagagaggaaatacatgagatcaatgatgataggaattgaaagtgtcttaattacaatccctgtgcaattattaataacttttttgttcacctgttcccagaggaaacctcaagcggatctaaaggaggtatctcctcaaaagcatcctctaatgtcagaagcaagtgagcactgggaagaatacttgagaaagtggcatgcttacgaaactgctaaggtgcaccccagggaggttgcaaaacctgcatctaaaggaaagcccaggcttccaaaggcttctcctaaggcaacctccaaacccaagcacaggcataggaaagcacaaatcaagaccccggagaccctcgggccaaatacaaattccaataacaacatagaagatgatcaggatgtccattccgaacagcacccttcccaaaaggatctccagcagcttaagaaaaagccccggatcgtcctaccttggtggtgtgtttatgttgcatggtttttggtttttgctacttctagcatatcctcattcttcattgtattttatggactgacttacggctatgacaagtcaatagaatggctctttgcatctttttgttcattctgtcagtcagttcttctggtgcagccatctaaaattatactcctgtcaggcttcagaacgaataaacccaagtattgcaaaaacctttcatggtcaaccaagtataaatatactgagatcaggttggatggaatgcgtatgcatccagaagaaatgcagaggatacatgaccagatcgtccgaatccgaggcacgaggatgtaccaaccccttacagaagatgaaatcagaatattcaaaagaaagaagaggatcaagagaagagcactcctgtttctgagttacattctaactcactttatctttctagcccttctgttgatccttatcgtcttactacgtcacactgactgcttttactataaccagtttattcgtgatcggttctctatggatcttgctactgtgactaagctggaagacatctatagatggctaaacagcgtgctgttgcctttgttacacaatgacctgaatccaacatttcttcctgaaagctcgtctaaaatccttggccttccattgatgaggcaagtgagagcaaaatctagtgaaaaaatgtgtctacctgccgaaaagtttgtgcaaaacagcatcagaagagaaattcattgtcaccccaaatatggcattgacccagaagacacaaaaaactattctggcttttggaatgaagttgataagcaggctatagatgagagtaccaatggatttacttataagcctcaaggaacgcaatggctatattattcctatggactactacacacctatggatctggaggatatgcactctatttttttccagaacagcagcggtttaattccacactgaggctcaaagaacttcaagaaagcaattggctggatgagaagacatgggctgtggttttggaattaacaacttttaatccagatataaatctgttctgtagcatttcggtcatatttgaagtctctcagttaggagttgtcaacacaagcatatctctgcactctttttcacttgctgattttgacagaaaagcttcagcagaaatctacttgtatgtggccattctcatttttttcttagcctacgttgttgatgagggttgtatcattatgcaagaaagagcctcctatgtgagaagtgtgtataatttgctcaactttgctttaaagtgcatatttactgtgttgattgtgctctttctcaggaaacatttcctggccactggcataattcggttttacttgtcgaacccagaagacttcattccctttcatgcagtttctcaggtagatcacattatgaggataattttgggtttcctgttatttctgacaattttgaagaccctcaggtattccagattcttctacgatgtgcgcctggctcagagggccatccaggctgccctccctggcatctgccacatggcatttgttgtgtccgtgtatttcttcgtatacatggcttttggttacctggtgtttggtcagcatgaatggaactacagtaacttgattcattccactcagacagtattttcctattgtgtctcagctttccagaacactgaattttccaataacaggattctgggggtcctgttcctctcatctttcatgctggtgatgatctgcgtcttgatcaacttatttcaggctgtaattctgtctgcatatgaggaaatgaagcagcccgtgtatgaggagccatcggatgaagtggaagcaatgacctatttgtgccgtaagctgagaaccatgttcagctttctgacctcgcaatctaaggccaaagatgagcctgagttctttattgacatgctgtatgggcagccagagaagaacagccaccgttatctggggctgaagaccagaaacatcaacgggaagaaaatggtttaccttgttgtttgatgaatgatggtttcatgagtcacaagcaagcgttcccccaactgctgagtctgtgggattaaggggattagggagtgtcagtggcctagtcatgctttctactcatgtccttcacaaggcacatcccctacatttggaagaatccccaatcttgtcctctgctcttgggagtgtaaaagttgggagtgtagtgtagcatctggggagacagcaggatcacagtgtgggattcctggactgatttccctttagaggggagttatgtgactccccgtacaagggcaaccctgtttctttggtgcctgcagtttagagaaggcagagccactggttttgagaaccagatttgagagagggacctggccagggtggagcattgtctgggtgtttctgcgcttgacccatgctggaagctaatggcctgttgctcctgacagagccccaaactcctcggcctcactgggaggcccctttgtagaccagggctcccctcctcttgttccccctgggcttagggcctcgtggggagttccaggacttgcttcatgcttgagaatgcagatgtggtgcttctcatttattcttaaagctactggtagttaaagtaaaattcagtaacattttctgaccaagagacatgttttgttaaacaacaaaaaggtacatatgggttcacattgaaatatgtctatatgctgaatatagcaacatatgcatctaagatttgggcatttggttattaatagcgtgctggactattcaggaataaggaaaatgtggtttatcacttaagagaaacaagggctggtagctgtactattttcactcagaagcatgttcatttatgtagatgccactttaagctttatcagaattaaatgtgagatttcttctttgagccttg

SEQ ID NO: 63708 - DNA, 444 bp, Homo sapiens
gatactgggttggttttaagctgttccaggtgagggccagatgttccttacatgaatggaacttctcttcttgctccacccatgggccctgagcctatccactccctcccctgacaactgatttcagtgtgtggaaggcaggggtgcagtcaacactgaaagaaatcaccttctaggaattcagtgattaaggcctaaagaactcaagagaagatgtggttggatgatatattgttgtaaacatacatataaaactctgatcggcgaaattttattcacatttttctgcatactctaagcaaaacttgccattggtgtcatcactaaagaagcacaggaacaaactttgagttatgaagccagtatttgtacgtagagtgaagaattgtgcagcatcatgagtaatgatgtaaccagcattaaataaatggcattatcaacaca

SEQ ID NO: 63709 - DNA, 578 bp, Homo sapiens
ggctcgctctagagtatccccacctcctaccccacgtatggaagatgaggatttagttgttatatacacccttctcccaatgtatatacttctgtctcctatcctcttaatttaacttttttttaccctttttggtcaaactaatatgtatgtaatctttactaaattttggtaaatattgaatgcagatgtggctgacattgttggtttcctgctcaatagctattccctcttcttgcttgctgccagattccctcattttttaaatggcaaggtgctaaaccccaggatatagactgtggcagctcttaagtcagtcatagtttccccagtgtttggtctggtgggcatctgaaccagttctggacaaatgagatgtaaaggaagtctgctgatggcttctgagattttcccctccaacggagaaagtcccaggaggaaagccctgtttgactccatgttctcctttcctgcttggaactctattttatgagggtgtgggtccatctcagcctttttggagggcttgtgggcaagttacttaatgtttcgttctccaggctgtctatttgcgtgag

SEQ ID NO: 63710 - DNA, 599 bp, Homo sapiens
gtgtgagcccctatgcccagcctatttcttagtttgggatattaattcattttctgctatggaagatgaggatttagttgttatatacacccttctcccaatgtatatacttctgtctcctatcctcttaatttaacttttttttaccctttttggtcaaactaatatgtatgtaatctttactaaattttggtaaatattgaatgcagatgtggctgacattgttggtttcctgctcaatagctattccctcttcttgcttgctgccagattccctcattttttaaatggcaaggtgctaaaccccaggatatagactgtggcagctcttaagtcagtcatagtttccccagtgtttggtctggtgggcatctgaaccagttctggacaaatgagatgtaaaggaagtctgctgatggcttctgagattttcccctccaacggagaaagtcccaggaggaaagccctgtttgactccatgttctcctttcctgcttggaactctattttatgagggtgtgggtccatctcagcctttttggagggcttgtgggcaagttacttaatgtttcgttctccaggctgtctatttgcgtgag

SEQ ID NO: 63711 - DNA, 307 bp, Homo sapiens
gtgtgagcccctatgcccagcctatttcttagtttgggatattaattcattttctgctatggaagatgaggatttagttgttatatacacccttctcccaatgtatatacttctgtctcctatcctcttaatttaacttttttttaccctttttggtcaaactaatatgtatgtaatctttactaaattttgggaattagttgcggcccttccgtgttttggcactgcatgattctgggggtcgatttccttacgtttgttttccgctagctgattaatttttcccagttctctttcctttttgtga

SEQ ID NO: 63712 - DNA, 500 bp, Homo sapiens
gtggcttcattcttgaagtcagtgagaccaagaacccaccaatttcggacacactaggctctgacaagcaactctgcaaagcagaagtgatgcttgaaaccacagcagccattttggggccacgaggcaataagcacaaggataaaaagccaagaaccaaagatggagaatcaagggtgtaatgaacctagatgatatgatatgacagagtcctgaactgctagacttcttactaggagtcccagtgtctcctgaggaaatccctttcccattcagccggcagctgcagcaggtgggatgggccagaccagccctctggggatgctgatcccagggagcatccaggccggaaggtccaaacgggttctatgtcgatgtggctcagagccagtagtgtagggtacaggagaaaccttcatcacctcatcttctcagggccctactgcaagccagcatctccccttcttcctctctgcttcaagatccatggaggtatattc

SEQ ID NO: 63713 - DNA, 508 bp, Homo sapiens
tttgtcattttatttcaagcactgaagaagtatgacagaaagaatattatggggaaaatatttagaccaatcctggctataaaatttcctttagttttatgcctggcctttgcaaagctcagtgaaatgttgaaaggaataaattaatcatgtttctgtgacttttgattgacacttgttccttttcccccctaagtggtagaagaagttatttgttatttttctaaaaggcacaattttgaagccttaactacttcattaagtcaactgttgcctataacatctcttagcactcgtcaaaacgtatttaaatcaattttccaatggatgagaacatgtcttctgtggataaattatattatgtcatttaacaacattgagcattttgatatgtgttcactgaattaaaaaacctgaatttcattattgttgacttttcccctctttagttactagtaatcacatcctttctaggattaaaaatatttcatagtatttttgtgtagat

SEQ ID NO: 63714 - DNA, 471 bp, Homo sapiens
gcaccagtctgagtgtggaagagacggcgctggaacccatggacacggcgtatccccgcgaggacacccgggcccccacgcccagcaaggccggtgcccacacagccctcacactgggggccccgcaccccccgcctcgagaccacttgatctggtcggtgttcagcaccctctacctgaatctgtgttgcctcggcttcctggcgctggcctactccatcaaggcccgagatcagaaggtggttggtgacctggaagcggcccggcgttttggctccaaagccaagtgctacaacatcctggccgcgatgtggacgctggtgccgccactgctgctcctggggctggtggtgactggtgccctgcacctggcccggctggccaaggactctgccgccttcttcagcaccaagtttgatgacgcggactatgactgacaggctgggtcctgatctggggcactagccccag

SEQ ID NO: 63715 - DNA, 328 bp, Homo sapiens
gtttcactctgtcacccaggctggcctcagcctcctgaatagctgagactataggcgcgcaccaccacaccaggctaattttttctatttttgtagagacagagttttgctatgttgcttaagctgctcttgaactcctgagcacaagcaatcaccttcgccggcttcccaaagtgctaggattacagacgtgagccaccgcacctggcctggtgctaacatttttttccttgtcatcaaaacacatttatcatttggtccaggtgactgaacatatagctaagttaagaagtttcatttaatccaaaaatacatttgtaaaacttgt

SEQ ID NO: 63716 - DNA, 538 bp, Homo sapiens
agaaactcagtgccaagggcaaacagctgtttggtgcagtggggaggggctggaatagttcagttctctgatctctcttccccaggcccaacttcatcctccttccacagtccacggcctcccgggtctcatctcagggtccagtcagggtcttctcttgcaccagggccatccctcttttcttcttctctcgccccagtcaccttgagtctaagcctccctttaaatctccccaaaggaaccttccctttctcttggcacctggtgattgactctcagggtaaagtaagcagtgctgatgtgtatgaagggcactctgcagaaataaattgtgcagaggatgaatgagagcttggagtagaaatgctggccctggcaaaagacataagaactctggaggctgtgcccactgctctgtgagtgatggacccatccagtctgagttactaccacatgccagattatcattttgaatagttccacgtggctgcaggaggcacaggcaggagttcaccagagccactttcataatcaccca

SEQ ID NO: 63717 - DNA, 490 bp, Homo sapiens
gaaatgaaactgaattatgtttaataaaatacagtgagatgagaatgtaaaaaacacacatctttctcataggatattaaagaaacacaattttatttaaaacaataacgatacaacacacatgtattaattaacttaattattgcaacagtcccatgagttagaggctgttaacatactcattttatagatgagaaaacagaggcatggagaagttaagtaaattgcctaaggttccacagccaggattataaactttgcggtctgaatgtaaagcctgaggtagtaaccgctactctagccttcaagtgcaacttactccctaagaaagtggaatgaggcgtggtagcgggcgcctgtagtcccagctactccagaggctgaggccggagaatggcgtgaacccgggaggcggagcttgcagtgagccgagatcgcgccactgcactccagtctgggcgacagagtgagactccgtctcaaaaaaaaa

SEQ ID NO: 63718 - DNA, 491 bp, Homo sapiens
gtttttcaaagggggaaaaacaggaaaattttaccttataattttcctcaaagacttatagtttcaaaggaatttatactagaaaataacatggctatacatttttatatgtattgtattttcattagcaaggtttataaccagaacagatttttattattaaaaatatttaatttctgagcttgttgagcagagtgtagatagtatactatctacagatagttctataggtagatagttttagtcattctagtgttgaaattcgaaaacagatgtcttctgtctaatactttcactactattttatgacttccctaagattttgtgcttgttttatatttcttagttattcatttgggttaaaattttatttttcaagtattttgaaatcattgtttacatgcaaatatgtatttttcataagaaaagttagctgtctgtatcgcataccaaaactatatagcataaaacttgaaccacatttttccaaa

SEQ ID NO: 63719 - DNA, 476 bp, Homo sapiens
gacagacatggtgcattctgtggtcactttccaagagcccgtggtgggttgtcctgtttctgttggtgggaaacaagttaaacacaatttgctatttgcctttcacccctcagttcatcatgagatcattagtcggctgagtgactgctgtcccccaggggctgggagagagggggtcttgagggagttactggtgatactgcatgcctgtgggttgggggatcatatcctatttttatcagatggaatatgctggaccagaaaaaagaaccactgggaactgtgttcttccaactttggtttcagatccctctagttaatgccatccatgaaaacaattaacttctctatatttcaggatccaggcaggaccttgtaggaatcttatttaattatgtgctatattaatgttatattgattatgttattgcctgtaaatccagttgcttaataaagctgcagtcattttgcaataa

SEQ ID NO: 63720 - DNA, 529 bp, Homo sapiens
ctagacatgtatgtttagtgttcctgagatagcatgttactattaacctgtctgattatacgatttgtatgtaaaaactaattcattttagagaataactgaagcttagcttttgaaatacattatactgtgttcaggtcatgataaacgtcctctggagcatggctaccccacctaacatacgtagcatagtctcctgaaaagctcaacatgacttactgggtggctatagaccaaggcaaagaatatcttatacttttctaaattatatatattattgattataccataccttttggaatttaagaaaactgctaactagtattataaaggagttgctaattacaatattaatatcattatgttcacccaggaattttcctaagctctaaagtcaattctagtaaatcccaggaagtaaaaaatcccatatttgattggggctctttgttgctgtattgcctgactctgcctcagagttttgtcaacacagttgtccaggaagtcatggacactaaagttgaattta

SEQ ID NO: 63721 - DNA, 446 bp, Homo sapiens
ggactcggcctatccgtcagcacgcaggctccaccctcgctgaactcacagaggacaatttaggcaggaaccgcacactgctatgacatatccaccccaccgtgctttctcgaggagtgatgtcccataccccctgctgagcagccctgtacagtggccactttccctggtagtaggtgacacatctacaaggtggccccagcagccttcagccctagagtctgactgccctggtccaagccatccctgccttgctggcctcctggggcccatgcaccctgttgacattcccctctccactgccctccactcaaagcaccaaagaagacttactcaatgtgtccttatggtgcagagtcccagcaagcagaggtctttgtatctgttgaataaaaaaattcctcatgatgcgtagtaacatcagtgaggaagactgcaccaaggcg

SEQ ID NO: 63722 - DNA, 493 bp, Homo sapiens
caggcaccatccagcccacaacccctccgcacccctaatcagtgtgacatgatgagacacaatcacagcttcaaatcacatccttgctgaactcacagaggacaatttaggcaggaaccgcacactgctatgacatatccaccccaccgtgctttctcgaggagtgatgtcccataccccctgctgagcagccctgtacagtggccactttccctggtagtaggtgacacatctacaaggtggccccagcagccttcagccctagagtctgactgccctggtccaagccatccctgccttgctggcctcctggggcccatgcaccctgttgacattcccctctccactgccctccactcaaagcaccaaagaagacttactcaatgtgtccttatggtgcagagtcccagcaagcagaggtctttgtatctgttgaataaaaaaattcctcatgatgcgtagtaacatcagtgaggaagactgcaccaaggcg

SEQ ID NO: 63723 - DNA, 269 bp, Homo sapiens
ctctttgaaacccatagcccctctccttacaaatggttaaggatatggatggagaaagcagataccttttctatagcctaaccggatattaataagtcatctacgtactggagcagacatatacattttggggtataaacttgttctaacacttgttctagaatttgaccaaagagattaggggaatctgtgaagcccgggggtagagctgtctatcgatactgttgctgtcatccagaatggggatcttcccattcgaaagcaaaaat

SEQ ID NO: 63724 - DNA, 271 bp, Homo sapiens
gaattttgaaattctaagcttcccatcaagaaggttgggaggtagagggttcattcctatgtctgaaaagtcctggaactctgaagccaatgtaataaattgaatgcacttctaggttgataacaccccgggtcttgtcaaaaagaaacacaaatccttctggaacttagggcattcttatcatcatccatttagtagtaaaacaaaattatgatcagccaaatatgaggaattagaatttgtcaaaaatgagaaaaggatgtgagaaagt

SEQ ID NO: 63725 - DNA, 340 bp, Homo sapiens
tggccggggggtgcagtgctatagcagaaaggatgtagatttggagtcagactaagtttgcatcctgacttcatcctttcataacttaggcaggttgtttaatacctttaagcctcagtttcctgatttgtcaaatgtagacagtatctgctgtgccgtgtcattgtaaggactggatctttgttatgagacagcatgttgaagcctatcccccagtcacagtgatagaagttcttagttaaagacgagaatctgtttactggcctcgagacattgcactgcacctgggaagggcaggtagtccgtgtgctggtccttccagctttccagggcggaagtg

SEQ ID NO: 63726 - DNA, 1446 bp, Homo sapiens
  misc_feature (248)..(248): n is a, c, g, or t
  misc_feature (906)..(906): n is a, c, g, or t
  misc_feature (1215)..(1215): n is a, c, g, or t
  misc_feature (1223)..(1223): n is a, c, g, or t
  misc_feature (1242)..(1242): n is a, c, g, or t
  misc_feature (1325)..(1325): n is a, c, g, or t
  misc_feature (1424)..(1424): n is a, c, g, or t
  misc_feature (1426)..(1426): n is a, c, g, or t
  misc_feature (1436)..(1436): n is a, c, g, or t
atccagcaccacctgcagaagctggagggccgccgcctggactttgactaaaagaagcggcagggcaagatccccgatgaggagctgcgtcaggcgctggagaagtttgaggactccaaggaggtagcagaaaccagcatgcacaacctcctggagaccaacattgagcaggtgagtcaactccgggccctggcggaggcgcagctgaactaccactggcaggccatgcagatcctggacgagctggnagagaagctcaagcgcaggatgcgggaagcttcctcacgccccaagcgggagtataagcccaagttctgggagccctttgacctcggagagcctgagcagtccaatgggggcttcccctgcaccacagtccccaagattgcagcttcatcccctttccgatcttccgacaagtccatctggactcctagcaggagcatgccgcccctagaccagccaagctgcaaggtgctgtatgacttccagcctgagaaccatggggagctgggcttccatgagggtgacgtcttcacgctgatcaaccagatcaacgagaactggtaccagggcatgctggacagccagttgggcttcttcctgctcagctacatggacgtgctcatgcctctgcccagtgactcactggtgcccccgccccgcccctccatccacactgggtggcacccccgccaggtctcctgccttccatgggctcctgctgccaaggcggtgtccaagcctgccggcgccacccaggcccgggcccttgaggtactccctcagcagggagccacacttgggtgggaggcttatctgggtgggtggggacgcttgtttaaactagcgctgacccaacggtgacggctcccttcctcactccatggcgccggcctcctcccngctccccaactcctcacccagctggcccagacggggcaacactaaggtgctctcagaaacactaatgttcctccagggcagcccccacctccgtcctgacccatgggggcccagcccacagcctaccctcgagttccacggccttaacaggcttggatcgagtgtccctgtggggtggctcagagacaggaccctggttttaaatccctcccagcctgctcctggcgatgaaccctagccccactccagggccacagtaccccagcctcacacatgcactccttctccccaaggccagggcagagggcntcactgtntccctggcctgctgtcagnttgcaaccaggagacagaggccagctgggatgccccaccttcccccccatactgctcccctcaaccaggacagagaacatggnctcctctagggccctgcctcccaagccttaccctcacacaccaagtaccttttcagctttttaactgcccccagccaggcccacggaagcctgtgtcantntggcacaagntgccaccacc

SEQ ID NO: 63727 - DNA, 445 bp, Homo sapiens
ttctgtttgtccagaatgcccagcatttcctcatgcccctaacctagctagttcgtactcatccttcaagtccccattgggagtcagccttctgacttccctctgagactgggttaggtctcccgataaacactcagagccctgccactttccttcacagcaaataccacaattatgactgcacagttattttcatgcttattttcaatgggaaaatgaattaaagcagtatcctaacaaggtcacaactggaaggccaggcgtggtggctcatgcctataatcctggcactttgggaggccaaggcaggcagagcacttgaggtcatgagttcgagaccagcctagccaacatggtgaaaccctgtctctactaaaaatacaaaaaattagccgggtgtgatggtgcatgcctgtagtcccagcaggctgtgggagaatcactt

SEQ ID NO: 63728 - DNA, 465 bp, Homo sapiens
cgcgtcaaggtctccagcctgccctacagtgtggatgcgctcgtgtcggacaagaagccgcccaaggaggcatccccagtgccggccaaaagcgcctcttccggggccaccctgcggctactgctgctgccggggcacggcgctcgggaagcgcacagccccgggccgctgatcaagcccttcgagaccgcctcggtcaagtgggaaaactccctaagacggagcggcgtggatgcaggaaccctgctgataattcgccgccgccaagacacgtgagccctaccacctgcaccctgagaaaacacaagaccaatccgaagccgcgcacagcctttaccacgtcccagctcctcgctctggagggcaagttgctccagaaacagtacctctccattgcagagggtgcggacttctccagctctccgaacctcacggagactcaggtcaaaatcttgttccagaacc

SEQ ID NO: 63729 - DNA, 730 bp, Homo sapiens
tcagggaagaaggaacgcaagacggtggaagcatgccaacctattaaaccgcaagtcagagatcaaaccatgtacttgaatctctcaagttcccggcttaaccctcttccaagtatcctcatttgaaaatggaaaaagaaaagaaatggaggcattgtgtgatatttgcctaaatataactaaagagatccatttatttttagtgtttgattaaaaaccctcaaaggaaaagagaaattttgatctttgagaagagctgtttcatcacagggtgaagttgtttcctgagccctttgatctgaaatgaccttgcgacctggaaccagcagacagcctgagggaggcagtgcatgttctgagccagggcctcaggaggcctgcagctgccattctgcttctgttggaacatgacctccttgagaacactcccaggcctgactgcagggtggggagaccacacagagcagagccgagccaccgggatgaggcccctagatcacccagctcccagctgaccacagatcatgagtgatcccgtttctccctaggtcaagggtgatgttttgctcagagaaaactgaagtttggattgttccagtcctgcatcacatcctgtttcaggctgccctaaaacaaaaccagaaacaaccatcaccacaaaacaccataccttcaatagtcttctcagtgttcagaataaaggctctggttttcccttgggctcaatttt

SEQ ID NO: 63730 - DNA, 406 bp, Homo sapiens
gttgaacatgagaacataatcattcatattttatccatttgcatgtattcaataccatcctttcgctgttcttgtctctgcagcctttttctttaaagaatgaatgtttccatgttttatatccacagaatttctggtttttcctgttggagcccaaggagcaagggcagaatgaggaacatgatgtttcttaccgacagttactcatgacgtctccatccaggactgaggggggcatccttctccatctaggactgggggcatccttctccatccagtattgggggtcatcctcctccatccaggacctgaggggtgtccttttctgcgcttccttggatggcagtctttcccttcatgtttatagtgatttaccattaaatcactgtgccgttttttcctaaaa

SEQ ID NO: 63731 - DNA, 1256 bp, Homo sapiens
tacacaatggtgaagacacattggtgaagtacaaaaatataaattggatctagaagaaagggcaatgcaggcaatagaaaaattagtagaaatccctttaaaggttagtttgtaaaatcaggtaagtttatttataatttgctttcatttatttcactgcaaattatatttggatatgtatatatattgtgcttcctctgcctgtcttacagcaatttgccttgcagagttctaggaaaaaggtggcatgtgtttttactttcaaaatatttaaatttccatcattataacaaaatcaatttttcagagtaatgattctcactgtggagtcatttgattattaagacccgttggcataagattacatcctctgactataaaaatcctggaagaaaacctaggaaatattcgtctggacattgcacttggcaatgaatttatgggcgctttggaatcctgcagatataataatgataattaaacaaaacactcagagaaactgccaaccctaggatgaagtatattgttactgtgctttgggattaaaataagtaactacagtttatagaacttttatactgatacacagacactaaaaagggaaagggtttagatgagaagctctgctgtgcaatcaagaatctcagccactcatttctgtaggggctgcaggagctccctgtaaagagaggttatggagtctgtagcttcaggtaaccactgatccacttccagtcactatccatgagtttttatttccaaatacatgaaatcatatgaaagtggatgaccgggccaccctccaccactgccctgtaagaccatgggacacacaggccaccagttcttttcatgtggtcatcccctgttagatgggagaaaatacacctgcctcatttttgtaccttctgtgtgaacattccacggcagagcttcactaaatgtgtgatgaagaattgaatgaatgaatgaatatgagagaaaatgaataaatggttcagatcctgggctggaaggctgtgtatgaggatggtgggtagaggagggtctgtttttcttgcctttaagtcactaattgtcactttggggcaggagcacaggctttgaatgcagaccgactggactttaattctggctttactagttgtgattgtgtgaccttgtgcaagttacttaaaccctctgtgcctgtttctttatctgtaaaatggagataataagatgtcaaaggactgtggtaagaattaaatgcttta

SEQ ID NO: 63732 - DNA, 1057 bp, Homo sapiens
tacacaatggtgaagacacattggtgaagtacaaaaatataaattggatctagaagaaagggcaatgcaggcaatagaaaaattagtagaaatccctttaaaggttagtttgtaaaatcaggtaagtttatttataatttgctttcatttatttcactgcaaattatatttggatatgtatatatattgtgcttcctctgcctgtcttacagcaatttgccttgcagagttctaggaaaaaggtggcatgtgtttttactttcaaaatatttaaatttccatcattataacaaaatcaatttttcagagtaatgattctcactgtggagtcatttgattattaagacccgttggcataagattacatcctctgactataaaaatcctggaagaaaacctaggaaatattcgtctggacattgcacttggcaatgaatttatgggcgctttggaatcctgcagatataataatgataattaaacaaaacactcagagaaactgccaaccctaggatgaagtatattgttactgtgctttgggattaaaataagtaactacagtttatagaacttttatactgatacacagacactaaaaagggaaagggtttagatgagaagctctgctgtgcaatcaagaatctcagccactcatttctgtaggggctgcaggagctccctgtaaagagaggttatggagtctgtagcttcaggtaaccactgatccacttccagtcactatccatgagtttttatttccaaatacatgaaatcatatgaatttctggtttttcctgttggagcccaaggagcaagggcagaatgaggaacatgatgtttcttaccgacagttactcatgacgtctccatccaggactgaggggggcatccttctccatctaggactgggggcatccttctccatccagtattgggggtcatcctcctccatccaggacctgaggggtgtccttttctgcgcttccttggatggcagtctttcccttcatgtttatagtgatttaccattaaatcactgtgccgttttttcctaaaa

SEQ ID NO: 63733 - DNA, 288 bp, Homo sapiens
cagaagcattatcctgtcatcagaagatggacctttccctggaatgccttttccctatcatgtctgtgtggtaaatacctattcatccttaacaacccagctgaggtcttacctcatcaggatttgatcccccaaaaagatttgtccctctctgggctatctttataacttgtacatacttctatttgtggactatgttataataatgtggctatatgtctgtgatctcagcgtgagctctttgaggacagagtttctgtctgaatcctcagggttctgtttcaccat

SEQ ID NO: 63734 - DNA, 5834 bp, Homo sapiens
gcactgagtcccgggaccccgggagagcggtcagtgtgtggtcgctgcgtttcctctgcctgcgccgggcatcacttgcgcgccgcagaaagtccgtctggcagcctggatatcctctcctaccggcacccgcagacgcccctgcagccgccggtcggcgcccgggctccctagccctgtgcgctcaactgtcctgcgctgcggggtgccgcgagttccacctccgcgcctccttctctagacaggcgctgggagaaagaaccggctcccgagttctgggcatttcgcccggctcgaggtgcaggatgcagagcaaggtgctgctggccgtcgccctgtggctctgcgtggagacccgggccgcctctgtgggtttgcctagtgtttctcttgatctgcccaggctcagcatacaaaaagacatacttacaattaaggctaatacaactcttcaaattacttgcaggggacagagggacttggactggctttggcccaataatcagagtggcagtgagcaaagggtggaggtgactgagtgcagcgatggcctcttctgtaagacactcacaattccaaaagtgatcggaaatgacactggagcctacaagtgcttctaccgggaaactgacttggcctcggtcatttatgtctatgttcaagattacagatctccatttattgcttctgttagtgaccaacatggagtcgtgtacattactgagaacaaaaacaaaactgtggtgattccatgtctcgggtccatttcaaatctcaacgtgtcactttgtgcaagatacccagaaaagagatttgttcctgatggtaacagaatttcctgggacagcaagaagggctttactattcccagctacatgatcagctatgctggcatggtcttctgtgaagcaaaaattaatgatgaaagttaccagtctattatgtacatagttgtcgttgtagggtataggatttatgatgtggttctgagtccgtctcatggaattgaactatctgttggagaaaagcttgtcttaaattgtacagcaagaactgaactaaatgtggggattgacttcaactgggaatacccttcttcgaagcatcagcataagaaacttgtaaaccgagacctaaaaacccagtctgggagtgagatgaagaaatttttgagcaccttaactatagatggtgtaacccggagtgaccaaggattgtacacctgtgcagcatccagtgggctgatgaccaagaagaacagcacatttgtcagggtccatgaaaaaccttttgttgcttttggaagtggcatggaatctctggtggaagccacggtgggggagcgtgtcagaatccctgcgaagtaccttggttacccacccccagaaataaaatggtataaaaatggaataccccttgagtccaatcacacaattaaagcggggcatgtactgacgattatggaagtgagtgaaagagacacaggaaattacactgtcatccttaccaatcccatttcaaaggagaagcagagccatgtggtctctctggttgtgtatgtcccaccccagattggtgagaaatctctaatctctcctgtggattcctaccagtacggcaccactcaaacgctgacatgtacggtctatgccattcctcccccgcatcacatccactggtattggcagttggaggaagagtgcgccaacgagcccagccaagctgtctcagtgacaaacccatacccttgtgaagaatggagaagtgtggaggacttccagggaggaaataaaattgaagttaataaaaatcaatttgctctaattgaaggaaaaaacaaaactgtaagtacccttgttatccaagcggcaaatgtgtcagctttgtacaaatgtgaagcggtcaacaaagtcgggagaggagagagggtgatctccttccacgtgaccaggggtcctgaaattactttgcaacctgacatgcagcccactgagcaggagagcgtgtctttgtggtgcactgcagacagatctacgtttgagaacctcacatggtacaagcttggcccacagcctctgccaatccatgtgggagagttgcccacacctgtttgcaagaacttggatactctttggaaattgaatgccaccatgttctctaatagcacaaatgacattttgatcatggagcttaagaatgcatccttgcaggaccaaggagactatgtctgccttgctcaagacaggaagaccaagaaaagacattgcgtggtcaggcagctcacagtcctagagcgtgtggcacccacgatcacaggaaacctggagaatcagacgacaagtattggggaaagcatcgaagtctcatgcacggcatctgggaatccccctccacagatcatgtggtttaaagataatgagacccttgtagaagactcaggcattgtattgaaggatgggaaccggaacctcactatccgcagagtgaggaaggaggacgaaggcctctacacctgccaggcatgcagtgttcttggctgtgcaaaagtggaggcatttttcataatagaaggtgcccaggaaaagacgaacttggaaatcattattctagtaggcacggcggtgattgccatgttcttctggctacttcttgtcatcatcctacggaccgttaagcgggccaatggaggggaactgaagacaggctacttgtccatcgtcatggatccagatgaactcccattggatgaacattgtgaacgactgccttatgatgccagcaaatgggaattccccagagaccggctgaagctaggtaagcctcttggccgtggtgcctttggccaagtgattgaagcagatgcctttggaattgacaagacagcaacttgcaggacagtagcagtcaaaatgttgaaagaaggagcaacacacagtgagcatcgagctctcatgtctgaactcaagatcctcattcatattggtcaccatctcaatgtggtcaaccttctaggtgcctgtaccaagccaggagggccactcatggtgattgtggaattctgcaaatttggaaacctgtccacttacctgaggagcaagagaaatgaatttgtcccctacaagaccaaaggggcacgattccgtcaagggaaagactacgttggagcaatccctgtggatctgaaacggcgcttggacagcatcaccagtagccagagctcagccagctctggatttgtggaggagaagtccctcagtgatgtagaagaagaggaagctcctgaagatctgtataaggacttcctgaccttggagcatctcatctgttacagcttccaagtggctaagggcatggagttcttggcatcgcgaaagtgtatccacagggacctggcggcacgaaatatcctcttatcggagaagaacgtggttaaaatctgtgactttggcttggcccgggatatttataaagatccagattatgtcagaaaaggagatgctcgcctccctttgaaatggatggccccagaaacaatttttgacagagtgtacacaatccagagtgacgtctggtcttttggtgttttgctgtgggaaatattttccttaggtgcttctccatatcctggggtaaagattgatgaagaattttgtaggcgattgaaagaaggaactagaatgagggcccctgattatactacaccagaaatgtaccagaccatgctggactgctggcacggggagcccagtcagagacccacgttttcagagttggtggaacatttgggaaatctcttgcaagctaatgctcagcaggatggcaaagactacattgttcttccgatatcagagactttgagcatggaagaggattctggactctctctgcctacctcacctgtttcctgtatggaggaggaggaagtatgtgaccccaaattccattatgacaacacagcaggaatcagtcagtatctgcagaacagtaagcgaaagagccggcctgtgagtgtaaaaacatttgaagatatcccgttagaagaaccagaagtaaaagtaatcccagatgacaaccagacggacagtggtatggttcttgcctcagaagagctgaaaactttggaagacagaaccaaattatctccatcttttggtggaatggtgcccagcaaaagcagggagtctgtggcatctgaaggctcaaaccagacaagcggctaccagtccggatatcactccgatgacacagacaccaccgtgtactccagtgaggaagcagaacttttaaagctgatagagattggagtgcaaaccggtagcacagcccagattctccagcctgactcggggaccacactgagctctcctcctgtttaaaaggaagcatccacaccccaactcccggacatcacatgagaggtgctgctcagattttcaagtgttgttctttccaccagcaggaagtagccgcatttgattttcatttcgacaacagaaaaaggacctcggactgcagggagccagtcttctaggcatatcctggaagaggcttgtgacccaagaatgtgtctgtgtcttctcccagtgttgacctgatcctcttttttcattcatttaaaaagcatttatcatgcccctgctgcgggtctcaccatgggtttagaacaaagacgttcaagaaatggccccatcctcaaagaagtagcagtacctggggagctgacacttctgtaaaactagaagataaaccaggcaacgtaagtgttcgaggtgttgaagatgggaaggatttgcagggctgagtctatccaagaggctttgtttaggacgtgggtcccaagccaagccttaagtgtggaattcggattgatagaaaggaagactaacgttaccttgctttggagagtactggagcctgcaaatgcattgtgtttgctctggtggaggtgggcatggggtctgttctgaaatgtaaagggttcagacggggtttctggttttagaaggttgcgtgttcttcgagttgggctaaagtagagttcgttgtgctgtttctgactcctaatgagagttccttccagaccgttagctgtctccttgccaagccccaggaagaaaatgatgcagctctggctccttgtctcccaggctgatcctttattcagaataccacaaagaaaggacattcagctcaaggctccctgccgtgttgaagagttctgactgcacaaaccagcttctggtttcttctggaatgaataccctcatatctgtcctgatgtgatatgtctgagactgaatgcgggaggttcaatgtgaagctgtgtgtggtgtcaaagtttcaggaaggattttacccttttgttcttccccctgtccccaacccactctcaccccgcaacccatcagtattttagttatttggcctctactccagtaaacctgattgggtttgttcactctctgaatgattattagccagacttcaaaattattttatagcccaaattataacatctattgtattatttagacttttaacatatagagctatttctactgatttttgcccttgttctgtcctttttttcaaaaaagaaaatgtgttttttgtttggtaccatagtgtgaaatgctgggaacaatgactataagacatgctatggcacatatatttatagtctgtttatgtagaaacaaatgtaatatattaaagccttatatataatgaactttgtactattcacattttgtatcagtattatgtagcataacaaaggtcataatgctttcagcaattgatgtcattttattaaagaacattgaaaaacttga

SEQ ID NO: 63735 - DNA, 1799 bp, Homo sapiens
agtaaatccggaaagtcgtagtagtccagagtgacaaccagacggacagtggtatggttcttgcctcagaagagctgaaaactttggaagacagaaccaaattatctccatcttttggtggaatggtgcccagcaaaagcagggagtctgtggcatctgaaggctcaaaccagacaagcggctaccagtccggatatcactccgatgacacagacaccaccgtgtactccagtgaggaagcagaacttttaaagctgatagagattggagtgcaaaccggtagcacagcccagattctccagcctgactcggggaccacactgagctctcctcctgtttaaaaggaagcatccacaccccaactcccggacatcacatgagaggtgctgctcagattttcaagtgttgttctttccaccagcaggaagtagccgcatttgattttcatttcgacaacagaaaaaggacctcggactgcagggagccagtcttctaggcatatcctggaagaggcttgtgacccaagaatgtgtctgtgtcttctcccagtgttgacctgatcctcttttttcattcatttaaaaagcatttatcatgcccctgctgcgggtctcaccatgggtttagaacaaagacgttcaagaaatggccccatcctcaaagaagtagcagtacctggggagctgacacttctgtaaaactagaagataaaccaggcaacgtaagtgttcgaggtgttgaagatgggaaggatttgcagggctgagtctatccaagaggctttgtttaggacgtgggtcccaagccaagccttaagtgtggaattcggattgatagaaaggaagactaacgttaccttgctttggagagtactggagcctgcaaatgcattgtgtttgctctggtggaggtgggcatggggtctgttctgaaatgtaaagggttcagacggggtttctggttttagaaggttgcgtgttcttcgagttgggctaaagtagagttcgttgtgctgtttctgactcctaatgagagttccttccagaccgttagctgtctccttgccaagccccaggaagaaaatgatgcagctctggctccttgtctcccaggctgatcctttattcagaataccacaaagaaaggacattcagctcaaggctccctgccgtgttgaagagttctgactgcacaaaccagcttctggtttcttctggaatgaataccctcatatctgtcctgatgtgatatgtctgagactgaatgcgggaggttcaatgtgaagctgtgtgtggtgtcaaagtttcaggaaggattttacccttttgttcttccccctgtccccaacccactctcaccccgcaacccatcagtattttagttatttggcctctactccagtaaacctgattgggtttgttcactctctgaatgattattagccagacttcaaaattattttatagcccaaattataacatctattgtattatttagacttttaacatatagagctatttctactgatttttgcccttgttctgtcctttttttcaaaaaagaaaatgtgttttttgtttggtaccatagtgtgaaatgctgggaacaatgactataagacatgctatggcacatatatttatagtctgtttatgtagaaacaaatgtaatatattaaagccttatatataatgaactttgtactattcacattttgtatcagtattatgtagcataacaaaggtcataatgctttcagcaattgatgtcattttattaaagaacattgaaaaacttga

SEQ ID NO: 63736 - DNA, 258 bp, Homo sapiens
attcttcaaagctgactgacaattcaaaagttgtttttcccatcttcagtcccaccccagattggtgagaaatctctaatctctcctgtggattcctaccagtacggcaccactcaaacgctgacatgtacggtctatgccattcctcccccgcatcacatccactggtattggcagttggaggaagagtgcgccaacgagcccaggtgagtaaggccacatgctctttgctttcctgccatcttgcatttcttacag

SEQ ID NO: 63737 - DNA, 477 bp, Homo sapiens
ttcagagcattgcttgctatcaattatttcaattatgactattttatggaaacttcagcaatttgctaaagctggccctactggcctagggctactgaccactgaaagtttactacttttctgtccactgggttacaacatctttgagatctgtgaaggtagtgctttgtaaacctctgttggccattttcctgggagctaccaagtattggtgaggcctgcagggaaaaacaatgtggcatgttttaaagttgcattactttaaaaaataaatctgtgcaaagttataggcttatttgctctctcatgttctgttttttcaatttacttgctctagggtataggatttatgatgtggttctgagtccgtctcatggaattgaactatctgttggagaaaagcttgtcttaaattgtacagcaagaactgaactaaatgtggggattgacttcaactgggaatacccttcttcgaag

SEQ ID NO: 63738 - DNA, 5666 bp, Homo sapiens
gcactgagtcccgggaccccgggagagcggtcagtgtgtggtcgctgcgtttcctctgcctgcgccgggcatcacttgcgcgccgcagaaagtccgtctggcagcctggatatcctctcctaccggcacccgcagacgcccctgcagccgccggtcggcgcccgggctccctagccctgtgcgctcaactgtcctgcgctgcggggtgccgcgagttccacctccgcgcctccttctctagacaggcgctgggagaaagaaccggctcccgagttctgggcatttcgcccggctcgaggtgcaggatgcagagcaaggtgctgctggccgtcgccctgtggctctgcgtggagacccgggccgcctctgtgggtttgcctagtgtttctcttgatctgcccaggctcagcatacaaaaagacatacttacaattaaggctaatacaactcttcaaattacttgcaggggacagagggacttggactggctttggcccaataatcagagtggcagtgagcaaagggtggaggtgactgagtgcagcgatggcctcttctgtaagacactcacaattccaaaagtgatcggaaatgacactggagcctacaagtgcttctaccgggaaactgacttggcctcggtcatttatgtctatgttcaagattacagatctccatttattgcttctgttagtgaccaacatggagtcgtgtacattactgagaacaaaaacaaaactgtggtgattccatgtctcgggtccatttcaaatctcaacgtgtcactttgtgcaagatacccagaaaagagatttgttcctgatggtaacagaatttcctgggacagcaagaagggctttactattcccagctacatgatcagctatgctggcatggtcttctgtgaagcaaaaattaatgatgaaagttaccagtctattatgtacatagttgtcgttgtagggtataggatttatgatgtggttctgagtccgtctcatggaattgaactatctgttggagaaaagcttgtcttaaattgtacagcaagaactgaactaaatgtggggattgacttcaactgggaatacccttcttcgaagcatcagcataagaaacttgtaaaccgagacctaaaaacccagtctgggagtgagatgaagaaatttttgagcaccttaactatagatggtgtaacccggagtgaccaaggattgtacacctgtgcagcatccagtgggctgatgaccaagaagaacagcacatttgtcagggtccatgaaaaaccttttgttgcttttggaagtggcatggaatctctggtggaagccacggtgggggagcgtgtcagaatccctgcgaagtaccttggttacccacccccagaaataaaatggtataaaaatggaataccccttgagtccaatcacacaattaaagcggggcatgtactgacgattatggaagtgagtgaaagagacacaggaaattacactgtcatccttaccaatcccatttcaaaggagaagcagagccatgtggtctctctggttgtgtatgtcccaccccagattggtgagaaatctctaatctctcctgtggattcctaccagtacggcaccactcaaacgctgacatgtacggtctatgccattcctcccccgcatcacatccactggtattggcagttggaggaagagtgcgccaacgagcccagccaagctgtctcagtgacaaacccatacccttgtgaagaatggagaagtgtggaggacttccagggaggaaataaaattgaagttaataaaaatcaatttgctctaattgaaggaaaaaacaaaactgtaagtacccttgttatccaagcggcaaatgtgtcagctttgtacaaatgtgaagcggtcaacaaagtcgggagaggagagagggtgatctccttccacgtgaccaggggtcctgaaattactttgcaacctgacatgcagcccactgagcaggagagcgtgtctttgtggtgcactgcagacagatctacgtttgagaacctcacatggtacaagcttggcccacagcctctgccaatccatgtgggagagttgcccacacctgtttgcaagaacttggatactctttggaaattgaatgccaccatgttctctaatagcacaaatgacattttgatcatggagcttaagaatgcatccttgcaggaccaaggagactatgtctgccttgctcaagacaggaagaccaagaaaagacattgcgtggtcaggcagctcacagtcctagagcgtgtggcacccacgatcacaggaaacctggagaatcagacgacaagtattggggaaagcatcgaagtctcatgcacggcatctgggaatccccctccacagatcatgtggtttaaagataatgagacccttgtagaagactcaggcattgtattgaaggatgggaaccggaacctcactatccgcagagtgaggaaggaggacgaaggcctctacacctgccaggcatgcagtgttcttggctgtgcaaaagtggaggcatttttcataatagaaggtgcccaggaaaagacgaacttggaaatcattattctagtaggcacggcggtgattgccatgttcttctggctacttcttgtcatcatcctacggaccgttaagcgggccaatggaggggaactgaagacaggctacttgtccatcgtcatggatccagatgaactcccattggatgaacattgtgaacgactgccttatgatgccagcaaatgggaattccccagagaccggctgaagctaggtaagcctcttggccgtggtgcctttggccaagtgattgaagcagatgcctttggaattgacaagacagcaacttgcaggacagtagcagtcaaaatgttgaaagaaggagcaacacacagtgagcatcgagctctcatgtctgaactcaagatcctcattcatattggtcaccatctcaatgtggtcaaccttctaggtgcctgtaccaagccaggagggccactcatggtgattgtggaattctgcaaatttggaaacctgtccacttacctgaggagcaagagaaatgaatttgtcccctacaagaccaaaggggcacgattccgtcaagggaaagactacgttggagcaatccctgtggatctgaaacggcgcttggacagcatcaccagtagccagagctcagccagctctggatttgtggaggagaagtccctcagtgatgtagaagaagaggaagctcctgaagatctgtataaggacttcctgaccttggagcatctcatctgttacagcttccaagtggctaagggcatggagttcttggcatcgcgaaagtgtatccacagggacctggcggcacgaaatatcctcttatcggagaagaacgtggttaaaatctgtgactttggcttggcccgggatatttataaagatccagattatgtcagaaaaggagatgctcgcctccctttgaaatggatggccccagaaacaatttttgacagagtgtacacaatccagagtgacgtctggtcttttggtgttttgctgtgggaaatattttccttaggtgcttctccatatcctggggtaaagattgatgaagaattttgtaggcgattgaaagaaggaactagaatgagggcccctgattatactacaccagaaatgtaccagaccatgctggactgctggcacggggagcccagtcagagacccacgttttcagagttggtggaacatttgggaaatctcttgcaagctaatgctcagcaggatggcaaagactacattgttcttccgatatcagagactttgagcatggaagaggattctggactctctctgcctacctcacctgtttcctgtatggaggaggaggaagtatgtgaccccaaattccattatgacaacacagcaggaatcagtcagtatctgcagaacagtaagcgaaagagccggcctgtgagtgtaaaaacatttgaagatatcccgttagaagaaccagaagtaaaagtaatcccagatgacaaccagacggacagtggtatggttcttgcctcagaagagctgaaaactttggaagacagaaccaaattatctccatcttttggtggaatggtgcccagcaaaagcagggagtctgtggcatctgaaggctcaaaccagacaagcggctaccagtccggatatcactccgatgacacagacaccaccgtgtactccagtgaggaagcagaacttttaaagctgatagagattggagtgcaaaccggtagcacagcccagattctccagcctgactcggggaccacactgagctctcctcctgtttaaaaggaagcatccacaccccaactcccggacatcacatgagaggtgctgctcagattttcaagtgttgttctttccaccagcaggaagtagccgcatttgattttcatttcgacaacagaacaaagacgttcaagaaatggccccatcctcaaagaagtagcagtacctggggagctgacacttctgtaaaactagaagataaaccaggcaacgtaagtgttcgaggtgttgaagatgggaaggatttgcagggctgagtctatccaagaggctttgtttaggacgtgggtcccaagccaagccttaagtgtggaattcggattgatagaaaggaagactaacgttaccttgctttggagagtactggagcctgcaaatgcattgtgtttgctctggtggaggtgggcatggggtctgttctgaaatgtaaagggttcagacggggtttctggttttagaaggttgcgtgttcttcgagttgggctaaagtagagttcgttgtgctgtttctgactcctaatgagagttccttccagaccgttagctgtctccttgccaagccccaggaagaaaatgatgcagctctggctccttgtctcccaggctgatcctttattcagaataccacaaagaaaggacattcagctcaaggctccctgccgtgttgaagagttctgactgcacaaaccagcttctggtttcttctggaatgaataccctcatatctgtcctgatgtgatatgtctgagactgaatgcgggaggttcaatgtgaagctgtgtgtggtgtcaaagtttcaggaaggattttacccttttgttcttccccctgtccccaacccactctcaccccgcaacccatcagtattttagttatttggcctctactccagtaaacctgattgggtttgttcactctctgaatgattattagccagacttcaaaattattttatagcccaaattataacatctattgtattatttagacttttaacatatagagctatttctactgatttttgcccttgttctgtcctttttttcaaaaaagaaaatgtgttttttgtttggtaccatagtgtgaaatgctgggaacaatgactataagacatgctatggcacatatatttatagtctgtttatgtagaaacaaatgtaatatattaaagccttatatataatgaactttgtactattcacattttgtatcagtattatgtagcataacaaaggtcataatgctttcagcaattgatgtcattttattaaagaacattgaaaaacttga

SEQ ID NO: 63739 - DNA, 314 bp, Homo sapiens
tgtgttaaatttgctttttacataatttttcctaggctcagttgtgtaaccttccacaaagtagtctacagaataaaactaaattacttcctagtattgaggaggcatggagcctaccaatccccgcagagcttacctccaggcagggtgccatgaacacagcacagcaggtgagaagttgggttatgttctgtaggtgcccagctttaagggtttttttttttcactcttcagtaatcaagtttatttcactaaacaaaggattgactttaaaatagagaaatctttttaattaaaaaataaaaattttttaa

SEQ ID NO: 63740 - DNA, 5217 bp, Homo sapiens
  misc_feature (4032)..(4032): n is a, c, g, or t
  misc_feature (4083)..(4083): n is a, c, g, or t
  misc_feature (4101)..(4101): n is a, c, g, or t
  misc_feature (4160)..(4160): n is a, c, g, or t
  misc_feature (4180)..(4180): n is a, c, g, or t
  misc_feature (4821)..(4821): n is a, c, g, or t
agagttatattgtgccatttatggaaaaactctccccactgctcttggctttgacagtaggaatcaggttatatatggtctctcggtttgaagatatttgtcattaaaaaccagaacaagggctctgagatagggtcctttcctgacctactctggtaaagtctttatcctcaggatgcaaggataccaccctcttcctgtggaaagtgtcgaatcacatgcagagctctaagtctttcagttactttggagtgcagaaccatttcagacatgctgagggggactctactgtgcgcggtgctcgggcttctgcgcgcccagcccttcccctgtccgccagcttgcaagtgtgtcttccgggacgccgcgcagtgctcggggggcgacgtggcgcgcatctccgcgctgggcctgcccaccaacctcacgcacatcctgctcttcggaatgggccgcggcgtcctgcagagccagagcttcagcggcatgaccgtcctgcagcgcctcatgatctccgacagccacatttccgccgttgcccccggcaccttcagtgacctgataaaactgaaaaccctgaggctgtcgcgcaacaaaatcacgcatcttccaggtgcgctgctggataagatggtgctcctggagcagttgtttttggaccacaatgcgctaaggggcattgaccaaaacatgtttcagaaactggttaacctgcaggagctcgctctgaaccagaatcagctcgatttccttcctgccagtctcttcacgaatctggagaacctgaagttgttggatttatcgggaaacaacctgacccacctgcccaaggggttgcttggagcacaggctaagctcgagagacttctgctccactcgaaccgccttgtgtctctggattcggggctgttgaacagcctgggcgccctgacggagctgcagttccaccgaaatcacatccgttccatcgcacccggggccttcgaccggctcccaaacctcagttctttgacgctttcgagaaaccaccttgcgtttctcccctctgcgctctttcttcattcgcacaatctgactctgttgactctgttcgagaacccgctggcagagctcccgggggtgctcttcggggagatggggggcctgcaggagctgtggctgaaccgcacccagctgcgcaccctgcccgccgccgccttccgcaacctgagccgcctgcggtacttaggggtgactctgagcccgcggctgagcgcgcttccgcagggcgccttccagggccttggcgagctccaggtgctcgccctgcactccaacggcctgaccgccctccccgacggcttgctgcgcggcctcggcaagctgcgccaggtgtccctgcgccgcaacaggctgcgcgccctgccccgtgccctcttccgcaatctcagcagcctggagagcgtccagctcgaccacaaccagctggagaccctgcctggcgacgtgtttggggctctgccccggctgacggaggtcctgttggggcacaactcctggcgctgcgactgtggcctggggcccttcctggggtggctgcggcagcacctaggcctcgtgggcggggaagagcccccacggtgcgcaggccctggggcgcacgccggcctgccgctctgggccctgccggggggtgacgcggagtgcccgggcccccggggcccgcctccccgccccgctgcggacagctcctcggaagcccctgtccacccagccttggctcccaacagctcagaaccctgggtgtgggcccagccggtgaccacgggcaaaggtcaagatcatagtccgttctgggggttttattttctgcttttagctgttcaggccatgatcaccgtgatcatcgtgtttgctatgattaaaattggccaactctttcgaaaattaatcagagagagagcccttgggtaaaccaatgggaaaatcttctaattacttagaacctgaccagatgtggctcggaggggaatccagacccgctgctgtcttgctctccctcccctccccactcctcctctcttcttcctcttctctctcactgccacgccttcctttccctcctcctccccctctccgctctgtgctcttcattctcacaggcccgcaacccctcctctctgtgtcccccgcccgttcctggaaactgagcttgacgtttgtaaactgtggttgcctgccttccccagctcccacgcgggtgtgcgctgacactgccgggggcgctggactgtgttggacccatccgtgctccgctgtgcctggcttggcgtctggtggagagaggggcctcttcagtgtctactgagtaaggggacagctccaggccggggcctgtctcctgcacagagtaagccggtaaatgtttgtgaaatcaatgcgtggataaaggaacacatgccatccaagtgatgatggcttttcctggagggaaaggataggctgttgctctatctaattttttgtttttgtttttggacagtctagctctgtggcccaggctggcgtgcagtgggccgtctcagttcactgcagcctccgcctcccaggttcaagtgattctcatgcctcagcgttctgagtagctgggattagaggcgtgtgccactacacccggctaatttttgtactttttaaagtagagacggggctttgccatattggcctggctgatctcaaactcctggtcttgaactcctggccacaagtgatctgcccgccttggcctcccaaagtgctgggattacaggcgtaagccactacacctggccctcttcatcgaattttatttgagaagtagagctcttgccattttttcccttgctccatttttctcactttatgtctctctgacctatgggctacttgggagagcactggactccattcatgcatgagcattttcaggataagcgacttctgtgaggctgagagaggaagaaaacacggagccttccctccaggtgcccagtgtaggtccagcgtgtttcctgagcctcctgtgagtttccacttgctttacatccatgcaacatgtcattttgaaactggattgatttgcatttcctggaactctgccacctcatttcacaagcatttatggagcagttaacatgtgactggtattcatgaatataatgataagcttgattctagttcagctgctgtcacagtctcatttgttcttccaactgaaagccgtaaaacctttgttgctttaattgaatgtctgtgcttatgagaggcagtggttaaaacaggggctggcgagttgacaactgtgggttcaaatcccagctctaccacttactaactgcatgggactttgggtaagacacctgcttacattctctaagccttggtttcctgaaccttaaaacaggataacatagtacctgcttcgtagagtttttgtgagaattaaaggcaataaagcatataatgacttagcccagcggcctgcaggcaatacatgttaatgaatgttagctattattactaaaggatgagcaattattattggcatcatgatttctaaagaagagctttgagttggtatttttctctgtgtataagggtaagtccgaactttctcagactggaggttacattcacatcagtctgtcttcccctgcggatggcctcagccctgggtggccagactctgtgctcacaatccagagcaatggatcctccaacaccaccaggtggatgtggagcaggagagctggatcgtggcatttgtttctgggttctgcagttgggagttggtttctgggttctccattggtctacttgtctagtcccataccagactcacggtctccattattggagctttaataatttttggtatagggtcatctctccaccttgtttttcttctattcttggttctttgcaattctatgaatatttcagggtcagcatgtcaactccattgaaaaaccctgctgggattttaatagaacttacagctcacgcctgtaatcncagcactttgggaggctgaggtgggtggatcacaggtcaggagtttgagancagctggccaagatggtnaaaccccgtctctactaaaaatacaaaaattagctgggtgcggtggcaggtgcctgtantcccagctacttgggacacngaggcaggagaatcacttgaacccgggaggcggaggttgcagtgagccgagatcgtgccactgcactctagcctgggcgacagagcgagactccatctcaaaaaaaaaaaaaaaaaattgcagtaaatttaaaactaatttggggaagaatctgtatttttacaatacctagtgttcttgccagtaagcatggttcatcttcccatttatttacgtcattttaaatctttcagtgatgttttagaattttttttataaaaaccttcactataagaacagaaaaccaaacaccgcatgttctcactcataggtgggaattgaacaatgagaacacttggacacagggcggggaacgtcacacgcctggactgtcggggggtggggggctgggagagggatagtgttaggagaaatacctaatgtaaatgacgagttaatgggtgcagccaaccaacctggcacatgtattcatatgtaacaaacctgcacgttgtgcacatgtaccctagaacttaaagtatataaaaaaaagaaaccttgcactgattttgttagatttattcctaggtatccttcctcttttttgatttgtcattgctattgtagatggcatctttttaaaaagttatattttctaaagnaaaaaataaaaaaagttgtatttctaatttttattaccaatatataagaatgtaatttatttttacataattatcttatgtctagtaataattctgataatttgcttcttcctattaaaaccttacacccattattgatttatttttctgttttaaaatatcttcctgcactggctaaaacctccactataatgttgagcagaacagtgagcatccttagaactatcttggttgcaaagggtaggtctctaatgtttcatcaataaatgtgatgtttctagtctgagtttgctaagtatattttaaaataatcagtaaagttagattttatccatttttatcttaactattgagatgctcatatcatttttcttcttcaatgtgttaaaatggtga

SEQ ID NO: 63741 - DNA, 5019 bp, Homo sapiens
  misc_feature (3834)..(3834): n is a, c, g, or t
  misc_feature (3885)..(3885): n is a, c, g, or t
  misc_feature (3903)..(3903): n is a, c, g, or t
  misc_feature (3962)..(3962): n is a, c, g, or t
  misc_feature (3982)..(3982): n is a, c, g, or t
  misc_feature (4623)..(4623): n is a, c, g, or t
ggatcccagggttcagtacaggcgcgaacgctcctgtgtgttgaccacactcccacggttgctttttcagacatgctgagggggactctactgtgcgcggtgctcgggcttctgcgcgcccagcccttcccctgtccgccagcttgcaagtgtgtcttccgggacgccgcgcagtgctcggggggcgacgtggcgcgcatctccgcgctgggcctgcccaccaacctcacgcacatcctgctcttcggaatgggccgcggcgtcctgcagagccagagcttcagcggcatgaccgtcctgcagcgcctcatgatctccgacagccacatttccgccgttgcccccggcaccttcagtgacctgataaaactgaaaaccctgaggctgtcgcgcaacaaaatcacgcatcttccaggtgcgctgctggataagatggtgctcctggagcagttgtttttggaccacaatgcgctaaggggcattgaccaaaacatgtttcagaaactggttaacctgcaggagctcgctctgaaccagaatcagctcgatttccttcctgccagtctcttcacgaatctggagaacctgaagttgttggatttatcgggaaacaacctgacccacctgcccaaggggttgcttggagcacaggctaagctcgagagacttctgctccactcgaaccgccttgtgtctctggattcggggctgttgaacagcctgggcgccctgacggagctgcagttccaccgaaatcacatccgttccatcgcacccggggccttcgaccggctcccaaacctcagttctttgacgctttcgagaaaccaccttgcgtttctcccctctgcgctctttcttcattcgcacaatctgactctgttgactctgttcgagaacccgctggcagagctcccgggggtgctcttcggggagatggggggcctgcaggagctgtggctgaaccgcacccagctgcgcaccctgcccgccgccgccttccgcaacctgagccgcctgcggtacttaggggtgactctgagcccgcggctgagcgcgcttccgcagggcgccttccagggccttggcgagctccaggtgctcgccctgcactccaacggcctgaccgccctccccgacggcttgctgcgcggcctcggcaagctgcgccaggtgtccctgcgccgcaacaggctgcgcgccctgccccgtgccctcttccgcaatctcagcagcctggagagcgtccagctcgaccacaaccagctggagaccctgcctggcgacgtgtttggggctctgccccggctgacggaggtcctgttggggcacaactcctggcgctgcgactgtggcctggggcccttcctggggtggctgcggcagcacctaggcctcgtgggcggggaagagcccccacggtgcgcaggccctggggcgcacgccggcctgccgctctgggccctgccggggggtgacgcggagtgcccgggcccccggggcccgcctccccgccccgctgcggacagctcctcggaagcccctgtccacccagccttggctcccaacagctcagaaccctgggtgtgggcccagccggtgaccacgggcaaaggtcaagatcatagtccgttctgggggttttattttctgcttttagctgttcaggccatgatcaccgtgatcatcgtgtttgctatgattaaaattggccaactctttcgaaaattaatcagagagagagcccttgggtaaaccaatgggaaaatcttctaattacttagaacctgaccagatgtggctcggaggggaatccagacccgctgctgtcttgctctccctcccctccccactcctcctctcttcttcctcttctctctcactgccacgccttcctttccctcctcctccccctctccgctctgtgctcttcattctcacaggcccgcaacccctcctctctgtgtcccccgcccgttcctggaaactgagcttgacgtttgtaaactgtggttgcctgccttccccagctcccacgcgggtgtgcgctgacactgccgggggcgctggactgtgttggacccatccgtgctccgctgtgcctggcttggcgtctggtggagagaggggcctcttcagtgtctactgagtaaggggacagctccaggccggggcctgtctcctgcacagagtaagccggtaaatgtttgtgaaatcaatgcgtggataaaggaacacatgccatccaagtgatgatggcttttcctggagggaaaggataggctgttgctctatctaattttttgtttttgtttttggacagtctagctctgtggcccaggctggcgtgcagtgggccgtctcagttcactgcagcctccgcctcccaggttcaagtgattctcatgcctcagcgttctgagtagctgggattagaggcgtgtgccactacacccggctaatttttgtactttttaaagtagagacggggctttgccatattggcctggctgatctcaaactcctggtcttgaactcctggccacaagtgatctgcccgccttggcctcccaaagtgctgggattacaggcgtaagccactacacctggccctcttcatcgaattttatttgagaagtagagctcttgccattttttcccttgctccatttttctcactttatgtctctctgacctatgggctacttgggagagcactggactccattcatgcatgagcattttcaggataagcgacttctgtgaggctgagagaggaagaaaacacggagccttccctccaggtgcccagtgtaggtccagcgtgtttcctgagcctcctgtgagtttccacttgctttacatccatgcaacatgtcattttgaaactggattgatttgcatttcctggaactctgccacctcatttcacaagcatttatggagcagttaacatgtgactggtattcatgaatataatgataagcttgattctagttcagctgctgtcacagtctcatttgttcttccaactgaaagccgtaaaacctttgttgctttaattgaatgtctgtgcttatgagaggcagtggttaaaacaggggctggcgagttgacaactgtgggttcaaatcccagctctaccacttactaactgcatgggactttgggtaagacacctgcttacattctctaagccttggtttcctgaaccttaaaacaggataacatagtacctgcttcgtagagtttttgtgagaattaaaggcaataaagcatataatgacttagcccagcggcctgcaggcaatacatgttaatgaatgttagctattattactaaaggatgagcaattattattggcatcatgatttctaaagaagagctttgagttggtatttttctctgtgtataagggtaagtccgaactttctcagactggaggttacattcacatcagtctgtcttcccctgcggatggcctcagccctgggtggccagactctgtgctcacaatccagagcaatggatcctccaacaccaccaggtggatgtggagcaggagagctggatcgtggcatttgtttctgggttctgcagttgggagttggtttctgggttctccattggtctacttgtctagtcccataccagactcacggtctccattattggagctttaataatttttggtatagggtcatctctccaccttgtttttcttctattcttggttctttgcaattctatgaatatttcagggtcagcatgtcaactccattgaaaaaccctgctgggattttaatagaacttacagctcacgcctgtaatcncagcactttgggaggctgaggtgggtggatcacaggtcaggagtttgagancagctggccaagatggtnaaaccccgtctctactaaaaatacaaaaattagctgggtgcggtggcaggtgcctgtantcccagctacttgggacacngaggcaggagaatcacttgaacccgggaggcggaggttgcagtgagccgagatcgtgccactgcactctagcctgggcgacagagcgagactccatctcaaaaaaaaaaaaaaaaaattgcagtaaatttaaaactaatttggggaagaatctgtatttttacaatacctagtgttcttgccagtaagcatggttcatcttcccatttatttacgtcattttaaatctttcagtgatgttttagaattttttttataaaaaccttcactataagaacagaaaaccaaacaccgcatgttctcactcataggtgggaattgaacaatgagaacacttggacacagggcggggaacgtcacacgcctggactgtcggggggtggggggctgggagagggatagtgttaggagaaatacctaatgtaaatgacgagttaatgggtgcagccaaccaacctggcacatgtattcatatgtaacaaacctgcacgttgtgcacatgtaccctagaacttaaagtatataaaaaaaagaaaccttgcactgattttgttagatttattcctaggtatccttcctcttttttgatttgtcattgctattgtagatggcatctttttaaaaagttatattttctaaagnaaaaaataaaaaaagttgtatttctaatttttattaccaatatataagaatgtaatttatttttacataattatcttatgtctagtaataattctgataatttgcttcttcctattaaaaccttacacccattattgatttatttttctgttttaaaatatcttcctgcactggctaaaacctccactataatgttgagcagaacagtgagcatccttagaactatcttggttgcaaagggtaggtctctaatgtttcatcaataaatgtgatgtttctagtctgagtttgctaagtatattttaaaataatcagtaaagttagattttatccatttttatcttaactattgagatgctcatatcatttttcttcttcaatgtgttaaaatggtga

SEQ ID NO: 63742 - DNA, 329 bp, Homo sapiens
  misc_feature (1)..(1): n is a, c, g, or t
nacaatcttggaaacagagttgctgtatgctgaaggtctgagagtagctcttagccttgcctatcttagatagtagttatgctgtgataatttaattgatgtactatgtttgatttgttgctgatactttaaatttgaagtttttctgagaaatggagcagcaatgcagcatcaacttgttaaattacatgttaagccttgaaaaaaaaaggagatcacacctgtaatcccagcacattgggaggccgaggcaggcagatcacgaggtcaggagatcaagaccatcctggctaacatggtgaaaccccgtctctactaaaaatacaaaa

SEQ ID NO: 63743 - DNA, 615 bp, Homo sapiens
tactactactaaattcgcggccgcgtcgccagaagaaccaaagagaagaagatatgggagtgaatttattccaagaatctacaatgacattgaagttgttggaggaatatactgtatttaaaaaacctgtgtcacattcaaaaatttcatctaagctgggcgcagtggcttgttcctgtagtcccagcacttcaggaggctgaggtgggtggattgcttgagcccaggagttggagaccagtctgggaaacatggtgagatgtcatctctctacaaaatacaaaaaaattagccgggcatggtggcgcttgcctatagtctcagctactcgggaggctgaaatgagaggatcacttgagcccggggaggtccaggccgcagtgatccgagatcacaccactgcactccagcctgggtgacagagtgagaccctgtctaaattaaaaaaaaaaaaaaggcaatggctttgtgcttttgaaggtggaatgaaaggtggaatgaagacacatccaccttaaggctttaaaagaccatgaagctgggtgcagtggctcactcctgtaatcctaggatttggggaagccaaggcaggaggattgcttgagcctaggagtt

SEQ ID NO: 63744 - DNA, 392 bp, Homo sapiens
  misc_feature (321)..(321): n is a, c, g, or t
tctttttgtgaactgttcaaatattttgctcctttgaaaatttgggtcatatgtcctcatgtaattgttgtggcattcttttttatattccagacacaagtgttttgtcagaattttatctcatatatataaatgtatgtgtgtgtatatatatatatataattttttttttttgagatggagtctcactctgtccctagggctgcaatggcgtgttcttgggctcactgcaacctctgcctcctggggttcaaggggattctcctgcctcagcctcccgagtagctggggattacagggcgcccaccaccacaccggggntaatttttgtgttttcagtaggagacggggggttttggcccatgttggcccaggggtgggtcttcaaactc

SEQ ID NO: 63745 - DNA, 288 bp, Homo sapiens
gtgagctaagatcacgccactgcactccagcctgggcaacagagcaagactctccccaaaaaaaaaaaaaaaaagtagagaacatttgctggtgattcaagtgatactataggtaaagaaatgaaattctaaattgttagcctaattgcaaagtctatataggaatttgaatgtttgataatataataaaaaattttacctttatattaagatctataaataggttagaataattcttatgctctctaatagaaaaacatttaaataattaataaagtaacatttaaa

SEQ ID NO: 63746 - DNA, 622 bp, Homo sapiens
aggagggagagatggaagctgggggaagatgggagctaggggcagtggctctgacttaacaccagcattggtttcccaatattgaataaagagggctgagctggacagcaggtgtccttaggggcttgacctcaccacccccagacggggcctgtctgcccaatttcaggggcttctcctcaatttcctggcttcagggcgaggctgctcagcccagggacaagaaggaaagatgggtatttgttaaaggcctactccacactgagcagcgctgtttacccatttaatcctcccagcctccttaggggagtgctatgaggacttctcttttatttctctcatctgaagctcagatgagagaggtacccagtcacatgtgtgtcagtggcagagctgggttttgaacccatagccgcctgcctccatgcaaggcctctgacctcccctctgtccaggctgcgtttggagcccaggaacagattccaaggctgggccccgcagggaggaaaaaacaaagcacgagtcgctctctgcacggaggctgagagatggagccaccgctgaggaagaacacacattcatcaggctggtgaccccggtgtaccagcgctttgtggcgtgt

SEQ ID NO: 63747 - DNA, 478 bp, Homo sapiens
cataaagagagtagagaatcaaactatgaagaaggtcaagacagattggcgggctagcaacatctcccttaaacatttaacacaacaaagaacatccaacaaaaatacagtgctatattctttgcaacagatttttgaattcctgtttaaaggggaaaaccatgtttttgatatcaatcataggttttaaggttttaagacatccatcaaaacattggaacatttcagtgaaaaatatgctgcagagagggcacctttagaacattttcagtagtgggatccttttcctgcctggggcttagaaataaaagcactgatcatcaaacaccatacattatatactgaaaaagggggtcactcaaaatttttgtaaatatattatgaaatatattgaacattctaaatagtctaatacagaagcgaatattgaatatatgtgtaatattttttaaagtctttgtatttttccaaaataaaa

SEQ ID NO: 63748 - DNA, 458 bp, Homo sapiens
attttgtggaagggttaatagcttgttggcatgctcttatcatctcccttaaacatttaacacaacaaagaacatccaacaaaaatacagtgctatattctttgcaacagatttttgaattcctgtttaaaggggaaaaccatgtttttgatatcaatcataggttttaaggttttaagacatccatcaaaacattggaacatttcagtgaaaaatatgctgcagagagggcacctttagaacattttcagtagtgggatccttttcctgcctggggcttagaaataaaagcactgatcatcaaacaccatacattatatactgaaaaagggggtcactcaaaatttttgtaaatatattatgaaatatattgaacattctaaatagtctaatacagaagcgaatattgaatatatgtgtaatattttttaaagtctttgtatttttccaaaataaaa

SEQ ID NO: 63749 - DNA, 686 bp, Homo sapiens
caggtatcctacctaggcctagagaactaagcttttgctgttcattatatgaagcttcttaaatgtcatacaggctagttgcatcctactaattcttcacagactagataaaaatacttttgctgaagtcttaatcggcctgtcctgaagtcaaccaggctgtatgttagtgccttgactcagtgcagctttcaagagaggcagaaagaatacccacagagaaggcacatgtgggcggtggcagtgtaggaccaggaaagaagctaggtctctatattccctcgcattttgaatctgtgttaaattcaatcatattagtatgaagcaatcctcttacctatctccttaatccagcctctgactgccagctcacaaaagagggagaagaggcactacatttaaagtagtgattatctctaactagaattttaagtccctacatgttttggctgtagaaccagccaaagttttgttccaattccctacaaaatttcacaatagtcaggagttagaattggtccctatgttatgaaacagctagtttttatactttaaacttaaaatgaagctttagttgtttattattactgtggatattttccaagagacagaataacatctgtggaagattctacacaggccttgatgccagacattgtaattatttccctgctcaaaggcaatag

SEQ ID NO: 63750 - DNA, 471 bp, Homo sapiens
gaactccctccctaagtgatcccagtctttaccatggtgttaaataccatctgtttgtagatgacttccaaatttgtagtttcaatccaaacgtttcctctgatttcctaactagtgtattcaactctgtacttgacatttctatttagatgttttacaggcttctcagacttaacatatcccaaatggaactcttggatcttcccccaaacttgttagtctttcctatcttcaaatggtaatattctgcctttttgctccccaattcccagtccatctgcaagcctgtcattcatatctgctaactataacttgaactatccatccctctccatctctactctccctacatgagttaagccaccatccagtctcacctggactactgcaatcacttccagattattttctctactcctacttacaccttcttccaaactgctctctgtataagtcagttgaaatatttga

SEQ ID NO: 63751 - DNA, 741 bp, Homo sapiens
atggtcacacagcctcatgctccggattgcaccgccctctccctgtgggggtcaatgtggagaccccaaatcccagtggggcaaagaattccttattgagaaggcggtgatctccccagggtttgatgtctttgccaaaaagaaccagggaatcctggagttctatggtgatgacatagctctgctgaagctggcccagaaagtaaagatgtccacccatgccaggcccatctgccttccctgcacgatggaggccaatctggctctgcggagacctcaaggcagcacctgtagggaccatggtcgccttgaatgggagcaaactgaacattaaccttaagatgggagtggagtggacaagctgtgccgaggttgtctcccaagaaaaaaccatgttccccaacttgacagatgtcagggaggtggtgacagaccagttcctatgcagtgggacccaggaggatgagagtccctgcaagggagaatctgggggagcagttttccttgagcggagattcaggttttttcagctgagtaaatccgggtctctaggatgccagaggcagcgcacacaagctgggaaatcctcagggctcctaccagcaggactgcctcgctgccccacctcccgctccttggcctgtccccagattccttccctggttgacttgactcatgcttgtttcactttcacatggaatttcccagttatgaaattaataaaaatcaatggtttccaca

SEQ ID NO: 63752 - DNA, 2962 bp, Homo sapiens
  misc_feature (117)..(118): n is a, c, g, or t
ggaatttcctcagataccgtcgtagtcttaaccataaactatgccgactagggatcgggtggtgtttttttaatgacccactcggcaccttacgagaaatcaaagtctttgggttcnngggggcagtacacaaagcctgtgggggagatctattgaccctatagatatattagcatcagggagacagggcaaaggtttcacccttcagttcagtccccaatccctgcttattatttccctaacagaagaccatcccccttgccactccctggtttttcttctctggcagcaatgaagcagctgctgacccagctctagttttcgggaagtcagatgaccttttccctcccgcggctctctacctctcgccgcccctagggaggacaccatgggcccactgatggttcttttttgcctgctgttcctgtacccaggtctggcagactcggctccctcctgccctcagaacgtgaatatctcgggtggcaccttcaccctcagccatggctgggctcctgggagccttctcacctactcctgcccccagggcctgtacccatccccagcatcacggctgtgcaagagcagcggacagtggcagaccccaggagccacccggtctctgtctaaggcggtctgcaaacctgtgcgctgtccagcccctgtctcctttgagaatggcatttataccccacggctggggtcctatcccgtgggtggcaatgtgagcttcgagtgtgaggatggcttcatattgcggggctcgcctgtgcgtcagtgtcgccccaacggcatgtgggatggagaaacagctgtgtgtgataatggggctggccactgccccaacccaggcatttcactgggcgcagtgcggacaggcttccgctttggtcatggggacaaggtccgctatcgctgctcctcgaatcttgtgctcacggggtcttcggagcgggagtgccagggcaacggggtctggagtggaacggagcccatctgccgccaaccctactcttatgacttccctgaggacgtggcccctgccctgggcacttccttctcccacatgcttggggccaccaatcccacccagaagacaaaggaaagcctgggccgtaaaatccaaatccagcgctctggtcatctgaacctctacctgctcctggactgttcgcagagtgtgtcggaaaatgactttctcatcttcaaggagagcgcctccctcatggtggacaggatcttcagctttgagatcaatgtgagcgttgccattatcacctttgcctcagagcccaaagtcctcatgtctgtcctgaacgacaactcccgggatatgactgaggtgatcagcagcctggaaaatgccaactataaagatcatgaaaatggaactgggactaacacctatgcggccttaaacagtgtctatctcatgatgaacaaccaaatgcgactcctcggcatggaaacgatggcctggcaggaaatccgacatgccatcatccttctgacagatggaaagtccaatatgggtggctctcccaagacagctgttgaccatatcagagagatcctgaacatcaaccagaagaggaatgactatctggacatctatgccatcggggtgggcaagctggatgtggactggagagaactgaatgagctagggtccaagaaggatggtgagaggcatgccttcattctgcaggacacaaaggctctgcaccaggtctttgaacatatgctggatgtctccaagctcacagacaccatctgcggggtggggaacatgtcagcaaacgcctctgaccaggagaggacaccctggcatgtcactattaagcccaagagccaagagacctgccggggggccctcatctccgaccaatgggtcctgacagcagctcattgcttccgcgatggcaacgaccactccctgtggagggtcaatgtgggagaccccaaatcccagtggggcaaagaattccttattgagaaggcggtgatctccccagggtttgatgtctttgccaaaaagaaccagggaatcctggagttctatggtgatgacatagctctgctgaagctggcccagaaagtaaagatgtccacccatgccaggcccatctgccttccctgcacgatggaggccaatctggctctgcggagacctcaaggcagcacctgtagggaccatgagaatgaactgctgaacaaacagagtgttcctgctcattttgtcgccttgaatgggagcaaactgaacattaaccttaagatgggagtggagtggacaagctgtgccgaggttgtctcccaagaaaaaaccatgttccccaacttgacagatgtcagggaggtggtgacagaccagttcctatgcagtgggacccaggaggatgagagtccctgcaagggagaatctgggggagcagttttccttgagcggagattcaggttttttcaggtgggtctggtgagctggggtctttacaacccctgccttggctctgctgacaaaaactcccgcaaaagggcccctcgtagcaaggtcccgccgccacgagactttcacatcaatctcttccgcatgcagccctggctgaggcagcacctgggggatgtcctgaattttttacccctctagccatggccactgagccctctgctgccctgccagaatctgccgcccctccatcttctacctctgaatggccacccttagaccctgtgatccatcctctctcctagctgagtaaatccgggtctctaggatgccagaggcagcgcacacaagctgggaaatcctcagggctcctaccagcaggactgcctcgctgccccacctcccgctccttggcctgtccccagattccttccctggttgacttgactcatgcttgtttcactttcacatggaatttcccagttatgaaattaataaaaatcaatggtttccaca

SEQ ID NO: 63753 - DNA, 2566 bp, Homo sapiens
  misc_feature (117)..(118): n is a, c, g, or t
ggaatttcctcagataccgtcgtagtcttaaccataaactatgccgactagggatcgggtggtgtttttttaatgacccactcggcaccttacgagaaatcaaagtctttgggttcnngggggcagtacacaaagcctgtgggggagatctattgaccctatagatatattagcatcagggagacagggcaaaggtttcacccttcagttcagtccccaatccctgcttattatttccctaacagaagaccatcccccttgccactccctggtttttcttctctggcagcaatgaagcagctgctgacccagctctagttttcgggaagtcagatgaccttttccctcccgcggctctctacctctcgccgcccctagggaggacaccatgggcccactgatggttcttttttgcctgctgttcctgtacccagctggccactgccccaacccaggcatttcactgggcgcagtgcggacaggcttccgctttggtcatggggacaaggtccgctatcgctgctcctcgaatcttgtgctcacggggtcttcggagcgggagtgccagggcaacggggtctggagtggaacggagcccatctgccgccaaccctactcttatgacttccctgaggacgtggcccctgccctgggcacttccttctcccacatgcttggggccaccaatcccacccagaagacaaaggaaagcctgggccgtaaaatccaaatccagcgctctggtcatctgaacctctacctgctcctggactgttcgcagagtgtgtcggaaaatgactttctcatcttcaaggagagcgcctccctcatggtggacaggatcttcagctttgagatcaatgtgagcgttgccattatcacctttgcctcagagcccaaagtcctcatgtctgtcctgaacgacaactcccgggatatgactgaggtgatcagcagcctggaaaatgccaactataaagatcatgaaaatggaactgggactaacacctatgcggccttaaacagtgtctatctcatgatgaacaaccaaatgcgactcctcggcatggaaacgatggcctggcaggaaatccgacatgccatcatccttctgacagatggaaagtccaatatgggtggctctcccaagacagctgttgaccatatcagagagatcctgaacatcaaccagaagaggaatgactatctggacatctatgccatcggggtgggcaagctggatgtggactggagagaactgaatgagctagggtccaagaaggatggtgagaggcatgccttcattctgcaggacacaaaggctctgcaccaggtctttgaacatatgctggatgtctccaagctcacagacaccatctgcggggtggggaacatgtcagcaaacgcctctgaccaggagaggacaccctggcatgtcactattaagcccaagagccaagagacctgccggggggccctcatctccgaccaatgggtcctgacagcagctcattgcttccgcgatggcaacgaccactccctgtggagggtcaatgtgggagaccccaaatcccagtggggcaaagaattccttattgagaaggcggtgatctccccagggtttgatgtctttgccaaaaagaaccagggaatcctggagttctatggtgatgacatagctctgctgaagctggcccagaaagtaaagatgtccacccatgccaggcccatctgccttccctgcacgatggaggccaatctggctctgcggagacctcaaggcagcacctgtagggaccatgagaatgaactgctgaacaaacagagtgttcctgctcattttgtcgccttgaatgggagcaaactgaacattaaccttaagatgggagtggagtggacaagctgtgccgaggttgtctcccaagaaaaaaccatgttccccaacttgacagatgtcagggaggtggtgacagaccagttcctatgcagtgggacccaggaggatgagagtccctgcaagggagaatctgggggagcagttttccttgagcggagattcaggttttttcaggtgggtctggtgagctggggtctttacaacccctgccttggctctgctgacaaaaactcccgcaaaagggcccctcgtagcaaggtcccgccgccacgagactttcacatcaatctcttccgcatgcagccctggctgaggcagcacctgggggatgtcctgaattttttacccctctagccatggccactgagccctctgctgccctgccagaatctgccgcccctccatcttctacctctgaatggccacccttagaccctgtgatccatcctctctcctagctgagtaaatccgggtctctaggatgccagaggcagcgcacacaagctgggaaatcctcagggctcctaccagcaggactgcctcgctgccccacctcccgctccttggcctgtccccagattccttccctggttgacttgactcatgcttgtttcactttcacatggaatttcccagttatgaaattaataaaaatcaatggtttccaca

SEQ ID NO: 63754 - DNA, 2776 bp, Homo sapiens
  misc_feature (117)..(118): n is a, c, g, or t
ggaatttcctcagataccgtcgtagtcttaaccataaactatgccgactagggatcgggtggtgtttttttaatgacccactcggcaccttacgagaaatcaaagtctttgggttcnngggggcagtacacaaagcctgtgggggagatctattgaccctatagatatattagcatcagggagacagggcaaaggtttcacccttcagttcagtccccaatccctgcttattatttccctaacagaagaccatcccccttgccactccctggtttttcttctctggcagcaatgaagcagctgctgacccagctctagttttcgggaagtcagatgaccttttccctcccgcggctctctacctctcgccgcccctagggaggacaccatgggcccactgatggttcttttttgcctgctgttcctgtacccaggtctggcagactcggctccctcctgccctcagaacgtgaatatctcgggtggcaccttcaccctcagccatggctgggctcctgggagccttctcacctactcctgcccccagggcctgtacccatccccagcatcacggctgtgcaagagcagcggacagtggcagaccccaggagccacccggtctctgtctaaggcggtctgcaaacctggccactgccccaacccaggcatttcactgggcgcagtgcggacaggcttccgctttggtcatggggacaaggtccgctatcgctgctcctcgaatcttgtgctcacggggtcttcggagcgggagtgccagggcaacggggtctggagtggaacggagcccatctgccgccaaccctactcttatgacttccctgaggacgtggcccctgccctgggcacttccttctcccacatgcttggggccaccaatcccacccagaagacaaaggaaagcctgggccgtaaaatccaaatccagcgctctggtcatctgaacctctacctgctcctggactgttcgcagagtgtgtcggaaaatgactttctcatcttcaaggagagcgcctccctcatggtggacaggatcttcagctttgagatcaatgtgagcgttgccattatcacctttgcctcagagcccaaagtcctcatgtctgtcctgaacgacaactcccgggatatgactgaggtgatcagcagcctggaaaatgccaactataaagatcatgaaaatggaactgggactaacacctatgcggccttaaacagtgtctatctcatgatgaacaaccaaatgcgactcctcggcatggaaacgatggcctggcaggaaatccgacatgccatcatccttctgacagatggaaagtccaatatgggtggctctcccaagacagctgttgaccatatcagagagatcctgaacatcaaccagaagaggaatgactatctggacatctatgccatcggggtgggcaagctggatgtggactggagagaactgaatgagctagggtccaagaaggatggtgagaggcatgccttcattctgcaggacacaaaggctctgcaccaggtctttgaacatatgctggatgtctccaagctcacagacaccatctgcggggtggggaacatgtcagcaaacgcctctgaccaggagaggacaccctggcatgtcactattaagcccaagagccaagagacctgccggggggccctcatctccgaccaatgggtcctgacagcagctcattgcttccgcgatggcaacgaccactccctgtggagggtcaatgtgggagaccccaaatcccagtggggcaaagaattccttattgagaaggcggtgatctccccagggtttgatgtctttgccaaaaagaaccagggaatcctggagttctatggtgatgacatagctctgctgaagctggcccagaaagtaaagatgtccacccatgccaggcccatctgccttccctgcacgatggaggccaatctggctctgcggagacctcaaggcagcacctgtagggaccatgagaatgaactgctgaacaaacagagtgttcctgctcattttgtcgccttgaatgggagcaaactgaacattaaccttaagatgggagtggagtggacaagctgtgccgaggttgtctcccaagaaaaaaccatgttccccaacttgacagatgtcagggaggtggtgacagaccagttcctatgcagtgggacccaggaggatgagagtccctgcaagggagaatctgggggagcagttttccttgagcggagattcaggttttttcaggtgggtctggtgagctggggtctttacaacccctgccttggctctgctgacaaaaactcccgcaaaagggcccctcgtagcaaggtcccgccgccacgagactttcacatcaatctcttccgcatgcagccctggctgaggcagcacctgggggatgtcctgaattttttacccctctagccatggccactgagccctctgctgccctgccagaatctgccgcccctccatcttctacctctgaatggccacccttagaccctgtgatccatcctctctcctagctgagtaaatccgggtctctaggatgccagaggcagcgcacacaagctgggaaatcctcagggctcctaccagcaggactgcctcgctgccccacctcccgctccttggcctgtccccagattccttccctggttgacttgactcatgcttgtttcactttcacatggaatttcccagttatgaaattaataaaaatcaatggtttccaca

SEQ ID NO: 63755 - DNA, 2909 bp, Homo sapiens
  misc_feature (117)..(118): n is a, c, g, or t
ggaatttcctcagataccgtcgtagtcttaaccataaactatgccgactagggatcgggtggtgtttttttaatgacccactcggcaccttacgagaaatcaaagtctttgggttcnngggggcagtacacaaagcctgtgggggagatctattgaccctatagatatattagcatcagggagacagggcaaaggtttcacccttcagttcagtccccaatccctgcttattatttccctaacagaagaccatcccccttgccactccctggtttttcttctctggcagcaatgaagcagctgctgacccagctctagttttcgggaagtcagatgaccttttccctcccgcggctctctacctctcgccgcccctagggaggacaccatgggcccactgatggttcttttttgcctgctgttcctgtacccaggtctggcagactcggctccctcctgccctcagaacgtgaatatctcgggtggcaccttcaccctcagccatggctgggctcctgggagccttctcacctactcctgcccccagggcctgtacccatccccagcatcacggctgtgcaagagcagcggacagtggcagaccccaggagccacccggtctctgtctaaggcggtctgcaaacctgtgcgctgtccagcccctgtctcctttgagaatggcatttataccccacggctggggtcctatcccgtgggtggcaatgtgagcttcgagtgtgaggatggcttcatattgcggggctcgcctgtgcgtcagtgtcgccccaacggcatgtgggatggagaaacagctgtgtgtgataatggggctggccactgccccaacccaggcatttcactgggcgcagtgcggacaggcttccgctttggtcatggggacaaggtccgctatcgctgctcctcgaatcttgtgctcacggggtcttcggagcgggagtgccagggcaacggggtctggagtggaacggagcccatctgccgccaaccctactcttatgacttccctgaggacgtggcccctgccctgggcacttccttctcccacatgcttggggccaccaatcccacccagaagacaaaggaaagcctgggccgtaaaatccaaatccagcgctctggtcatctgaacctctacctgctcctggactgttcgcagagtgtgtcggaaaatgactttctcatcttcaaggagagcgcctccctcatggtggacaggatcttcagctttgagatcaatgtgagcgttgccattatcacctttgcctcagagcccaaagtcctcatgtctgtcctgaacgacaactcccgggatatgactgaggtgatcagcagcctggaaaatgccaactataaagctcatgatgaacaaccaaatgcgactcctcggcatggaaacgatggcctggcaggaaatccgacatgccatcatccttctgacagatggaaagtccaatatgggtggctctcccaagacagctgttgaccatatcagagagatcctgaacatcaaccagaagaggaatgactatctggacatctatgccatcggggtgggcaagctggatgtggactggagagaactgaatgagctagggtccaagaaggatggtgagaggcatgccttcattctgcaggacacaaaggctctgcaccaggtctttgaacatatgctggatgtctccaagctcacagacaccatctgcggggtggggaacatgtcagcaaacgcctctgaccaggagaggacaccctggcatgtcactattaagcccaagagccaagagacctgccggggggccctcatctccgaccaatgggtcctgacagcagctcattgcttccgcgatggcaacgaccactccctgtggagggtcaatgtgggagaccccaaatcccagtggggcaaagaattccttattgagaaggcggtgatctccccagggtttgatgtctttgccaaaaagaaccagggaatcctggagttctatggtgatgacatagctctgctgaagctggcccagaaagtaaagatgtccacccatgccaggcccatctgccttccctgcacgatggaggccaatctggctctgcggagacctcaaggcagcacctgtagggaccatgagaatgaactgctgaacaaacagagtgttcctgctcattttgtcgccttgaatgggagcaaactgaacattaaccttaagatgggagtggagtggacaagctgtgccgaggttgtctcccaagaaaaaaccatgttccccaacttgacagatgtcagggaggtggtgacagaccagttcctatgcagtgggacccaggaggatgagagtccctgcaagggagaatctgggggagcagttttccttgagcggagattcaggttttttcaggtgggtctggtgagctggggtctttacaacccctgccttggctctgctgacaaaaactcccgcaaaagggcccctcgtagcaaggtcccgccgccacgagactttcacatcaatctcttccgcatgcagccctggctgaggcagcacctgggggatgtcctgaattttttacccctctagccatggccactgagccctctgctgccctgccagaatctgccgcccctccatcttctacctctgaatggccacccttagaccctgtgatccatcctctctcctagctgagtaaatccgggtctctaggatgccagaggcagcgcacacaagctgggaaatcctcagggctcctaccagcaggactgcctcgctgccccacctcccgctccttggcctgtccccagattccttccctggttgacttgactcatgcttgtttcactttcacatggaatttcccagttatgaaattaataaaaatcaatggtttccaca

SEQ ID NO: 63756 - DNA, 2219 bp, Homo sapiens
tccttttgatggtcctaattctcaaaggtaaccttaaggggagtgtattttgctgttggttctgtggatgacaggtgacaaaacaggctggccactgccccaacccaggcatttcactgggcgcagtgcggacaggcttccgctttggtcatggggacaaggtccgctatcgctgctcctcgaatcttgtgctcacggggtcttcggagcgggagtgccagggcaacggggtctggagtggaacggagcccatctgccgccaaccctactcttatgacttccctgaggacgtggcccctgccctgggcacttccttctcccacatgcttggggccaccaatcccacccagaagacaaaggaaagcctgggccgtaaaatccaaatccagcgctctggtcatctgaacctctacctgctcctggactgttcgcagagtgtgtcggaaaatgactttctcatcttcaaggagagcgcctccctcatggtggacaggatcttcagctttgagatcaatgtgagcgttgccattatcacctttgcctcagagcccaaagtcctcatgtctgtcctgaacgacaactcccgggatatgactgaggtgatcagcagcctggaaaatgccaactataaagatcatgaaaatggaactgggactaacacctatgcggccttaaacagtgtctatctcatgatgaacaaccaaatgcgactcctcggcatggaaacgatggcctggcaggaaatccgacatgccatcatccttctgacagatggaaagtccaatatgggtggctctcccaagacagctgttgaccatatcagagagatcctgaacatcaaccagaagaggaatgactatctggacatctatgccatcggggtgggcaagctggatgtggactggagagaactgaatgagctagggtccaagaaggatggtgagaggcatgccttcattctgcaggacacaaaggctctgcaccaggtctttgaacatatgctggatgtctccaagctcacagacaccatctgcggggtggggaacatgtcagcaaacgcctctgaccaggagaggacaccctggcatgtcactattaagcccaagagccaagagacctgccggggggccctcatctccgaccaatgggtcctgacagcagctcattgcttccgcgatggcaacgaccactccctgtggagggtcaatgtgggagaccccaaatcccagtggggcaaagaattccttattgagaaggcggtgatctccccagggtttgatgtctttgccaaaaagaaccagggaatcctggagttctatggtgatgacatagctctgctgaagctggcccagaaagtaaagatgtccacccatgccaggcccatctgccttccctgcacgatggaggccaatctggctctgcggagacctcaaggcagcacctgtagggaccatgagaatgaactgctgaacaaacagagtgttcctgctcattttgtcgccttgaatgggagcaaactgaacattaaccttaagatgggagtggagtggacaagctgtgccgaggttgtctcccaagaaaaaaccatgttccccaacttgacagatgtcagggaggtggtgacagaccagttcctatgcagtgggacccaggaggatgagagtccctgcaagggagaatctgggggagcagttttccttgagcggagattcaggttttttcaggtgggtctggtgagctggggtctttacaacccctgccttggctctgctgacaaaaactcccgcaaaagggcccctcgtagcaaggtcccgccgccacgagactttcacatcaatctcttccgcatgcagccctggctgaggcagcacctgggggatgtcctgaattttttacccctctagccatggccactgagccctctgctgccctgccagaatctgccgcccctccatcttctacctctgaatggccacccttagaccctgtgatccatcctctctcctagctgagtaaatccgggtctctaggatgccagaggcagcgcacacaagctgggaaatcctcagggctcctaccagcaggactgcctcgctgccccacctcccgctccttggcctgtccccagattccttccctggttgacttgactcatgcttgtttcactttcacatggaatttcccagttatgaaattaataaaaatcaatggtttccaca

SEQ ID NO: 63757 - DNA, 2689 bp, Homo sapiens
  misc_feature (117)..(118): n is a, c, g, or t
ggaatttcctcagataccgtcgtagtcttaaccataaactatgccgactagggatcgggtggtgtttttttaatgacccactcggcaccttacgagaaatcaaagtctttgggttcnngggggcagtacacaaagcctgtgggggagatctattgaccctatagatatattagcatcagggagacagggcaaaggtttcacccttcagttcagtccccaatccctgcttattatttccctaacagaagaccatcccccttgccactccctggtttttcttctctggcagcaatgaagcagctgctgacccagctctagttttcgggaagtcagatgaccttttccctcccgcggctctctacctctcgccgcccctagggaggacaccatgggcccactgatggttcttttttgcctgctgttcctgtacccaggtctggcagactcggctccctcctgccctcagaacgtgaatatctcgggtggcaccttcaccctcagccatggctgggctcctgggagccttctcacctactcctgcccccagggcctgtacccatccccagcatcacggctgtgcaagagcagcggacagtggcagaccccaggagccacccggtctctgtctaaggcggtctgcaaacctgtgcgctgtccagcccctgtctcctttgagaatggcatttataccccacggctggggtcctatcccgtgggtggcaatgtgagcttcgagtgtgaggatggcttcatattgcggggctcgcctgtgcgtcagtgtcgccccaacggcatgtgggatggagaaacagctgtgtgtgataatggggctggccactgccccaacccaggcatttcactgggcgcagtgcggacaggcttccgctttggtcatggggacaaggtccgctatcgctgctcctcgaatcttgtgctcacggggtcttcggagcgggagtgccagggcaacggggtctggagtggaacggagcccatctgccgccaaccctactcttatgacttccctgaggacgtggcccctgccctgggcacttccttctcccacatgcttggggccaccaatcccacccagaagacaaaggatcatgaaaatggaactgggactaacacctatgcggccttaaacagtgtctatctcatgatgaacaaccaaatgcgactcctcggcatggaaacgatggcctggcaggaaatccgacatgccatcatccttctgacagatggaaagtccaatatgggtggctctcccaagacagctgttgaccatatcagagagatcctgaacatcaaccagaagaggaatgactatctggacatctatgccatcggggtgggcaagctggatgtggactggagagaactgaatgagctagggtccaagaaggatggtgagaggcatgccttcattctgcaggacacaaaggctctgcaccaggtctttgaacatatgctggatgtctccaagctcacagacaccatctgcggggtggggaacatgtcagcaaacgcctctgaccaggagaggacaccctggcatgtcactattaagcccaagagccaagagacctgccggggggccctcatctccgaccaatgggtcctgacagcagctcattgcttccgcgatggcaacgaccactccctgtggagggtcaatgtgggagaccccaaatcccagtggggcaaagaattccttattgagaaggcggtgatctccccagggtttgatgtctttgccaaaaagaaccagggaatcctggagttctatggtgatgacatagctctgctgaagctggcccagaaagtaaagatgtccacccatgccaggcccatctgccttccctgcacgatggaggccaatctggctctgcggagacctcaaggcagcacctgtagggaccatgagaatgaactgctgaacaaacagagtgttcctgctcattttgtcgccttgaatgggagcaaactgaacattaaccttaagatgggagtggagtggacaagctgtgccgaggttgtctcccaagaaaaaaccatgttccccaacttgacagatgtcagggaggtggtgacagaccagttcctatgcagtgggacccaggaggatgagagtccctgcaagggagaatctgggggagcagttttccttgagcggagattcaggttttttcaggtgggtctggtgagctggggtctttacaacccctgccttggctctgctgacaaaaactcccgcaaaagggcccctcgtagcaaggtcccgccgccacgagactttcacatcaatctcttccgcatgcagccctggctgaggcagcacctgggggatgtcctgaattttttacccctctagccatggccactgagccctctgctgccctgccagaatctgccgcccctccatcttctacctctgaatggccacccttagaccctgtgatccatcctctctcctagctgagtaaatccgggtctctaggatgccagaggcagcgcacacaagctgggaaatcctcagggctcctaccagcaggactgcctcgctgccccacctcccgctccttggcctgtccccagattccttccctggttgacttgactcatgcttgtttcactttcacatggaatttcccagttatgaaattaataaaaatcaatggtttccaca

SEQ ID NO: 63758 - DNA, 1911 bp, Homo sapiens
tgcctcagcctcccaagaagctgggattacaggcatgcgccaccatgcctcgctggccactgccccaacccaggcatttcactgggcgcagtgcggacaggcttccgctttggtcatggggacaaggtccgctatcgctgctcctcgaatcttgtgctcacggggtcttcggagcgggagtgccagggcaacggggtctggagtggaacggagcccatctgccgccaaccctactcttatgacttccctgaggacgtggcccctgccctgggcacttccttctcccacatgcttggggccaccaatcccacccagaagacaaaggatcatgaaaatggaactgggactaacacctatgcggccttaaacagtgtctatctcatgatgaacaaccaaatgcgactcctcggcatggaaacgatggcctggcaggaaatccgacatgccatcatccttctgacagatggaaagtccaatatgggtggctctcccaagacagctgttgaccatatcagagagatcctgaacatcaaccagaagaggaatgactatctggacatctatgccatcggggtgggcaagctggatgtggactggagagaactgaatgagctagggtccaagaaggatggtgagaggcatgccttcattctgcaggacacaaaggctctgcaccaggtctttgaacatatgctggatgtctccaagctcacagacaccatctgcggggtggggaacatgtcagcaaacgcctctgaccaggagaggacaccctggcatgtcactattaagcccaagagccaagagacctgccggggggccctcatctccgaccaatgggtcctgacagcagctcattgcttccgcgatggcaacgaccactccctgtggagggtcaatgtgggagaccccaaatcccagtggggcaaagaattccttattgagaaggcggtgatctccccagggtttgatgtctttgccaaaaagaaccagggaatcctggagttctatggtgatgacatagctctgctgaagctggcccagaaagtaaagatgtccacccatgccaggcccatctgccttccctgcacgatggaggccaatctggctctgcggagacctcaaggcagcacctgtagggaccatgagaatgaactgctgaacaaacagagtgttcctgctcattttgtcgccttgaatgggagcaaactgaacattaaccttaagatgggagtggagtggacaagctgtgccgaggttgtctcccaagaaaaaaccatgttccccaacttgacagatgtcagggaggtggtgacagaccagttcctatgcagtgggacccaggaggatgagagtccctgcaagggagaatctgggggagcagttttccttgagcggagattcaggttttttcaggtgggtctggtgagctggggtctttacaacccctgccttggctctgctgacaaaaactcccgcaaaagggcccctcgtagcaaggtcccgccgccacgagactttcacatcaatctcttccgcatgcagccctggctgaggcagcacctgggggatgtcctgaattttttacccctctagccatggccactgagccctctgctgccctgccagaatctgccgcccctccatcttctacctctgaatggccacccttagaccctgtgatccatcctctctcctagctgagtaaatccgggtctctaggatgccagaggcagcgcacacaagctgggaaatcctcagggctcctaccagcaggactgcctcgctgccccacctcccgctccttggcctgtccccagattccttccctggttgacttgactcatgcttgtttcactttcacatggaatttcccagttatgaaattaataaaaatcaatggtttccaca

SEQ ID NO: 63759 - DNA, 3293 bp, Homo sapiens
  misc_feature (117)..(118): n is a, c, g, or t
  misc_feature (2971)..(2971): n is a, c, g, or t
ggaatttcctcagataccgtcgtagtcttaaccataaactatgccgactagggatcgggtggtgtttttttaatgacccactcggcaccttacgagaaatcaaagtctttgggttcnngggggcagtacacaaagcctgtgggggagatctattgaccctatagatatattagcatcagggagacagggcaaaggtttcacccttcagttcagtccccaatccctgcttattatttccctaacagaagaccatcccccttgccactccctggtttttcttctctggcagcaatgaagcagctgctgacccagctctagttttcgggaagtcagatgaccttttccctcccgcggctctctacctctcgccgcccctagggaggacaccatgggcccactgatggttcttttttgcctgctgttcctgtacccaggtctggcagactcggctccctcctgccctcagaacgtgaatatctcgggtggcaccttcaccctcagccatggctgggctcctgggagccttctcacctactcctgcccccagggcctgtacccatccccagcatcacggctgtgcaagagcagcggacagtggcagaccccaggagccacccggtctctgtctaaggcggtctgcaaacctgtgcgctgtccagcccctgtctcctttgagaatggcatttataccccacggctggggtcctatcccgtgggtggcaatgtgagcttcgagtgtgaggatggcttcatattgcggggctcgcctgtgcgtcagtgtcgccccaacggcatgtgggatggagaaacagctgtgtgtgataatggggctggccactgccccaacccaggcatttcactgggcgcagtgcggacaggcttccgctttggtcatggggacaaggtccgctatcgctgctcctcgaatcttgtgctcacggggtcttcggagcgggagtgccagggcaacggggtctggagtggaacggagcccatctgccgccaaccctactcttatgacttccctgaggacgtggcccctgccctgggcacttccttctcccacatgcttggggccaccaatcccacccagaagacaaaggaaagcctgggccgtaaaatccaaatccagcgctctggtcatctgaacctctacctgctcctggactgttcgcagagtgtgtcggaaaatgactttctcatcttcaaggagagcgcctccctcatggtggacaggatcttcagctttgagatcaatgtgagcgttgccattatcacctttgcctcagagcccaaagtcctcatgtctgtcctgaacgacaactcccgggatatgactgaggtgatcagcagcctggaaaatgccaactataaagatcatgaaaatggaactgggactaacacctatgcggccttaaacagtgtctatctcatgatgaacaaccaaatgcgactcctcggcatggaaacgatggcctggcaggaaatccgacatgccatcatccttctgacagatggaaagtccaatatgggtggctctcccaagacagctgttgaccatatcagagagatcctgaacatcaaccagaagaggaatgactatctggacatctatgccatcggggtgggcaagctggatgtggactggagagaactgaatgagctagggtccaagaaggatggtgagaggcatgccttcattctgcaggacacaaaggctctgcaccaggtctttgaacatatgctggatgtctccaagctcacagacaccatctgcggggtggggaacatgtcagcaaacgcctctgaccaggagaggacaccctggcatgtcactattaagcccaagagccaagagacctgccggggggccctcatctccgaccaatgggtcctgacagcagctcattgcttccgcgatggcaacgaccactccctgtggagggtcaatgtgggagaccccaaatcccagtggggcaaagaattccttattgagaaggcggtgatctccccagggtttgatgtctttgccaaaaagaaccagggaatcctggagttctatggtgatgacatagctctgctgaagctggcccagaaagtaaagatgtccacccatgccaggcccatctgccttccctgcacgatggaggccaatctggctctgcggagacctcaaggcagcacctgtagggaccatgagaatgaactgctgaacaaacagagtgttcctgctcattttgtcgccttgaatgggagcaaactgaacattaaccttaagatgggagtggagtggacaagctgtgccgaggttgtctcccaagaaaaaaccatgttccccaacttgacagatgtcagggaggtggtgacagaccagttcctatgcagtgggacccaggaggatgagagtccctgcaagggagaatctgggggagcagttttccttgagcggagattcaggttttttcaggtgggtctggtgagctggggtctttacaacccctgccttggctctgctgacaaaaactcccgcaaaagggcccctcgtagcaaggtcccgccgccacgagactttcacatcaatctcttccgcatgcagccctggctgaggcagcacctgggggatgtcctgaattttttacccctctagccatggccactgagccctctgctgccctgccagaatctgccgcccctccatcttctacctctgaatggccacccttagaccctgtgatccatcctctctcctagctgagtaaatccgggtctctaggatgccagaggcagcgcacacaagctgggaaatcctcagggctcctaccagcaggactgcctcgctgccccacctcccgctccttggcctgtccccagattccttccctggttgacttgactcatgcttgtttcactttcacatggaatttcccagttatgaaattaataaaaatcaatggtttccacaaaaaaaaanaaaaaaaaaaaaaaaaaaaaaagacaaaaaaaaaacaaacacaaaaaaatgaaacaaaaaaacaaacacaagggggcgcgcgccccgacaaacagtctaccaccgcagggggccgccaacgaaacgagccccaacacccacgaaaatggccgaccaaggggcgccgcacatagaggtcgacgaaagtaaaagaccacgagccagccgacgcccagttttaaaaacaggggcgcgcaagaagggagaaagacgcggtgtactagcgcgccacggggggcgcgcccacaactcctgggggcggagcaataccggaaccgccacg

SEQ ID NO: 63760 - DNA, 2678 bp, Homo sapiens
  misc_feature (117)..(118): n is a, c, g, or t
ggaatttcctcagataccgtcgtagtcttaaccataaactatgccgactagggatcgggtggtgtttttttaatgacccactcggcaccttacgagaaatcaaagtctttgggttcnngggggcagtacacaaagcctgtgggggagatctattgaccctatagatatattagcatcagggagacagggcaaaggtttcacccttcagttcagtccccaatccctgcttattatttccctaacagaagaccatcccccttgccactccctggtttttcttctctggcagcaatgaagcagctgctgacccagctctagttttcgggaagtcagatgaccttttccctcccgcggctctctacctctcgccgcccctagggaggacaccatgggcccactgatggttcttttttgcctgctgttcctgtacccaggtctggcagactcggctccctcctgccctcagaacgtgaatatctcgggtggcaccttcaccctcagccatggctgggctcctgggagccttctcacctactcctgcccccagggcctgtacccatccccagcatcacggctgtgcaagagcagcggacagtggcagaccccaggagccacccggtctctgtctaaggcggtctgcaaacctgtgcgctgtccagcccctgtctcctttgagaatggcatttataccccacggctggggtcctatcccgtgggtggcaatgtgagcttcgagtgtgaggatggcttcatattgcggggctcgcctgtgcgtcagtgtcgccccaacggcatgtgggatggagaaacagctgtgtgtgataatggggctggccactgccccaacccaggcatttcactgggcgcagtgcggacaggcttccgctttggtcatggggacaaggtccgctatcgctgctcctcgaatcttgtgctcacggggtcttcggagcgggagtgccagggcaacggggtctggagtggaacggagcccatctgccgccaaccctactcttatgacttccctgaggacgtggcccctgccctgggcacttccttctcccacatgcttggggccaccaatcccacccagaagacaaaggaaagcctgggccgtaaaatccaaatccagcgctctggtcatctgaacctctacctgctcctggactgttcgcagagtgtgtcggaaaatgactttctcatcttcaaggagagcgcctccctcatggtggacaggatcttcagctttgagatcaatgtgagcgttgccattatcacctttgcctcagagcccaaagtcctcatgtctgtcctgaacgacaactcccgggatatgactgaggtgatcagcagcctggaaaatgccaactataaagatcatgaaaatggaactgggactaacacctatgcggccttaaacagtgtctatctcatgatgaacaaccaaatgcgactcctcggcatggaaacgatggcctggcaggaaatccgacatgccatcatccttctgacagatggaaagtccaatatgggtggctctcccaagacagctgttgaccatatcagagagatcctgaacatcaaccagaagaggaatgactatctggacatctatgccatcggggtgggcaagctggatgtggactggagagaactgaatgagctagggtccaagaaggatggtgagaggcatgccttcattctgcaggacacaaaggctctgcaccaggtctttgaacatatgctggatgtctccaagctcacagacaccatctgcggggtggggaacatgtcagcaaacgcctctgaccaggagaggacaccctggcatgtcactattaagcccaagagccaagagacctgccggggggccctcatctccgaccaatgggtcctgacagcagctcattgcttccgcgatggcaacgaccactccctgtggagggtcaatgtgggagaccccaaatcccagtggggcaaagaattccttattgagaaggcggtgatctccccagggtttgatgtctttgccaaaaagaaccagggaatcctggagttctatggtgatgacatagctctgctgaagctggcccagaaagtaaagatgtccacccatgccaggcccatctgccttccctgcacgatggaggccaatctggctctgcggagacctcaaggcagcacctgtagggaccatgagaatgaactgctgaacaaacagagtgttcctgctcattttgtcgccttgaatgggagcaaactgaacattaaccttaagatgggagtggagtggacaagctgtgccgaggttgtctcccaagaaaaaaccatgttccccaacttgacagatgtcagggaggtggtgacagaccagttcctatgcagtgggacccaggaggatgagagtccctgcaagggagaatctgggggagcagttttccttgagcggagattcaggttttttcagctgagtaaatccgggtctctaggatgccagaggcagcgcacacaagctgggaaatcctcagggctcctaccagcaggactgcctcgctgccccacctcccgctccttggcctgtccccagattccttccctggttgacttgactcatgcttgtttcactttcacatggaatttcccagttatgaaattaataaaaatcaatggtttccaca

SEQ ID NO: 63761 - DNA, 2522 bp, Homo sapiens
  misc_feature (117)..(118): n is a, c, g, or t
ggaatttcctcagataccgtcgtagtcttaaccataaactatgccgactagggatcgggtggtgtttttttaatgacccactcggcaccttacgagaaatcaaagtctttgggttcnngggggcagtacacaaagcctgtgggggagatctattgaccctatagatatattagcatcagggagacagggcaaaggtttcacccttcagttcagtccccaatccctgcttattatttccctaacagaagaccatcccccttgccactccctggtttttcttctctggcagcaatgaagcagctgctgacccagctctagttttcgggaagtcagatgaccttttccctcccgcggctctctacctctcgccgcccctagggaggacaccatgggcccactgatggttcttttttgcctgctgttcctgtacccaggtctggcagactcggctccctcctgccctcagaacgtgaatatctcgggtggcaccttcaccctcagccatggctgggctcctgggagccttctcacctactcctgcccccagggcctgtacccatccccagcatcacggctgtgcaagagcagcggacagtggcagaccccaggagccacccggtctctgtctaaggcggtctgcaaacctgtgcgctgtccagcccctgtctcctttgagaatggcatttataccccacggctggggtcctatcccgtgggtggcaatgtgagcttcgagtgtgaggatggcttcatattgcggggctcgcctgtgcgtcagtgtcgccccaacggcatgtgggatggagaaacagctgtgtgtgataatggggctggccactgccccaacccaggcatttcactgggcgcagtgcggacaggcttccgctttggtcatggggacaaggtccgctatcgctgctcctcgaatcttgtgctcacggggtcttcggagcgggagtgccagggcaacggggtctggagtggaacggagcccatctgccgccaaccctactcttatgacttccctgaggacgtggcccctgccctgggcacttccttctcccacatgcttggggccaccaatcccacccagaagacaaaggaaagcctgggccgtaaaatccaaatccagcgctctggtcatctgaacctctacctgctcctggactgttcgcagagtgtgtcggaaaatgactttctcatcttcaaggagagcgcctccctcatggtggacaggatcttcagctttgagatcaatgtgagcgttgccattatcacctttgcctcagagcccaaagtcctcatgtctgtcctgaacgacaactcccgggatatgactgaggtgatcagcagcctggaaaatgccaactataaagatcatgaaaatggaactgggactaacacctatgcggccttaaacagtgtctatctcatgatgaacaaccaaatgcgactcctcggcatggaaacgatggcctggcaggaaatccgacatgccatcatccttctgacagatggaaagtccaatatgggtggctctcccaagacagctgttgaccatatcagagagatcctgaacatcaaccagaagaggaatgactatctggacatctatgccatcggggtgggcaagctggatgtggactggagagaactgaatgagctagggtccaagaaggatggtgagaggcatgccttcattctgcaggacacaaaggctctgcaccaggtctttgaacatatgctggatgtctccaagctcacagacaccatctgcggggtggggaacatgtcagcaaacgcctctgaccaggagaggacaccctggcatgtcactattaagcccaagagccaagagacctgccggggggccctcatctccgaccaatgggtcctgacagcagctcattgcttccgcgatggcaacgaccactccctgtggagggtcaatgtgggagaccccaaatcccagtggggcaaagaattccttattgagaaggcggtgatctccccagggtttgatgtctttgccaaaaagaaccagggaatcctggagttctatggtgatgacatagctctgctgaagctggcccagaaagtaaagatgtccacccatgccaggcccatctgccttccctgcacgatggaggccaatctggctctgcggagacctcaaggcagcacctgtagggaccatgagaatgaactgctgaacaaacagagtgttcctgctcattttgtcgccttgaatgggagcaaactgaacattaaccttaagatgggagtggagtggacaagctgtgccgaggttgtctcccaagaaaaaaccatgttccccaacttgacagatgtcagggaggtggtgacagaccagttcctaccagcaggactgcctcgctgccccacctcccgctccttggcctgtccccagattccttccctggttgacttgactcatgcttgtttcactttcacatggaatttcccagttatgaaattaataaaaatcaatggtttccaca

SEQ ID NO: 63762 - DNA, 1662 bp, Homo sapiens
  misc_feature (117)..(118): n is a, c, g, or t
ggaatttcctcagataccgtcgtagtcttaaccataaactatgccgactagggatcgggtggtgtttttttaatgacccactcggcaccttacgagaaatcaaagtctttgggttcnngggggcagtacacaaagcctgtgggggagatctattgaccctatagatatattagcatcagggagacagggcaaaggtttcacccttcagttcagtccccaatccctgcttattatttccctaacagaagaccatcccccttgccactccctggtttttcttctctggcagcaatgaagcagctgctgacccagctctagttttcgggaagtcagatgaccttttccctcccgcggctctctacctctcgccgcccctagggaggacaccatgggcccactgatggttcttttttgcctgctgttcctgtacccaggtctggcagactcggctccctcctgccctcagaacgtgaatatctcgggtggcaccttcaccctcagccatggctgggctcctgggagccttctcacctactcctgcccccagggcctgtacccatccccagcatcacggctgtgcaagagcagcggacagtggcagaccccaggagccacccggtctctgtctaaggcggtctgcaaacctgtgcgctgtccagcccctgtctcctttgagaatggcatttataccccacggctggggtcctatcccgtgggtggcaatgtgagcttcgagtgtgaggatggcttcatattgcggggctcgcctgtgcgtcagtgtcgccccaacggcatgtgggatggagaaacagctgtgtgtgataatggggctggccactgccccaacccaggcatttcactgggcgcagtgcggacaggcttccgctttggtcatggggacaaggtccgctatcgctgctcctcgaatcttgtgctcacggggtcttcggagcgggagtgccagggcaacggggtctggagtggaacggagcccatctgccgccaaccctactcttatgacttccctgaggacgtggcccctgccctgggcacttccttctcccacatgcttggggccaccaatcccacccagaagacaaaggaaagcctgggccgtaaaatccaaatccagcgctctggtcatctgaacctctacctgctcctggactgttcgcagagtgtgtcggaaaatgactttctcatcttcaaggagagcgcctccctcatggtggacaggatcttcagctttgagatcaatgtgagcgttgccattatcacctttgcctcagagcccaaagtcctcatgtctgtcctgaacgacaactcccgggatatgactgaggtgatcagcagcctggaaaatgccaactataaagatcatgaaaatggaactgggactaacacctatgcggccttaaacagtgtctatctcatgatgaacaaccaaatgcgactcctcggcatggaaacgatggcctggcaggaaatccgacatgccatcatccttctgacagatggaaagtccaatatgggtggctctcccaagacagctgttgaccatatcagagagatcctgaacatcaaccagaagaggaatgactatctggacatctatgccatcggtgggcaagctggtgggaagtcttgctggtagaaggacca

SEQ ID NO: 63763 - DNA, 488 bp, Homo sapiens
catatatttttaatatacatagcttctttttcaataaagaagctcacttttgaacctagtattggtaacttataactttctttttttcttgattactctaagagtttttataaataagttttgttgatattttaaaccttgtttcttatggacagagtagttgggtcatgctttttaaatccattctgaccatctctgtcttttaattggataatctaatccattaacatttattgtagttataaattttaatgcagttactaatatagtatttttttttgttttggagatggagtttcacttttgttgcccaggctggagtgcaatggcacaatctcagctcactgcaacctgcgcctcctgagttcaagcaattctcctgcttcagcctcccgagtagctggaattacaggcacccgccaccacgtctggctaattttttgtacttttagtagagatggggtttcaccatgttggccaggctggtc

SEQ ID NO: 63764 - DNA, 226 bp, Homo sapiens
ctcagctgtaacttctcaaagcctcctgctcagagaccttagctccctctctagttaacaaaccagtcccaggcccttttgggatgtcagtagctctggcctgtaccaggtgacagatggacagcacagaggtgttggacttatcttcaagctggagaaactcaagggaccagtgggaacccttagccagattcctccccatatttgggaaagtaaattttgagct

SEQ ID NO: 63765 - DNA, 1489 bp, Homo sapiens
gaccccgcgtccgctctggtgcagcatgatgctgcccccttggaccctcggccttctcctgctggccacagtcagaggaaaagaggtctgctacggacaacttggctgcttttctgatgaaaaaccatgggcaggaacccttcagcgacctgtaaaattacttccctggtcccccgaggacattgacacccgctttcttctgtacacaaatgaaaatccaaacaacttccaactaatcactggcacggaaccagacaccattgaggcttcaaacttccaactggaccgcaagacacgcttcatcatccatggcttcttagacaaggcggaggacagctggccatcggacatgtgcaagaaaatgtttgaagtggagaaggtgaactgcatctgtgtggactggaggcacgggtcccgggcaatgtacacccaagccgtgcaaaacattcgggttgttggggcggagacagctttcttaatacaagcactgtcgacgcagctagggtacagccttgaggacgtgcatgtcatcggccacagcctgggcgcgcacacggccgcggaggcgggcaggaggctggggggccgcgtgggcaggatcacagggctggatccagcagggccgtgcttccaggatgaacctgaggaggttcggttggatccatctgacgccgtgtttgtggatgtgattcacacagattcttctcccatagttccttccctaggtttcggaatgagccaaaaggtgggccatctggatttctttccaaatggaggaaaggaaatgcccggatgtaagaaaaatgtcctttcaaccattactgatattgatggaatatgggaaggaattggtggctttgtgtcttgcaatcacctaagaagcttcgagtattactcaagcagcgtcctcaaccctgatggcttcctgggctatccctgtgcctcctacgatgagtttcaggagagtaagtgtttcccttgtccagctgaaggatgccccaaaatggggcactatgctgaccaatttaaggggaaaacaagtgctgtggaacaaacctttttcctgaacacaggagagagtggtaactttactagttggagatataaggtatcagtcacactttctggaaaagagaaagtgaatgggtacatcaggattgctttgtatggaagtaatgaaaactcgaaacaatatgagattttcaaaggatccctcaaaccagatgcaagtcacacgtgtgctattgatgtggattttaatgttggaaaaatacagaaagttaaattcctctggaacaaacgtgggataaatctatctgagcccaaactgggggcttcccaaatcacagtgcaaagtggtgaagatgggactgagtataatttttgtagcagcgacactgtggaagaaaacgtcttgcaatctctttacccttgttaaaaacgtggtgcggctattgcggtaataaaatctttaatgcactcggaaaaa

SEQ ID NO: 63766 - DNA, 592 bp, Homo sapiens
gaccccgcgtccgctctggtgcagcatgatgctgcccccttggaccctcggccttctcctgctggccacagtcagaggaaaagaggtctgctacggacaacttggctgcttttctgatgaaaaaccatgggcaggaacccttcagcgacctgtaaaattacttccctggtcccccgaggacattgacacccgctttcttctgtacacaaatgaaaatccaaacaacttccaactaatcactggcacggaaccagacaccattgaggcttcaaacttccaactggaccgcaagacacgcttcatcatccatggcttcttagacaaggcggaggacagctggccatcggacatgtgcaagaaaatgtttgaagtggagaaggtgaactgcatctgtgtggactggaggcacgggtcccgggcaatgtacacccaagccgtgcaaaacattcgggttgttggggcggagacagctttcttaatacaagcactgtcggtaaaaccctgcctgggccctgtcctgtgggtaggggtcagagaggggcagggaggtaccacgtggcatggagaggcagcctggggacccgtgggcatg

SEQ ID NO: 63767 - DNA, 377 bp, Homo sapiens
ttttaaatggaagtgatactaacacctatcttacggagttgtcgagaggatttaaaaagttaaaactgcacataaaacatttacagctgtgcccagcccatgacatctgctcagtgaatgttgttggtagcagtagtagatccgggattctgaagtgcaaagtgccgtagcaggagtgtaaaaattgtgtaattcctgccacaccctattggcaccagaataaggtcacattctttctgccacgtatggagaagtgtgaaaagcaacattgttagttctagctcatatgggaaaagcaactacagcccgaagtgcaggtaatctcccgattacccaatctcgtttctttcgcagtttaaatatgaatcttacagagg

SEQ ID NO: 63768 - DNA, 467 bp, Homo sapiens
tcatgggatacttttattcagacatttctgacttgcctcttgtagcgtccgctttttatccaaatgatagaatttgatctagaggaaactgaattatctgggctacatcccatcatcatctctctttggaggcaatcaatgatcagccatcagaatgttcagatctgtgggtttgcggggctactcttaggggtccagcatgtacttctctttggccgggtctcttaagaaacttatcccaccatttctgggtcacctgaggctcatgaccactgtgatccagcttatcctcctgtcaaacacaatcaaggtccctgtaaagtggcaaagaggataccaggatttaaggtgatacctgggaaacaggagcctagagcccaccccatggtagatactcatttccattccaaactctgtacatcccagtagtccagatccatagggtcagtgccctgacagggaaatgg

SEQ ID NO: 63769 - DNA, 469 bp, Homo sapiens
gaaactaagggctgccaccaacagcccacatccacttgccagctctgagagcaaatagatcctgcaggcctagtcaagcctcatttgactgacgcctcagtcaacatcttgactgcaagcccatgcaaaacactgagccagaaaccacccacccaagaagctgtgaattcctgactggcaaaaaatgctgagcagaaaaccaggaaatggatggactccacctccgcagccacgcctgcccgtttgcgcttactgaacagaggtcctcaggaacgtggtgagacaaagagaaaggagggcgttttcgccaccctcttgctaatgcttcaataactccccattgccctaatgagctcaccatcagagcctgattaagacctttggaggccctaaaattataagacccactatctccatcaatgtaattaaaaaaaaaacaactttaaatggaactttaccaaaaagccga

SEQ ID NO: 63770 - DNA, 324 bp, Homo sapiens
gaaactaagggctgccaccaacagcccacatccacttgccagctctgagagcaaatagatcctgcaggcctagtcaagcctcatttgactgacgcctcagtcaacatcttgactgcaagcccatgcaaaacactgagccagaaaccacccacccaagaagctgtgaattcctgactggcaaaaaatgtgagtgattataaatatttattatacttttaagccactactttttggagtattgtgttaggcagcagtaaataactaatacaataatcattgcttcctgtttgtaatgacaaaaaagagaaagaaaataaaaaattt

SEQ ID NO: 63771 - DNA, 661 bp, Homo sapiens
  misc_feature (226)..(226): n is a, c, g, or t
gatcattggcggctgcacgaaggatgaacggtttgtggcagaggtgacctgcctggaccccctgaggcgcagccgcctggaggtggccaagctcccgctaacagagcatgagctggagagtgagaataagaagtgggtggagtttgcatgcgtgacattgaaaaatgaggtctacatctcaggtggcaaagaaacacagcatgatgtttggaaatataattcttcnatcaacaagtggattcagattgagtatttaaacataggccgctggaggcataagatggtggtgttgggtggcaaggtctatgtgatcggaggctttgacggcttacagagaatcaacaacgtggagacctacgacccctttcacaactgctggtcagaggtataggacacgatttctaccagtaactgcctgtattattacttcagtgcttttttaaaaagctttggaacgtgcctgccgtggtggtcagctttctgatcactttacttccaaggagaacagttttggtggctctgagcttccctcctcctaggagctattgcttcagtattgctgatcaagtcacagaaacaatgtccttccaagtggtgaaggtctgtgtgggcacctgtcctaatttggacagaaccccagatgtgcacagaggctcaccct

SEQ ID NO: 63772 - DNA, 4342 bp, Homo sapiens
  misc_feature (226)..(226): n is a, c, g, or t
  misc_feature (579)..(579): n is a, c, g, or t
  misc_feature (2140)..(2140): n is a, c, g, or t
gatcattggcggctgcacgaaggatgaacggtttgtggcagaggtgacctgcctggaccccctgaggcgcagccgcctggaggtggccaagctcccgctaacagagcatgagctggagagtgagaataagaagtgggtggagtttgcatgcgtgacattgaaaaatgaggtctacatctcaggtggcaaagaaacacagcatgatgtttggaaatataattcttcnatcaacaagtggattcagattgagtatttaaacataggccgctggaggcataagatggtggtgttgggtggcaaggtctatgtgatcggaggctttgacggcttacagagaatcaacaacgtggagacctacgacccctttcacaactgctggtcagaggccgcacccctccttgtccatgtcagttcctttgcagccaccagccataagaagaagctgtatgtgatcgggggagggcccaatgggaaactggccacagacaagactcagtgttatgacccttccaccaacaagtggagtttgaaggcggccatgcccgtggaggctaaatgcatcaatgcagtgagtttccnggaccgcatctatgtcgttggtggggccatgagagcgctgtacgcctacagcccgctggaagacagctggtgcctggtgacccagctcagccacgagcgggccagctgcggtatcgcgccctgcaacaaccggctctacatcaccggcgggcgggacgagaagaacgaggttatcgccacggtgctgtgctgggaccccgaggcccagaaactgacagaggagtgcgtcctgccccggggcgtgtcgcaccacggcagcgtcaccatcaggaagtcgtacacccacatccgcaggatcgtgcccggagcagtgtctgtctgacggcaggatggggagctggagagcccccccgaccctcagcgtacccgcctcacctctcaccctcctccagtcccacttcaggcagcaggctcgagtttgaggccatacatcaggggatccccttgactcactttgggggaaccttggaagtcacagtttggggtcacttgagaccggccaggaatgtttgcatgacctacctcaggaggggaggcgaggaagagtaatatttagcattcaggacccacccaccctatgccggcttctgtgccaggcacttccttttatcggttcatttaacctggtgactggctcttatcacttctagtttacaggtgagggaaccaagtttcacagaggctggtcttgaacgcctgaccttgtgatctgcccgcctcggcctcccgaagtgctgggattacaggtgtgagccactgggcccggtctttttttttttaaatgatcataagatggcccattttggaccggaactgtcattgccagacagaattgtacctttagcacattctggtgccctggcctcttagtgttcaccagttgtactgcaatatagacaagatgtctctagagactcaaactactgttttattaaaaaagtaaacacctgagcacagctggcctacacaggagcgacagattctccttgatggtacactttctagtttttacacagtgatttaggtccacgttcctgataccccatcctcctgaagccttcgttttcaagacttttaaaaagcacttctacttggttttttgatcagtgtagctcaattgtgacttaaagaacagaatctgtccttcactgtaagagctacagctttcaaatgagctcactggaaattcattctaatccccaagctggagaaacaggttaagagatcctgtttcatatgctgtatttaaaaagcaacaatgataacaacatagtaactgcgttacccaatggactttattttcatcatatgatttcaattctctttatagagttttatttcatatccggtgtggcttgttcttttcagcagtttgggaagttagttattagagttgatagtgaattgaattttcattaaacagtcacggttagaagaagctaatatttgaaacagattttaaaaacttgaaaaattacaggtgagatttctgtttatgccagattattgaagataaatataaatgtatgttggtgtgtgaaatgctctgtgccttagaagngtgacagttcagctctctgctgtggaaagtaacacagggcaatagaaacatatttgtggaattttagaacaaactattgctgactcatgagcactataataaccatcaggaagctcccaactgaagcaatgtaacagtgtaatctagttcaattcagcaaacattcatggagttcttcatgtctgtcaagccttgaggacacccacgaatggcaaatctccacgctagacactcaatacaggtaaataggccaccagttaatattcttgtttttattttcttcaagttagctaaaaatgagatgcgtatgaagtgaggaggctggatccaagtcttgattgcctttcagggggtcaaggtggtaagctgtgcagtgaagtcaaccagtggccatggcttacatgtttgtctctttgagatcgccaccagaaccatttgtgaactgatttgtgaaggaaaagtcagtcttactccaaagactattgcagggaggaacttccagagaggaaatccaatgacaatggtactggcatacacagggagcctcccttcaaaaagacagcgcccctagtcagggaggggatggcggtcctttgataagacccataggcaaacttcgagcccatcagcaggtcaaccctatgctgggaaagtgaggatttgggatttctgtgctataaacctgattctaaatgtaggacccaagtttctggactacttcagaatacctaaatgaatcatggaaacactctttatgattttttacaacaccagatatgcaggtgaattgtggaaaatgtcatgtagctgacactcaagaaatagggattcctaataatggcatgggtagggaacagatacacctggttagaaggtctagggttctgtatatgaagctgccagtctgtagctcttcgagaaagaaagttcaagtcatttgggggaaacttaagaatagtcatcagggttttagcttctaggcaccagccaaggatgagaacttctaaaatctaaaatccatttcaagaaataaagacgaacacatttgcaggaaggtaactgttataacccacaccatcagcagggggaaagccaagctgagaataaacccagagacaaagaaccctcggactcaggcaggacatggcaggatgttctggcacagcagactggagactgaggcagggcctgtgagtggacagagcacccctggctgggaagaagaagatggggtaggaggaggtcaggttccaaggatgcaggtctggaaaatgatatcggaggccctggagtttgtgagcttggctctagtcccaagaagggtgagggagaataagggtaagggagtattctaggcaaggaactaaggaaggaatccccttcttagagcagaggcacaagttagagcaggcccagcatttgggccaacttactgtggggcctctgagctgctcagctgggtctcctgtcctagagggaaggtggcccagagtctttggtggagcggaatctgtagatgaggttaagggactccagttgccaaggttgatctgaaacaggcagggagctaagctcatcagaacaccaacagattcatgttctcgtcttagctttcatctattctggtctcaatggcttcgggaaacacacatatacacatacaccatgcccttgaactcaaagcaaactacgctctcagggaaatacaaatatcacgttcttatagctgtaaagtatagcttagctatttatagaagactatgaggtactgttgtgagttatttgcttatcctgttttattctgaaaaatgaaagtgctcaatagaatttttaacgttggcaacaccataaggatttcttatgttaagtcccaacttggggttgcaaaatcattttttcccttaatacctgggtgttgtattagatctcataatttgacaagttaaccttttagaaatccacatatatctcaaatctggctactgcaaaaccagttttgacaggtcagattttcatatgtataggtataaatagccaacactcagtgaacaaaatcctttaagcattttggttacataaagttgtatgttttaagtgatcaaactaagaatattgtttataggttttaaaaaccaaaccaataaaatttttatttattcaataaaatatgcacagaacagatgcaaatgtgttatatacaat

SEQ ID NO: 63773 - DNA, 3114 bp, Homo sapiens
  misc_feature (912)..(912): n is a, c, g, or t
tagtagagacggggtttcaccatcttggccaggctggtcttgaacgcctgaccttgtgatctgcccgcctcggcctcccgaagtgctgggattacaggtgtgagccactgggcccggtctttttttttttaaatgatcataagatggcccattttggaccggaactgtcattgccagacagaattgtacctttagcacattctggtgccctggcctcttagtgttcaccagttgtactgcaatatagacaagatgtctctagagactcaaactactgttttattaaaaaagtaaacacctgagcacagctggcctacacaggagcgacagattctccttgatggtacactttctagtttttacacagtgatttaggtccacgttcctgataccccatcctcctgaagccttcgttttcaagacttttaaaaagcacttctacttggttttttgatcagtgtagctcaattgtgacttaaagaacagaatctgtccttcactgtaagagctacagctttcaaatgagctcactggaaattcattctaatccccaagctggagaaacaggttaagagatcctgtttcatatgctgtatttaaaaagcaacaatgataacaacatagtaactgcgttacccaatggactttattttcatcatatgatttcaattctctttatagagttttatttcatatccggtgtggcttgttcttttcagcagtttgggaagttagttattagagttgatagtgaattgaattttcattaaacagtcacggttagaagaagctaatatttgaaacagattttaaaaacttgaaaaattacaggtgagatttctgtttatgccagattattgaagataaatataaatgtatgttggtgtgtgaaatgctctgtgccttagaagngtgacagttcagctctctgctgtggaaagtaacacagggcaatagaaacatatttgtggaattttagaacaaactattgctgactcatgagcactataataaccatcaggaagctcccaactgaagcaatgtaacagtgtaatctagttcaattcagcaaacattcatggagttcttcatgtctgtcaagccttgaggacacccacgaatggcaaatctccacgctagacactcaatacaggtaaataggccaccagttaatattcttgtttttattttcttcaagttagctaaaaatgagatgcgtatgaagtgaggaggctggatccaagtcttgattgcctttcagggggtcaaggtggtaagctgtgcagtgaagtcaaccagtggccatggcttacatgtttgtctctttgagatcgccaccagaaccatttgtgaactgatttgtgaaggaaaagtcagtcttactccaaagactattgcagggaggaacttccagagaggaaatccaatgacaatggtactggcatacacagggagcctcccttcaaaaagacagcgcccctagtcagggaggggatggcggtcctttgataagacccataggcaaacttcgagcccatcagcaggtcaaccctatgctgggaaagtgaggatttgggatttctgtgctataaacctgattctaaatgtaggacccaagtttctggactacttcagaatacctaaatgaatcatggaaacactctttatgattttttacaacaccagatatgcaggtgaattgtggaaaatgtcatgtagctgacactcaagaaatagggattcctaataatggcatgggtagggaacagatacacctggttagaaggtctagggttctgtatatgaagctgccagtctgtagctcttcgagaaagaaagttcaagtcatttgggggaaacttaagaatagtcatcagggttttagcttctaggcaccagccaaggatgagaacttctaaaatctaaaatccatttcaagaaataaagacgaacacatttgcaggaaggtaactgttataacccacaccatcagcagggggaaagccaagctgagaataaacccagagacaaagaaccctcggactcaggcaggacatggcaggatgttctggcacagcagactggagactgaggcagggcctgtgagtggacagagcacccctggctgggaagaagaagatggggtaggaggaggtcaggttccaaggatgcaggtctggaaaatgatatcggaggccctggagtttgtgagcttggctctagtcccaagaagggtgagggagaataagggtaagggagtattctaggcaaggaactaaggaaggaatccccttcttagagcagaggcacaagttagagcaggcccagcatttgggccaacttactgtggggcctctgagctgctcagctgggtctcctgtcctagagggaaggtggcccagagtctttggtggagcggaatctgtagatgaggttaagggactccagttgccaaggttgatctgaaacaggcagggagctaagctcatcagaacaccaacagattcatgttctcgtcttagctttcatctattctggtctcaatggcttcgggaaacacacatatacacatacaccatgcccttgaactcaaagcaaactacgctctcagggaaatacaaatatcacgttcttatagctgtaaagtatagcttagctatttatagaagactatgaggtactgttgtgagttatttgcttatcctgttttattctgaaaaatgaaagtgctcaatagaatttttaacgttggcaacaccataaggatttcttatgttaagtcccaacttggggttgcaaaatcattttttcccttaatacctgggtgttgtattagatctcataatttgacaagttaaccttttagaaatccacatatatctcaaatctggctactgcaaaaccagttttgacaggtcagattttcatatgtataggtataaatagccaacactcagtgaacaaaatcctttaagcattttggttacataaagttgtatgttttaagtgatcaaactaagaatattgtttataggttttaaaaaccaaaccaataaaatttttatttattcaataaaatatgcacagaacagatgcaaatgtgttatatacaat

SEQ ID NO: 63774 - DNA, 1820 bp, Homo sapiens
  misc_feature (4)..(4): n is a, c, g, or t
aaanaaaattaggctaggtacgaggctgggtggtgatctgccgacagaaccatttgtgaactgatttgtgaaggaaaagtcagtcttactccaaagactattgcagggaggaacttccagagaggaaatccaatgacaatggtactggcatacacagggagcctcccttcaaaaagacagcgcccctagtcagggaggggatggcggtcctttgataagacccataggcaaacttcgagcccatcagcaggtcaaccctatgctgggaaagtgaggatttgggatttctgtgctataaacctgattctaaatgtaggacccaagtttctggactacttcagaatacctaaatgaatcatggaaacactctttatgattttttacaacaccagatatgcaggtgaattgtggaaaatgtcatgtagctgacactcaagaaatagggattcctaataatggcatgggtagggaacagatacacctggttagaaggtctagggttctgtatatgaagctgccagtctgtagctcttcgagaaagaaagttcaagtcatttgggggaaacttaagaatagtcatcagggttttagcttctaggcaccagccaaggatgagaacttctaaaatctaaaatccatttcaagaaataaagacgaacacatttgcaggaaggtaactgttataacccacaccatcagcagggggaaagccaagctgagaataaacccagagacaaagaaccctcggactcaggcaggacatggcaggatgttctggcacagcagactggagactgaggcagggcctgtgagtggacagagcacccctggctgggaagaagaagatggggtaggaggaggtcaggttccaaggatgcaggtctggaaaatgatatcggaggccctggagtttgtgagcttggctctagtcccaagaagggtgagggagaataagggtaagggagtattctaggcaaggaactaaggaaggaatccccttcttagagcagaggcacaagttagagcaggcccagcatttgggccaacttactgtggggcctctgagctgctcagctgggtctcctgtcctagagggaaggtggcccagagtctttggtggagcggaatctgtagatgaggttaagggactccagttgccaaggttgatctgaaacaggcagggagctaagctcatcagaacaccaacagattcatgttctcgtcttagctttcatctattctggtctcaatggcttcgggaaacacacatatacacatacaccatgcccttgaactcaaagcaaactacgctctcagggaaatacaaatatcacgttcttatagctgtaaagtatagcttagctatttatagaagactatgaggtactgttgtgagttatttgcttatcctgttttattctgaaaaatgaaagtgctcaatagaatttttaacgttggcaacaccataaggatttcttatgttaagtcccaacttggggttgcaaaatcattttttcccttaatacctgggtgttgtattagatctcataatttgacaagttaaccttttagaaatccacatatatctcaaatctggctactgcaaaaccagttttgacaggtcagattttcatatgtataggtataaatagccaacactcagtgaacaaaatcctttaagcattttggttacataaagttgtatgttttaagtgatcaaactaagaatattgtttataggttttaaaaaccaaaccaataaaatttttatttattcaataaaatatgcacagaacagatgcaaatgtgttatatacaat

SEQ ID NO: 63775 - DNA, 1807 bp, Homo sapiens
  misc_feature (226)..(226): n is a, c, g, or t
  misc_feature (579)..(579): n is a, c, g, or t
gatcattggcggctgcacgaaggatgaacggtttgtggcagaggtgacctgcctggaccccctgaggcgcagccgcctggaggtggccaagctcccgctaacagagcatgagctggagagtgagaataagaagtgggtggagtttgcatgcgtgacattgaaaaatgaggtctacatctcaggtggcaaagaaacacagcatgatgtttggaaatataattcttcnatcaacaagtggattcagattgagtatttaaacataggccgctggaggcataagatggtggtgttgggtggcaaggtctatgtgatcggaggctttgacggcttacagagaatcaacaacgtggagacctacgacccctttcacaactgctggtcagaggccgcacccctccttgtccatgtcagttcctttgcagccaccagccataagaagaagctgtatgtgatcgggggagggcccaatgggaaactggccacagacaagactcagtgttatgacccttccaccaacaagtggagtttgaaggcggccatgcccgtggaggctaaatgcatcaatgcagtgagtttccnggaccgcatctatgtcgttggtggggccatgagagcgctgtacgcctacagcccgctggaagacagctggtgcctggtgacccagctcagccacgagcgggccagctgcggtatcgcgccctgcaacaaccggctctacatcaccggcgggcgggacgagaagaacgaggttatcgccacggtgctgtgctgggaccccgaggcccagaaactgacagaggagtgcgtcctgccccggggcgtgtcgcaccacggcagcgtcaccatcaggaagtcgtacacccacatccgcaggatcgtgcccggagcagtgtctgtctgacggcaggatggggagctggagagcccccccgaccctcagcgtacccgcctcacctctcaccctcctccagtcccacttcaggcagcaggctcgagtttgaggccatacatcaggggatccccttgactcactttgggggaaccttggaagtcacagtttggggtcacttgagaccggccaggaatgtttgcatgacctacctcaggaggggaggcgaggaagagtaatatttagcattcaggacccacccaccctatgccggcttctgtgccaggcacttccttttatcggttcatttaacctggtgactggctcttatcacttctagtttacaggtgagggaaccaagtttcacagaggctaagtggcgtgcccctgatcactcagatagcaagtagctaccccaggagtctaaaatccaggtctttcatctccgaagtcaatgctctttccaccatgctgcctatctcagagcaggaaaaacaaacaaaaaacaacaacaaaacctggctcgtgctgggcgtggcggctcacgcctgtaatcccagccctatgggaggctgaggcgggcggatgacctgaggtcaggagttcaagaccagcctggccaacatggtgagaccgccccgtctctactaaaaatacaaaaattagccgcgtgcagtggcaggcgcctgtaattccagctactcaggaggctgaggcaggaggatcacttgaacttgggaggtggaggttgcagtgagccgagatcgccacactgcactgcagcccgggaaacaaaagtgaagctctgtctccaaaacaaaaacaaaaacaaagaaacctggctcatttcttgtttcggcaagtctgctaaaagattcactcagcacagcagggaaataaaggtgtttcctgctttct

SEQ ID NO: 63776 - DNA, 982 bp, Homo sapiens
  misc_feature (226)..(226): n is a, c, g, or t
  misc_feature (579)..(579): n is a, c, g, or t
gatcattggcggctgcacgaaggatgaacggtttgtggcagaggtgacctgcctggaccccctgaggcgcagccgcctggaggtggccaagctcccgctaacagagcatgagctggagagtgagaataagaagtgggtggagtttgcatgcgtgacattgaaaaatgaggtctacatctcaggtggcaaagaaacacagcatgatgtttggaaatataattcttcnatcaacaagtggattcagattgagtatttaaacataggccgctggaggcataagatggtggtgttgggtggcaaggtctatgtgatcggaggctttgacggcttacagagaatcaacaacgtggagacctacgacccctttcacaactgctggtcagaggccgcacccctccttgtccatgtcagttcctttgcagccaccagccataagaagaagctgtatgtgatcgggggagggcccaatgggaaactggccacagacaagactcagtgttatgacccttccaccaacaagtggagtttgaaggcggccatgcccgtggaggctaaatgcatcaatgcagtgagtttccnggaccgcatctatgtcgttggtggggccatgagagcgctgtacgcctacagcccgctggaagacagctggtgcctggtgacccagctcagccacgagcgggccagctgcggtatcgcgccctgcaacaaccggctctacatcaccggcgggcgggacgagaagaacgaggttatcgccacggtgctgtgctgggaccccgaggcccagaaactgacagaggagtgcgtcctgccccggggcgtgtcgcaccacggcagcgtcaccatcaggaagtcgtacacccacatccgcaggatcgtgcccggagcagtgtctgtctgacggcaggatggggagctggagagcccccccgacctcaccccggatgcccgggaccttgtcaaaaagtttctgaaacggaag

SEQ ID NO: 63777 - DNA, 4542 bp, Homo sapiens
  misc_feature (226)..(226): n is a, c, g, or t
  misc_feature (579)..(579): n is a, c, g, or t
  misc_feature (2340)..(2340): n is a, c, g, or t
gatcattggcggctgcacgaaggatgaacggtttgtggcagaggtgacctgcctggaccccctgaggcgcagccgcctggaggtggccaagctcccgctaacagagcatgagctggagagtgagaataagaagtgggtggagtttgcatgcgtgacattgaaaaatgaggtctacatctcaggtggcaaagaaacacagcatgatgtttggaaatataattcttcnatcaacaagtggattcagattgagtatttaaacataggccgctggaggcataagatggtggtgttgggtggcaaggtctatgtgatcggaggctttgacggcttacagagaatcaacaacgtggagacctacgacccctttcacaactgctggtcagaggccgcacccctccttgtccatgtcagttcctttgcagccaccagccataagaagaagctgtatgtgatcgggggagggcccaatgggaaactggccacagacaagactcagtgttatgacccttccaccaacaagtggagtttgaaggcggccatgcccgtggaggctaaatgcatcaatgcagtgagtttccnggaccgcatctatgtcgttggtggggccatgagagcgctgtacgcctacagcccgctggaagacagctggtgcctggtgacccagctcagccacgagcgggccagctgcggtatcgcgccctgcaacaaccggctctacatcaccggcgggcgggacgagaagaacgaggttatcgccacggtgctgtgctgggaccccgaggcccagaaactgacagaggagtgcgtcctgccccggggcgtgtcgcaccacggcagcgtcaccatcaggaagtcgtacacccacatccgcaggatcgtgcccggagcagtgtctgtctgacggcaggatggggagctggagagcccccccgaccctcagcgtacccgcctcacctctcaccctcctccagtcccacttcaggcagcaggctcgagtttgaggccatacatcaggggatccccttgactcactttgggggaaccttggaagtcacagtttggggtcacttgagaccggccaggaatgtttgcatgacctacctcaggaggggaggcgaggaagagtaatatttagcattcaggacccacccaccctatgccggcttctgtgccaggcacttccttttatcggttcatttaacctggtgactggctcttatcacttctagtttacaggtgagggaaccaagtttcacagaggctaagtggcgtgcccctgatcactcagatagcaagtagctaccccaggagtctaaaatccaggtctttcatctccgaagtcaatgctctttccaccatgctgcctatctcagagcaggaaaaacaaacaaaaaacaacaacaaaacctggctcgtgctgggcgtggcggctcacgcctgtaatcccagccctatgggaggctggtcttgaacgcctgaccttgtgatctgcccgcctcggcctcccgaagtgctgggattacaggtgtgagccactgggcccggtctttttttttttaaatgatcataagatggcccattttggaccggaactgtcattgccagacagaattgtacctttagcacattctggtgccctggcctcttagtgttcaccagttgtactgcaatatagacaagatgtctctagagactcaaactactgttttattaaaaaagtaaacacctgagcacagctggcctacacaggagcgacagattctccttgatggtacactttctagtttttacacagtgatttaggtccacgttcctgataccccatcctcctgaagccttcgttttcaagacttttaaaaagcacttctacttggttttttgatcagtgtagctcaattgtgacttaaagaacagaatctgtccttcactgtaagagctacagctttcaaatgagctcactggaaattcattctaatccccaagctggagaaacaggttaagagatcctgtttcatatgctgtatttaaaaagcaacaatgataacaacatagtaactgcgttacccaatggactttattttcatcatatgatttcaattctctttatagagttttatttcatatccggtgtggcttgttcttttcagcagtttgggaagttagttattagagttgatagtgaattgaattttcattaaacagtcacggttagaagaagctaatatttgaaacagattttaaaaacttgaaaaattacaggtgagatttctgtttatgccagattattgaagataaatataaatgtatgttggtgtgtgaaatgctctgtgccttagaagngtgacagttcagctctctgctgtggaaagtaacacagggcaatagaaacatatttgtggaattttagaacaaactattgctgactcatgagcactataataaccatcaggaagctcccaactgaagcaatgtaacagtgtaatctagttcaattcagcaaacattcatggagttcttcatgtctgtcaagccttgaggacacccacgaatggcaaatctccacgctagacactcaatacaggtaaataggccaccagttaatattcttgtttttattttcttcaagttagctaaaaatgagatgcgtatgaagtgaggaggctggatccaagtcttgattgcctttcagggggtcaaggtggtaagctgtgcagtgaagtcaaccagtggccatggcttacatgtttgtctctttgagatcgccaccagaaccatttgtgaactgatttgtgaaggaaaagtcagtcttactccaaagactattgcagggaggaacttccagagaggaaatccaatgacaatggtactggcatacacagggagcctcccttcaaaaagacagcgcccctagtcagggaggggatggcggtcctttgataagacccataggcaaacttcgagcccatcagcaggtcaaccctatgctgggaaagtgaggatttgggatttctgtgctataaacctgattctaaatgtaggacccaagtttctggactacttcagaatacctaaatgaatcatggaaacactctttatgattttttacaacaccagatatgcaggtgaattgtggaaaatgtcatgtagctgacactcaagaaatagggattcctaataatggcatgggtagggaacagatacacctggttagaaggtctagggttctgtatatgaagctgccagtctgtagctcttcgagaaagaaagttcaagtcatttgggggaaacttaagaatagtcatcagggttttagcttctaggcaccagccaaggatgagaacttctaaaatctaaaatccatttcaagaaataaagacgaacacatttgcaggaaggtaactgttataacccacaccatcagcagggggaaagccaagctgagaataaacccagagacaaagaaccctcggactcaggcaggacatggcaggatgttctggcacagcagactggagactgaggcagggcctgtgagtggacagagcacccctggctgggaagaagaagatggggtaggaggaggtcaggttccaaggatgcaggtctggaaaatgatatcggaggccctggagtttgtgagcttggctctagtcccaagaagggtgagggagaataagggtaagggagtattctaggcaaggaactaaggaaggaatccccttcttagagcagaggcacaagttagagcaggcccagcatttgggccaacttactgtggggcctctgagctgctcagctgggtctcctgtcctagagggaaggtggcccagagtctttggtggagcggaatctgtagatgaggttaagggactccagttgccaaggttgatctgaaacaggcagggagctaagctcatcagaacaccaacagattcatgttctcgtcttagctttcatctattctggtctcaatggcttcgggaaacacacatatacacatacaccatgcccttgaactcaaagcaaactacgctctcagggaaatacaaatatcacgttcttatagctgtaaagtatagcttagctatttatagaagactatgaggtactgttgtgagttatttgcttatcctgttttattctgaaaaatgaaagtgctcaatagaatttttaacgttggcaacaccataaggatttcttatgttaagtcccaacttggggttgcaaaatcattttttcccttaatacctgggtgttgtattagatctcataatttgacaagttaaccttttagaaatccacatatatctcaaatctggctactgcaaaaccagttttgacaggtcagattttcatatgtataggtataaatagccaacactcagtgaacaaaatcctttaagcattttggttacataaagttgtatgttttaagtgatcaaactaagaatattgtttataggttttaaaaaccaaaccaataaaatttttatttattcaataaaatatgcacagaacagatgcaaatgtgttatatacaat

SEQ ID NO: 63778 - DNA, 841 bp, Homo sapiens
  misc_feature (28)..(28): n is a, c, g, or t
cagcaaagtgaggtgacgtcccaccccnagggtgtgttggaggtaaaatcccggggagccactgaagggggaggtaaagtgggaggtgaaggggcccacagggaggctggaggggagtggcaagccccgagtctgaccttcagcgtgagccaccgcgcccggccaaaattattttttttaaagggtgtgtagagccacccaccttgaaatgatctatcaagggtgacagccagcccaaggccatcttacaagggaataaaagccctaccctccctctcctgactttgtctccagccagggatttctactgacaacccagccacaagctggaagaaggagatctattgatatagggtggaccttgggactggtgggaaagggtggagagtacaacatattcagctcagtagtggagatggaaagaggcaacagactcaaacttaagggatttcaaggcgggcagatcacttgaggccaggagttcgagaccagcctggccagctgaggcatgagaattgcttgcgcccccaggaggtgggggttgcagtgagccgagatcacaccagtatactccagcctgggtgacagagcaaaacttgtctcaaaaaaaaaaaaaaaaaaaaagagagagagattaaaggatcggatttggggagtgagggagatttttggcttgaacaatttggtggcctgttgtttgaggggtgacactagaagagggtctaccttgtggggtgggtaacatcatgttccgtttccagtgcgtttggggtgcctggagacatccgagtataaatgccaataagccacttgattggataggtctggggctggggtagcg

SEQ ID NO: 63779 - DNA, 531 bp, Homo sapiens
  misc_feature (28)..(28): n is a, c, g, or t
cagcaaagtgaggtgacgtcccaccccnagggtgtgttggaggtaaaatcccggggagccactgaagggggaggtaaagtgggaggtgaaggggcccacagggaggctggaggggagtggcaagccccgagtctgaccttcagcgtgagccaccgcgcccggccaaaattattttttttaaagggtgtgtagagccacccaccttgaaatgatctatcaagggtgacagccagcccaaggccatcttacaagggaataaaagccctaccctccctctcctgactttgtctccagccagggatttctactgacaacccagccacaagctggaagaaggagatctattgatatagggtggaccttgggactggtgggaaagggtggagagtacaacatattcagctcagtagtggagatggaaagaggcaacagactcaaacttaagggatttcaaggcgggcagatctgctgctcggcctcccaaagtgctgggattacaggcataagcatcatgcccggcttgaattctgt

SEQ ID NO: 63780 - DNA, 1274 bp, Homo sapiens
  misc_feature (202)..(202): n is a, c, g, or t
  misc_feature (1044)..(1044): n is a, c, g, or t
  misc_feature (1263)..(1264): n is a, c, g, or t
aattaattttgattacatttaaaattctatatggcaaaaataccataattaaagataaaaggcaaagaacaaattgggaaaaatatttttcaacatatataaccaagggctaatttctctaacacctaaaaagttcttataaatcaataaaaagaaaaccaacatctcaatggaaaaagaacaaagctcataaagagttcanagaaaaaggatatacaaatggctttaaacatgtgaaagaatgttcaacttcactcacaataagaaaaaatacaaattatgagttgcttcagcatcctggtgttgctgtgccgtgggtcctgtgcggtcacttagccaagatgcctgaggaaacccagacccaagaccaaccgatggaggaggaggaggttgagacattcgcctttcaggcagaaattgcccagttgatgtcattgatcatcaatactttctactcgaacaaagagatctttctgagagagctcatttcaaattcatcagatgcattggacaaaatctggtatgaaagcttgacagatcccagtaaattagactctgggaaagagctgcatattaaccttataccaaacaaacaagatcaaactctcactattgtggatactggaattggaatgaccaaggctgacttgatcaataaccttggtactatcgccaagtctgggaccaaagcgttcatggaagctttgcaggctggtgcagatatctctatgattggccagttcggtgttagtttttattctgcttatttggttgctgagaaagtaactgtgatcaccaaacataatgatgatgagcagtacgcctgggagtcctcagcagggggatcattcacagtgaggacagacacaggtgaacgtatgggtcgtggaacaaaggttatcctacacctgaaagaagaccaaactgagtacttggaggaacaaagaataaaggagattgtgaagaaacattctcagcttattggatatcccattactctttttgtggagaaggaatgtgataaagaagtcagcgacgatgagnctgaagaaaaggaagacaaagaagaagaaaaagaaaaagaagagaaagagtccaaagacaaacctgaaattgaagatgttggttctgatgaggaagaagaaaagaaggatggtgacaagaagaagaagaagactaaggaaaagtacatcgaccaagaagaactcaacaaaacaaagcccatctggaccagaaatcccgacgatattactaatgaggagnncggagaattc

SEQ ID NO: 63781 - DNA, 3371 bp, Homo sapiens
aactccaggaatttgtggcggagagggcaaataactgcggctctcccggcgccccgatgctcgcaccatgtcgaggcgcaagcaggcgaaaccccagcacatcaactcggaggaggaccagggcgagcagcagccgcagcagcagaccccggagtttgcagatgcggccccagcggcgcccgcggcgggggagctgggtgctccagtgaaccacccagggaatgacgaggtggcgagtgaggatgaagccacagtaaagcggcttcgtcgggaggagacgcacgtctgtgagaaatgctgtgcggagttcttcagcatctctgagttcctggaacataagaaaaattgcactaaaaatccacctgtcctcatcatgaatgacagcgaggggcctgtgccttcagaagacttctccggagctgtactgagccaccagcccaccagtcccggcagtaaggactgtcacagggagaatggcggcagctcagaggacatgaaggagaagccggatgcggagtctgtggtgtacctaaagacagagacagccctgccacccaccccccaggacataagctatttagccaaaggcaaagtggccaacactaatgtgaccttgcaggcactacggggcaccaaggtggcggtgaatcagcggagcgcggatgcactccctgcccccgtgcctggtgccaacagcatcccgtgggtcctcgagcagatcttgtgtctgcagcagcagcagctacagcagatccagctcaccgagcagatccgcatccaggtgaacatgtgggcctcccacgccctccactcaagcggggcaggggccgacactctgaagaccttgggcagccacatgtctcagcaggtttctgcagctgtggctttgctcagccagaaagctggaagccaaggtctgtctctggatgccttgaaacaagccaagctacctcacgccaacatcccttctgccaccagctccctgtccccagggctggcacccttcactctgaagccggatgggacccgggtgctcccgaacgtcatgtcccgcctcccgagcgctttgcttcctcaggccccgggctcggtgctcttccagagccctttctccactgtggcgctagacacatccaagaaagggaaggggaagccaccgaacatctccgcggtggatgtcaaacccaaagacgaggcggccctctacaagcacaagtgtaagtactgtagcaaggtttttgggactgatagctccttgcagatccacctccgctcccacactggagagagacccttcgtgtgctctgtctgtggtcatcgcttcaccaccaagggcaacctcaaggtgcactttcaccgacatccccaggtgaaggcaaacccccagctgtttgccgagttccaggacaaagtggcggccggcaatggcatcccctatgcactctctgtacctgaccccatagatgaaccgagtctttctttagacagcaaacctgtccttgtaaccacctctgtagggctacctcagaatctttcttcggggactaatcccaaggacctcacgggtggctccttgcccggtgacctgcagcctgggccttctccagaaagtgagggtggacccctgagccagggtcagagaccctgaaattgcagcagttggtggagaacattgacaaggccaccactgatcccaacgaatgtctcatttgccaccgagtcttaagctgtcagagctccctcaagatgcattatcgcacccacaccggggagagaccgttccagtgtaagatctgtggccgagccttttctaccaaaggtaacctgaagacacaccttggggttcaccgaaccaacacatccattaagacgcagcattcgtgccccatctgccagaagaagttcactaatgccgtgatgctgcagcaacatattcggatgcacatgggcggtcagattcccaacacgcccctgccagagaatccctgtgactttacgggttctgagccaatgaccgtgggtgagaacggcagcaccggcgctatctgccatgatgatgtcatcgaaagcatcgatgtagaggaagtcagctcccaggaggctcccagcagctcctccaaggtccccacgcctcttcccagcatccactcggcatcacccacgctagggtttgccatgatggcttccttagatgccccagggaaagtgggtcctgccccttttaacctgcagcgccagggcagcagagaaaacggttccgtggagagcgatggcttgaccaacgactcatcctcgctgatgggagaccaggagtatcagagccgaagcccagatatcctggaaaccacatccttccaggcactctccccggccaatagtcaagccgaaagcatcaagtcaaagtctcccgatgctgggagcaaagcagagagctccgagaacagccgcactgagatggaaggtcggagcagtctcccttccacgtttatccgagccccgccgacctatgtcaaggttgaagttcctggcacatttgtgggaccctcgacattgtccccagggatgacccctttgttagcagcccagccacgccgacaggccaagcaacatggctgcacacggtgtgggaagaacttctcgtctgctagcgctcttcagatccacgagcggactcacactggagagaagccttttgtgtgcaacatttgtgggcgagcttttaccaccaaaggcaacttaaaggttcactacatgacacacggggcgaacaataactcagcccgccgtggaaggaagttggccatcgagaacaccatggctctgttaggtacggacggaaaaagagtctcagaaatctttcccaaggaaatcctggccccttcagtgaatgtggaccctgttgtgtggaaccagtacaccagcatgctcaatggcggtctggccgtgaagaccaatgagatctctgtgatccagagtgggggggttcctaccctcccggtttccttgggggccacctccgttgtgaataacgccactgtctccaagatggatggctcccagtcgggtatcagtgcagatgtggaaaaaccaagtgctactgacggcgttcccaaacaccagtttcctcacttcctggaagaaaacaagattgcggtcagctaagggagaacttgcgtggaaggagcaatgcagacacagtgaaatctctagaatctgctttgttttgtaagaactcatctcctcctgttttctttttcttactgatatgcaaatgatgtttactacgttggttgtgaccacaacctcaggcaagtgctacaatcacgattgttgctatgctgctttgcaaaaagttgaaaaaataaaaaaaa

SEQ ID NO: 63782 - DNA, 3438 bp, Homo sapiens
aactccaggaatttgtggcggagagggcaaataactgcggctctcccggcgccccgatgctcgcaccatgtcgaggcgcaagcaggcgaaaccccagcacatcaactcggaggaggaccagggcgagcagcagccgcagcagcagaccccggagtttgcagatgcggccccagcggcgcccgcggcgggggagctgggtgctccagtgaaccacccagggaatgacgaggtggcgagtgaggatgaagccacagtaaagcggcttcgtcgggaggagacgcacgtctgtgagaaatgctgtgcggagttcttcagcatctctgagttcctggaacataagaaaaattgcactaaaaatccacctgtcctcatcatgaatgacagcgaggggcctgtgccttcagaagacttctccggagctgtactgagccaccagcccaccagtcccggcagtaaggactgtcacagggagaatggcggcagctcagaggacatgaaggagaagccggatgcggagtctgtggtgtacctaaagacagagacagccctgccacccaccccccaggacataagctatttagccaaaggcaaagtggccaacactaatgtgaccttgcaggcactacggggcaccaaggtggcggtgaatcagcggagcgcggatgcactccctgcccccgtgcctggtgccaacagcatcccgtgggtcctcgagcagatcttgtgtctgcagcagcagcagctacagcagatccagctcaccgagcagatccgcatccaggtgaacatgtgggcctcccacgccctccactcaagcggggcaggggccgacactctgaagaccttgggcagccacatgtctcagcaggtttctgcagctgtggctttgctcagccagaaagctggaagccaaggtctgtctctggatgccttgaaacaagccaagctacctcacgccaacatcccttctgccaccagctccctgtccccagggctggcacccttcactctgaagccggatgggacccgggtgctcccgaacgtcatgtcccgcctcccgagcgctttgcttcctcaggccccgggctcggtgctcttccagagccctttctccactgtggcgctagacacatccaagaaagggaaggggaagccaccgaacatctccgcggtggatgtcaaacccaaagacgaggcggccctctacaagcacaagtgtaagtactgtagcaaggtttttgggactgatagctccttgcagatccacctccgctcccacactggagagagacccttcgtgtgctctgtctgtggtcatcgcttcaccaccaagggcaacctcaaggtgcactttcaccgacatccccaggtgaaggcaaacccccagctgtttgccgagttccaggacaaagtggcggccggcaatggcatcccctatgcactctctgtacctgaccccatagatgaaccgagtctttctttagacagcaaacctgtccttgtaaccacctctgtagggctacctcagaatctttcttcggggactaatcccaaggacctcacgggtggctccttgcccggtgacctgcagcctgggccttctccagaaagtgagggtggacccacactccctggggtgggaccaaactataattccccaagggctggtggcttccaagggagtgggacccctgagccagggtcagagaccctgaaattgcagcagttggtggagaacattgacaaggccaccactgatcccaacgaatgtctcatttgccaccgagtcttaagctgtcagagctccctcaagatgcattatcgcacccacaccggggagagaccgttccagtgtaagatctgtggccgagccttttctaccaaaggtaacctgaagacacaccttggggttcaccgaaccaacacatccattaagacgcagcattcgtgccccatctgccagaagaagttcactaatgccgtgatgctgcagcaacatattcggatgcacatgggcggtcagattcccaacacgcccctgccagagaatccctgtgactttacgggttctgagccaatgaccgtgggtgagaacggcagcaccggcgctatctgccatgatgatgtcatcgaaagcatcgatgtagaggaagtcagctcccaggaggctcccagcagctcctccaaggtccccacgcctcttcccagcatccactcggcatcacccacgctagggtttgccatgatggcttccttagatgccccagggaaagtgggtcctgccccttttaacctgcagcgccagggcagcagagaaaacggttccgtggagagcgatggcttgaccaacgactcatcctcgctgatgggagaccaggagtatcagagccgaagcccagatatcctggaaaccacatccttccaggcactctccccggccaatagtcaagccgaaagcatcaagtcaaagtctcccgatgctgggagcaaagcagagagctccgagaacagccgcactgagatggaaggtcggagcagtctcccttccacgtttatccgagccccgccgacctatgtcaaggttgaagttcctggcacatttgtgggaccctcgacattgtccccagggatgacccctttgttagcagcccagccacgccgacaggccaagcaacatggctgcacacggtgtgggaagaacttctcgtctgctagcgctcttcagatccacgagcggactcacactggagagaagccttttgtgtgcaacatttgtgggcgagcttttaccaccaaaggcaacttaaaggttcactacatgacacacggggcgaacaataactcagcccgccgtggaaggaagttggccatcgagaacaccatggctctgttaggtacggacggaaaaagagtctcagaaatctttcccaaggaaatcctggccccttcagtgaatgtggaccctgttgtgtggaaccagtacaccagcatgctcaatggcggtctggccgtgaagaccaatgagatctctgtgatccagagtgggggggttcctaccctcccggtttccttgggggccacctccgttgtgaataacgccactgtctccaagatggatggctcccagtcgggtatcagtgcagatgtggaaaaaccaagtgctactgacggcgttcccaaacaccagtttcctcacttcctggaagaaaacaagattgcggtcagctaagggagaacttgcgtggaaggagcaatgcagacacagtgaaatctctagaatctgctttgttttgtaagaactcatctcctcctgttttctttttcttactgatatgcaaatgatgtttactacgttggttgtgaccacaacctcaggcaagtgctacaatcacgattgttgctatgctgctttgcaaaaagttgaaaaaataaaaaaaa

SEQ ID NO: 63783 - DNA, 779 bp, Homo sapiens
acttggaaaccagagtttgtggaaagtgaagaagtgatgtgctggagccagaggctcagtgctgggctggggctggctggcctgacccaagccacctggttactcagagcccagcactgggtggaatccctggggtctacaggcattcacccatccccagaagcccagatgagtctctgaacagttggctgtgagtgagatgacctcagaaatggaagaggtcagtgccttagccagacaggcactgacatgaatgtcataggcatgctccagggccttctgagaaatggaaataccatctggatggaatgacctttatgcaacaaaaagtttaattaaaagaagtctcctcaacaggcattgaatattagtgctcgtcaagattcaaaagagatttcccttagaataattcctcaccacatatattgaggttctggagtgattcatcctaccctcatacataaatgtttgtgctaaccaggctgatgcaatgtgacttgtgtacataagcatttttaaaatggaaaagcaattctgggacaacaagggattctggaagtgtcaggaaaagggtaagttgaagaaaggacttttaattcaacaggtcttgggtagcagaagagatataagccttttaaagagagagaagctaattggtttctgataataggtgcctgttggaaagaaaatattgacctcttgggatggtttgggtttggcaaaggtgcatggtcatggtatctcagtgggatttgactcctcatttggatacaagttta

SEQ ID NO: 63784 - DNA, 328 bp, Homo sapiens
cagcagcacaatctaggctcactgaaacctcagcctcctgggttcaagcaattctcctgcctcagtcaccctacatagtcatcattctgacatcatctaaaagaaattagtatctgcattgcatccttaaagaagaagggacaaaagacatgtccaaactgtctgtctgttctagtggaataaaacattaatttaatatgtattttggacaaccaccaacctagagattggaaacttttctcaaggatatatctctctgtatgtgggctactggctttgtggcttttctgtaggaaaattaaaattctagttttgttctcccttatca

SEQ ID NO: 63785 - DNA, 386 bp, Homo sapiens
  misc_feature (4)..(4): n is a, c, g, or t
  misc_feature (41)..(41): n is a, c, g, or t
  misc_feature (106)..(106): n is a, c, g, or t
gaanaaaatcagattcactctctctcttctggagctgaaanaactttcttttccctgcccataggacatcaaggacccccaggttctctggtcttgggactctganacttgcacccaggaatcctgccccaggctctcaggcctttggactcagactgagctacttcactggctttcctggttctccagcttgaagatggcagatcgtgggacttctcagcctccataattgagtgagccaattccctggagaatacaacaagaagatgcccatctgtagaccaggaggtggtccctccccagaaactggatgggccagcacgttgattctgaacttctagcctccagaactgtaagaaataaatttctattgtttaagccacctg

SEQ ID NO: 63786 - DNA, 569 bp, Homo sapiens
gcagtcttgactcactgcacctggacttcccaggctcaagcaatcctcccacctcagactcctgagtagctgggactacaggcacatgccaccaagcctggctaagtttgttagttttttatagagacaaggtctcactatgttgcccagtctgatctcgaacacctagccacaagcaattctcctgccttgtcttcccagagtgctgggattacaggtgtggaccactgaacccagcaggtcttgctttttttttgagatggaggtgtgagccaccacatccagccaggttttctctttttttttttttttgagacggagtcttgctctgtcgcccaggcggaggttgcagtgagctgagaactcaccattgcactccagcctggatgacagagtgagactccatctcaaaaaagaagaacaaactacagcggggagagggcgaggggaagaagatagtgggggaaaaagagcaccgagaaagggagaagagatggggagagctctattgtgtcactgaacattcctcagttaaagttaaaatgttctcataagttaaaaaaaaaaaa

SEQ ID NO: 63787 - DNA, 373 bp, Homo sapiens
caagtaaagactaaaaattaaaatcatgatgggggatgccatcatgactggccactctgaaggccgggcttgtgtcctgtctcccctcagactgagggctccctgagggcagagcctgtgcctgctccatcagacaaaggtagaaccagcttctccatcaggctagaagcaccctgagactcagggagaggcatggagcatctgggaacaagagctgaggtgtcctagaaacctcccaggaacagacccagggatagaagttggcaggcaactggcaaaggaccctcttcccagccaggccaaatgtgggagggcttccctctcctcctccccatccagcccccgaccccattaaacctttaaattaacttca

SEQ ID NO: 63788 - DNA, 2304 bp, Homo sapiens
tctcctaccctagcgatgacctcttccaggtagcggtcccttgtgcgcggttggtagtacccagggcttagagcgagcgcgcacccggggctgcggtggaggctcctctgtgagctctacctgcctcccatcccgaggcctaggagaaggcgggtacctggccgccagctgacgccctggtggtcactgtggccctttagaaacacacagctccatttcataagcaaaacctcctcccccagccccggctcaagcaccattcacactgccatccaagccgcgggcggccgtggaaagggcactggaccacccgtctcgcgggcgccgtgaggtacagcgatggctcccagtgccgggcagttcaggtgacaggagctttccaaagacacctagggtccaaaaagcagggttcccatctcacaatttggatttgctcatagaggagcagataggacaggctgctcacatttctcctttgaaggcacttccacagtggactgtcgctggcgggcccctgggcggtgaccatcggtgccccgggagacagcgaggaattgaccctttggtcactgtgtaagcccccactaggctgctgctctttccaaagggaaggggctgggggaaccaggaaggaagcccacccccacacctgcatctgtctgggttcagccaggtaaagggactcactgtgatcgtggcccctccacggggcaggacgaccctgcctccgtctcgtgacacaatgagggagcagcccgatccctgagcggtctcttttttggtgcctcctacatttcttgaggaaaaaaaaaatgtgtccttagctaccctgttttgagcagcaatatgcagcctcttccttccaagattacctccggagaacaccgttcttggccaaggacactgaggagctaaatctgcctcactaaggaacgagcttgtttccaagaaatgaggataagatgggtaaaatcctcactaacaaagaatactataaaacctgtgagagccttagaatagcttctaataatcctaggacaggagaaagcgcctggctttgctgtgagtgtatcctcagaaaaagcaggaggtcgaccatctcttcactggagccagcttctcctctagaaacgatgcttttttccctaactaaagagcagcaaaaacaaaaaaaaagggggggcgaggggattttttttacttgtttgagaaattataataaaataattgagtatctcctgtgagtaatgcctttttgtttttaattattccacagcaggtggagttttcagtaatttgttcaagttttgcataagtggttccttaaatcaaaaattatttattaaataggatctttaagaaattttttgaaagttttacttttcctgctgaacaatattttcaatgtgtggtaattactgtactaacatccatgtccctaatattactggggtttcttttattactcagaaaacaaaagtggttttttaaaaatctcatggagagggtctgtggcagctttctggactgattcttcgtgtcacgctgagcagctgctttggcatccaaagctgtgggatcacagaaagtgttgcttcaggtgtggatgccagccactcctcatgctcgtcactcttaaaagattgagacacccaaccttaaaaatgctccaataatccattcagaaaccaaactcatatgcacaagatgtcaaggaggcataaagtcaattcttgcttgtttttttcatttcttaatgtaaaaacagccaaccagaaatttctaaaactggctatgctaattcagatattttctttctcacgctatctgccaggtttgtctaatttaaaaaataaaaaaataaaacagaataaaaaccgtccattgtaatagaggaaaaccttccaaaccaggcagagtacgtaattatcaaaacaccaggacctattctacccttgcatttccaagttacctccacccatcaccatctgatgacagatgtgccctaaataagagcctgagataaagccactggctgcatcctgcaccccagcttctcaatgtggtaacgaggcgccagacgcctgtagacacctgctccaggctgatacattaccactcagtccacatgacttaggaatagccatttccttttgtgagagaagctggatccatccttcctctaaacagtattaaaatgcaaaagggagagagcggatggtcatattaaatgtgctagtcccgtgcaccgacagcatgctccttgagaagaggcgtgtagacctcgtccctggccagagacca

SEQ ID NO: 63789 - DNA, 1244 bp, Homo sapiens
tctcctaccctagcgatgacctcttccaggtagcggtcccttgtgcgcggttggtagtacccagggcttagagcgagcgcgcacccggggctgcggtggaggctcctctgtgagctctacctgcctcccatcccgaggcctaggagaaggcgggtacctggccgccagctgacgccctggtggtcactgtggccctttagaaacacacagctccatttcataagcaaaacctcctcccccagccccggctcaagcaccattcacactgccatccaagccgcgggcggccgtggaaagggcactggaccacccgtctcgcgggcgccgtgaggtacagcgatggctcccagtgccgggcagttcaggtgacaggagctttccaaagacacctagggtccaaaaagcagggttcccatctcacaatttggatttgctcatagaggagcagataggacaggctgctcacatttctcctttgaaggcacttccacagtggactgtcgctggcgggcccctgggcggtgaccatcggtgccccgggagacagcgaggaattgaccctttggtcactgtgtaagcccccactaggctgctgctctttccaaagggaaggggctgggggaaccaggaaggaagcccacccccacacctgcatctgtctgggttcagccaggtaaagggactcactgtgatcgtggcccctccacggggcaggacgaccctgcctccgtctcgtgacacaatgagggagcagcccgatccctgagcggtctcttttttggtgcctcctacatttcttgaggaaaaaaaaaatgtgtccttagctaccctgttttgagcagcaatatgcagcctcttccttccaagattacctccggagaacaccgttcttggccaaggacactgaggagctaaatctgcctcactaaggaacgagcttgtttccaagaaatgaggataagatgggtaaaatcctcactaacaaagaatactataaaacctgtgagagccttagaatagcttctaataatcctaggacaggagaaagcgcctggctttgctgtgagtgtatcctcagaaaaagcaggaggtcgaccatctcttcactggagccagcttctcctctagaaacgatgcttttttccctaactaaagagcagcaaaaacaaaaaaaaagggggggcgaggggattttttttacttgtttgagaaattataataaaataattgagtatctcctgtga

SEQ ID NO: 63790 - DNA, 5075 bp, Homo sapiens
ggggctgaggaggcgagggcagcggagtttcctgccctgagatagttgcagcccgctctgctgcaaccatttcaaattagagaagaaagcagttcagccggtggggctggcgggactctgaccggcccggtggcctcgccggcaacggccccgccccgctggcggcagcggcggcggcagcggctgcgcggggcctggaactggtcgggccggctggggttccgggggacaggtttgcagggtggggcccgagaggctggcgggcaggcagcagtggagccggaagggtaggcagccaggagagagagaggagctatggagagggcccgcaagttctcgggctccggcttggccatgggcttgggctccgcctccgcttcggcctggaggagggcttcgcagaggtgggcctggccgctccgctccctgcggcccggaggggatgccagagagcctcgcaagatcatcctgcacaaaggctccacaggcctgggcttcaacatcgtaggaggagaggatggagaaggcatttttgtctccttcatcctggcaggaggcccagctgacctgagtggggagctgcgcaggggagaccggatcttatcggtgaatggagtgaatctgaggaatgcaactcatgagcaggctgcagctgctctgaaacgggccggccagtcagtcaccattgtggcccagtacagacctgaagaatacagtcgctttgaatcgaagatacatgacttacgagaacaaatgatgaacagcagcatgagctctgggtctgggtccctccgaacaagtgaaaagaggtccttgtatgtcagggccctgtttgattatgatcggactcgggacagctgcctgccaagccaggggctcagcttctcttatggtgacattctgcatgtcattaatgcctctgatgatgagtggtggcaggcaaggctggtgaccccacacggagaaagtgagcagatcggtgtgatccccagtaagaagagggtggaaaagaaagaaagagctcgattgaaaactgtgaagttccatgccaggacggggatgattgagtctaacaggtcgatcaaaacgaaacgtaaaaagagtttccgcctctctcgaaagtttccattttacaagagcaaagaaaacatggcccaggagagcagcatacaggaacagggagtgacatccaacaccagtgacagcgaaagcagttccaaaggacaagaggatgctattttgtcatatgagccagtgacacggcaagaaattcactatgcaaggcctgtgatcatcctgggcccaatgaaggaccgagtcaatgatgacctgatctccgaatttccacataaatttggatcctgtgtgccacatactacccggcctcgacgtgataatgaggtggatggacaagactaccactttgtggtgtcccgagaacaaatggagaaagatattcaggacaacaagttcatcgaggcgggccaatttaatgataacctctatgggaccagcatccagtcagtgcgggcagttgcagagaggggcaagcactgcatcttagatgtttccggcaatgctatcaagagactgcagcaagcacaactttaccccattgccattttcatcaagcccaagtccattgaagcccttatggaaatgaaccgaaggcagacatatgaacaagcaaataagatctatgacaaagccatgaaactggagcaggaatttggagagtactttacagccattgtacagggtgactcactggaagagatttataacaaaatcaaacaaatcattgaggaccagtctgggcactacatttgggtcccatcccctgaaaaactctgaagaatcccctccaaccattctcttgtgaacagaagaaatcaagtccctcttccctcctccctcttcattcctgtccccatggggagaacaaatgctactgttcttgtccccttttttagatatgtcaaaaaaaattaagttttctagtcctgttctttttttttttttaagtttttgtttgtttcagtttattttttgggatgatgccatctcattcatcatgtgactgtgcccattcctgcatggacctttcccaagcgctagcacaggtgcaaaatccatcagagccattgttttcataaaaaccaagcagaagtgaagagaaaagaggaggactgatggaaagacagactctggacagctgcacggcttgtgaagtgagctaaatgcaccacatgatgagatgctcctgggcatttctccctatctgtactgctgtcttgcagctctgaacggtgcaacgtaatggcgacagaaagtatcttatttatatatagatatatatatgtaatttatataaaatatatagaaattattatatatatatattatacactctcatataatatatatatattcacacacatttgggttagaaaatctatggagacttcatcaatggtactatgttattagagaaatgctttaattttcatattccaatcagatggcatcttctatcccagctggttgggaagggattgaagatggtagcaagtgctgcactaagggcactcgcatttggtcattctcttgagagctaggaggggtcagcctgaggccggagaggaagggcttttgcctggggtgagagggtgagagacttgacctgaaagcagctgctgcccctgaggtgcagccagagtcctgtgtgcggacagagagaatggctaatgatgctccgcgtggaattgcctattgttttatgccacctgatgtgtctgcatgagaggtttcctttttgttcctttttaagctgctgttaaaccaaaaccatgttgtgctactgtgtcagccttttcattattgcaaattttacttttactatttaagtgaatgcatagaatccaatttgccaaggttctaaaggcttatgaggtcctgaaggagccaggccttgtgatggagtaggtgacacaggcctggttgtcctgtcagcagaagggaaagcaggggctgggctgagaggaggacacggagggctctgctgaggttccttcctgggttccaccaacagggacagggagtcacttgccttccagttctgtgctgggatggcgggacagcacttggcttgcttggccagctgcgtcatgagtttgatttggtttttttttttttgcagctgcttcatatgctctgctccagcccctccccaacagctggtagcttatggtttcttcaagaggaaagtagactttatgctgtacatttgagctgtagagctaagattcgcttactggtgagctgtgaaaccttgttgctttttcccagagtctgatggcagtgactgtgatcaagggaatcttcaccgccacaagtgcaggcagcaggtgtggttcaggtccccccccaccccactgtgctcctttgaagccaacgtgcctccctcgcctccatactggagggacgacgcaggggagaacagagaagtgcttggccctaggattgaggcacttgtttcctagcccgctgggttagggctggtgcaagcgaggcaatgttgaggatgctttaagcactaccagccgaatccgggaactctgttaacagttgtccaaccagcagaatgaggctaactgtataaagcatgggacccaggatgaggataaggaaaggacagcggctttccctgggcagtacaatggcttgaaggcaaaaagggataaagtgacagccgactgtgactctggtgaggaggggtgagcagggaggttgattctctgatgttaactaagtggcaaagtctcaaccgtgctcagccctccccctcccagggaagagaaacaaagattcaaagtaagcatgatactagtgggtttaccagtgtttcttccaaggagacatatattttttaataaacgatagttgcaatgaactgtggctcagagaccttcttaaagtagttgagaagggagggcgtgggcaaagcagtgggaagaacatcccaaacttttgggggccagagggctctctccttagtgatgatcagctagccgagctgggccgtcctggggatcggtacagctccctggggtggtgacaggccctttgtgaaagttgtgtgcttggtcttccaccccagccccagacactgcttcaaatagcaccaaccagatgggagtccacatctgtggtggcaaaatgctgacattttcccaagaggtacacaaggtgggagaggcctgctgtagcagaggtgtgtgttagagaaagcaggggcctgatttagtagcagagaactgggtgagaaaaatggccagagaaagtgacctgccagctaccagtgtttccgaaaatgagggtgggatgggcccatttgcagagcaggacagcagtcatccccatagccctctgaggaggggagggatgcttagagcaggcagttctgtcagttctgacgtggcaggtgccattgcaacttgtgcggaggagtcttaggaagtgctgtcataattcataaggtcaagagcaacatctggatgaatgagccacctgaaatgtgtgtgggctgagccacaggaagggtgagtcctcttgcttgtggtgctttatggtgtgcaggttgcttgctttcccacattctctcatttgcttgaaggcagcctaacaaaagggagtccccaaagagctccatgagagcttaagaaaattcatctcctgaggacaaagagaacaaagatctgtcctgtggtcacactgttgaggctctgtcttcacagctgatgttctcctagtggaggtacagctgaagaacattcagccccagcacgagaagatacagagcaacttggaaaccccaaagggagacacacccttaacactgccgtgctgtgctgtgccgtgtcctgaaggaggagagagccctatctcctcctggttttgttgctgacattgcagctgatcatgccttgactccttcatctctaacagaggaagaactgtattatcaaaccttatggtctacccatgaataaataaaatatttgttcaagcacaaa

SEQ ID NO: 63791 - DNA, 5995 bp, Homo sapiens
agcacccattctctgcttgagctcccgcttcttctttgccgctgggcctcggcccagaagccacgacgggcgacacggagccgccagtgctggagggggagccgtgggtgcggggcaccgtgggggccgaggccccgggacgcccgcccggccccaggccccgctcagcccgggcgcccccacgggtgccccccccttcttggtccgagcagtgtgagtgtgccagggagcccggcggcggcggcggcggtggtggcggcggtggcggcggcgtggaatccggcgtgggctggggggtccgagccgcggggggcagtgccatgcacaagcaccagcactgctgtaagtgccctgagtgctatgaggtgacccgcctggccgccctgcggcgcctcgagcctccggggtacggcgactggcaagtccccgacccttacgggccaggtgggggcaacggcgccagcgcgggttatgggggctacagctcgcagaccttgccctcgcaggcgggggccacccccacccctcgcaccaaggccaagctcatccccaccggccgggatgtggggccggtgcctcttaagccagtcccgggcaagagcacccccaaactcaacggcagcggccccagctggtggccagagtgcacctgtaccaaccgggactggtatgagcaggtgaatggcagtgatggcatgttcaaatatgaggaaatcgtacttgagaggggcaactctggcctgggcttcagtatcgcaggtggcatcgacaatccccatgtccctgatgaccctggcatttttattaccaagattatccctggtggagcagctgccatggatgggaggctgggggtgaatgactgtgtgctgcgggtgaatgaggtggaagtgtcggaggtggtacacagccgggcggtggaggcgctgaaagaggcaggccctgtggtgcgattggtggtgcggaggcgacagcctccacccgagaccatcatggaggtcaacctgctcaaagggcccaaaggcctgggtttcagcattgctgggggtattggcaaccagcacatcccaggagacaacagcatctacatcaccaagatcattgaggggggtgctgctcagaaggatggacgcctacagattggggaccggctgctggcggtgaacaacaccaatctgcaggatgtgaggcacgaggaagctgtggcctcactgaagaacacatctgatatggtgtatttgaaggtggccaagccaggcagcctccacctcaacgacatgtacgctccccctgactacgccagcacttttactgccttggctgacaaccacataagccataattccagcctgggttatctcggggctgtggagagcaaggtcagctaccctgctcctcctcaggttccccccacccgctactctcctattcccaggcacatgctggctgaggaggacttcaccagagagcctcgcaagatcatcctgcacaaaggctccacaggcctgggcttcaacatcgtaggaggagaggatggagaaggcatttttgtctccttcatcctggcaggaggcccagctgacctgagtggggagctgcgcaggggagaccggatcttatcggtgaatggagtgaatctgaggaatgcaactcatgagcaggctgcagctgctctgaaacgggccggccagtcagtcaccattgtggcccagtacagacctgaagaatacagtcgctttgaatcgaagatacatgacttacgagaacaaatgatgaacagcagcatgagctctgggtctgggtccctccgaacaagtgaaaagaggtccttgtatgtcagggccctgtttgattatgatcggactcgggacagctgcctgccaagccaggggctcagcttctcttatggtgacattctgcatgtcattaatgcctctgatgatgagtggtggcaggcaaggctggtgaccccacacggagaaagtgagcagatcggtgtgatccccagtaagaagagggtggaaaagaaagaaagagctcgattgaaaactgtgaagttccatgccaggacggggatgattgagtctaacagggacttcccggggttaagtgacgattattatggagcaaagaacctgaaaggacaagaggatgctattttgtcatatgagccagtgacacggcaagaaattcactatgcaaggcctgtgatcatcctgggcccaatgaaggaccgagtcaatgatgacctgatctccgaatttccacataaatttggatcctgtgtgccacatactacccggcctcgacgtgataatgaggtggatggacaagactaccactttgtggtgtcccgagaacaaatggagaaagatattcaggacaacaagttcatcgaggcgggccaatttaatgataacctctatgggaccagcatccagtcagtgcgggcagttgcagagaggggcaagcactgcatcttagatgtttccggcaatgctatcaagagactgcagcaagcacaactttaccccattgccattttcatcaagcccaagtccattgaagcccttatggaaatgaaccgaaggcagacatatgaacaagcaaataagatctatgacaaagccatgaaactggagcaggaatttggagagtactttacagccattgtacagggtgactcactggaagagatttataacaaaatcaaacaaatcattgaggaccagtctgggcactacatttgggtcccatcccctgaaaaactctgaagaatcccctccaaccattctcttgtgaacagaagaaatcaagtccctcttccctcctccctcttcattcctgtccccatggggagaacaaatgctactgttcttgtccccttttttagatatgtcaaaaaaaattaagttttctagtcctgttctttttttttttttaagtttttgtttgtttcagtttattttttgggatgatgccatctcattcatcatgtgactgtgcccattcctgcatggacctttcccaagcgctagcacaggtgcaaaatccatcagagccattgttttcataaaaaccaagcagaagtgaagagaaaagaggaggactgatggaaagacagactctggacagctgcacggcttgtgaagtgagctaaatgcaccacatgatgagatgctcctgggcatttctccctatctgtactgctgtcttgcagctctgaacggtgcaacgtaatggcgacagaaagtatcttatttatatatagatatatatatgtaatttatataaaatatatagaaattattatatatatatattatacactctcatataatatatatatattcacacacatttgggttagaaaatctatggagacttcatcaatggtactatgttattagagaaatgctttaattttcatattccaatcagatggcatcttctatcccagctggttgggaagggattgaagatggtagcaagtgctgcactaagggcactcgcatttggtcattctcttgagagctaggaggggtcagcctgaggccggagaggaagggcttttgcctggggtgagagggtgagagacttgacctgaaagcagctgctgcccctgaggtgcagccagagtcctgtgtgcggacagagagaatggctaatgatgctccgcgtggaattgcctattgttttatgccacctgatgtgtctgcatgagaggtttcctttttgttcctttttaagctgctgttaaaccaaaaccatgttgtgctactgtgtcagccttttcattattgcaaattttacttttactatttaagtgaatgcatagaatccaatttgccaaggttctaaaggcttatgaggtcctgaaggagccaggccttgtgatggagtaggtgacacaggcctggttgtcctgtcagcagaagggaaagcaggggctgggctgagaggaggacacggagggctctgctgaggttccttcctgggttccaccaacagggacagggagtcacttgccttccagttctgtgctgggatggcgggacagcacttggcttgcttggccagctgcgtcatgagtttgatttggtttttttttttttgcagctgcttcatatgctctgctccagcccctccccaacagctggtagcttatggtttcttcaagaggaaagtagactttatgctgtacatttgagctgtagagctaagattcgcttactggtgagctgtgaaaccttgttgctttttcccagagtctgatggcagtgactgtgatcaagggaatcttcaccgccacaagtgcaggcagcaggtgtggttcaggtccccccccaccccactgtgctcctttgaagccaacgtgcctccctcgcctccatactggagggacgacgcaggggagaacagagaagtgcttggccctaggattgaggcacttgtttcctagcccgctgggttagggctggtgcaagcgaggcaatgttgaggatgctttaagcactaccagccgaatccgggaactctgttaacagttgtccaaccagcagaatgaggctaactgtataaagcatgggacccaggatgaggataaggaaaggacagcggctttccctgggcagtacaatggcttgaaggcaaaaagggataaagtgacagccgactgtgactctggtgaggaggggtgagcagggaggttgattctctgatgttaactaagtggcaaagtctcaaccgtgctcagccctccccctcccagggaagagaaacaaagattcaaagtaagcatgatactagtgggtttaccagtgtttcttccaaggagacatatattttttaataaacgatagttgcaatgaactgtggctcagagaccttcttaaagtagttgagaagggagggcgtgggcaaagcagtgggaagaacatcccaaacttttgggggccagagggctctctccttagtgatgatcagctagccgagctgggccgtcctggggatcggtacagctccctggggtggtgacaggccctttgtgaaagttgtgtgcttggtcttccaccccagccccagacactgcttcaaatagcaccaaccagatgggagtccacatctgtggtggcaaaatgctgacattttcccaagaggtacacaaggtgggagaggcctgctgtagcagaggtgtgtgttagagaaagcaggggcctgatttagtagcagagaactgggtgagaaaaatggccagagaaagtgacctgccagctaccagtgtttccgaaaatgagggtgggatgggcccatttgcagagcaggacagcagtcatccccatagccctctgaggaggggagggatgcttagagcaggcagttctgtcagttctgacgtggcaggtgccattgcaacttgtgcggaggagtcttaggaagtgctgtcataattcataaggtcaagagcaacatctggatgaatgagccacctgaaatgtgtgtgggctgagccacaggaagggtgagtcctcttgcttgtggtgctttatggtgtgcaggttgcttgctttcccacattctctcatttgcttgaaggcagcctaacaaaagggagtccccaaagagctccatgagagcttaagaaaattcatctcctgaggacaaagagaacaaagatctgtcctgtggtcacactgttgaggctctgtcttcacagctgatgttctcctagtggaggtacagctgaagaacattcagccccagcacgagaagatacagagcaacttggaaaccccaaagggagacacacccttaacactgccgtgctgtgctgtgccgtgtcctgaaggaggagagagccctatctcctcctggttttgttgctgacattgcagctgatcatgccttgactccttcatctctaacagaggaagaactgtattatcaaaccttatggtctacccatgaataaataaaatatttgttcaagcacaaa

SEQ ID NO: 63792 - DNA, 4871 bp, Homo sapiens
agcacccattctctgcttgagctcccgcttcttctttgccgctgggcctcggcccagaagccacgacgggcgacacggagccgccagtgctggagggggagccgtgggtgcggggcaccgtgggggccgaggccccgggacgcccgcccggccccaggccccgctcagcccgggcgcccccacgggtgccccccccttcttggtccgagcagtgtgagtgtgccagggagcccggcggcggcggcggcggtggtggcggcggtggcggcggcgtggaatccggcgtgggctggggggtccgagccgcggggggcagtgccatgcacaagcaccagcactgctgtaagtgccctgagtgctatgaggtgacccgcctggccgccctgcggcgcctcgagcctccggggtacggcgactggcaagtccccgacccttacgggccaggtgggggcaacggcgccagcgcgggttatgggggctacagctcgcagaccttgccctcgcaggcgggggccacccccacccctcgcaccaaggccaagctcatccccaccggccgggatgtggggccggtgcctcttaagccagtcccgggcaagagcacccccaaactcaacggcagcggccccagctggtggccagagtgcacctgtaccaaccgggactggtatgagcaggtgaatggcagtgatggcatgttcaaatatgaggaaatcgtacttgagaggggcaactctggcctgggcttcagtatcgcaggtggcatcgacaatccccatgtccctgatgaccctggcatttttattaccaagattatccctggtggagcagctgccatggatgggaggctgggggtgaatgactgtgtgctgcgggtgaatgaggtggaagtgtcggaggtggtacacagccgggcggtggaggcgctgaaagaggcaggccctgtggtgcgattggtggtgcggaggcgacagcctccacccgagaccatcatggaggtcaacctgctcaaagggcccaaaggcctgggtttcagcattgctgggggtattggcaaccagcacatcccaggagacaacagcatctacatcaccaagatcattgaggggggtgctgctcagaaggatggacgcctacagattggggaccggctgctggcggtgaacaacaccaatctgcaggatgtgaggcacgaggaagctgtggcctcactgaagaacacatctgatatggtgtatttgaaggtggccaagccaggcagcctccacctcaacgacatgtacgctccccctgactacgccagcacttttactgccttggctgacaaccacataagccataattccagcctgggttatctcggggctgtggagagcaaggtcagctaccctgctcctcctcaggttccccccacccgctactctcctattcccaggcacatgctggctgaggaggacttcaccagagagcctcgcaagatcatcctgcacaaaggctccacaggcctgggcttcaacatcgtaggaggagaggatggagaaggcatttttgtctccttcatcctggcaggaggcccagctgacctgagtggggagctgcgcaggggagaccggatcttatcggtgaatggagtgaatctgaggaatgcaactcatgagcaggctgcagctgctctgaaacgggccggccagtcagtcaccattgtggcccagtacagacctgaagaatacagtcgctttgaatcgaagatacatgacttacgagaacaaatgatgaacagcagcatgagctctgggtctgggtccctccgaacaagtgaaaagaggtccttgtatgtcagggccctgtttgattatgatcggactcgggacagctgcctgccaagccaggggctcagcttctcttatggtgacattctgcatgtcattaatgcctctgatgatgagtggtggcaggcaaggctggtgaccccacacggagaaagtgagcagatcggtgtgatccccagtaagaagagggtggaaaagaaagaaagagctcgattgaaaactgtgaagttccatgccaggacggggatgattgagtctaacagggacttcccggggttaagtgacgattattatggagcaaagaacctgaaaggacaagaggatgctattttgtcatatgagccagtgacacggcaagaaattcactatgcaaggcctgtgatcatcctgggcccaatgaaggaccgagtcaatgatgacctgatctccgaatttccacataaatttggatcctgtgtgccacatactacccggcctcgacgtgataatgaggtggatggacaagactaccactttgtggtgtcccgagaacaaatggagaaagatattcaggacaacaagttcatcgaggcgggccaatttaatgataacctctatgggaccagcatccagtcagtgcgggcagttgcagagaggggcaagcactgcatcttagatgtttccggcaatgctatcaagagactgcagcaagcacaactttaccccattgccattttcatcaagcccaagtccattgaagcccttatggaaatgaaccgaaggcagacatatgaacaagcaaataagatctatgacaaagccatgaaactggagcaggaatttggagagtactttacagccattgtacagggtgactcactggaagagatttataacaaaatcaaacaaatcattgaggaccagtctgggcactacatttgggtcccatcccctgaaaaactctgaagaatcccctccaaccattctcttgtgaacagaagaaatcaagtccctcttccctcctccctcttcattcctgtccccatggggagaacaaatgctactgttcttgtccccttttttagatatgtcaaaaaaaattaagttttctagtcctgttctttttttttttttaagtttttgtttgtttcagtttattttttgggatgatgccatctcattcatcatgtgactgtgcccattcctgcatggacctttcccaagcgctagcacaggtgcaaaatccatcagagccattgttttcataaaaaccaagcagaagtgaagagaaaagaggaggactgatggaaagacagactctggacagctgcacggcttgtgaagtgagctaaatgcaccacatgatgagatgctcctgggcatttctccctatctgtactgctgtcttgcagctctgaacggtgcaacgtaatggcgacagaaagtatcttatttatatatagatatatatatgtaatttatataaaatatatagaaattattatatatatatattatacactctcatataatatatatatattcacacacatttgggttagaaaatctatggagacttcatcaatggtactatgttattagagaaatgctttaattttcatattccaatcagatggcatcttctatcccagctggttgggaagggattgaagatggtagcaagtgctgcactaagggcactcgcatttggtcattctcttgagagctaggaggggtcagcctgaggccggagaggaagggcttttgcctggggtgagagggtgagagacttgacctgaaagcagctgctgcccctgaggtgcagccagagtcctgtgtgcggacagagagaatggctaatgatgctccgcgtggaattgcctattgttttatgccacctgatgtgtctgcatgagaggtttcctttttgttcctttttaagctgctgttaaaccaaaaccatgttgtgctactgtgtcagccttttcattattgcaaattttacttttactatttaagtgaatgcatagaatccaatttgccaaggttctaaaggcttatgaggtcctgaaggagccaggccttgtgatggagtaggtgacacaggcctggttgtcctgtcagcagaagggaaagcaggggctgggctgagaggaggacacggagggctctgctgaggttccttcctgggttccaccaacagggacagggagtcacttgccttccagttctgtgctgggatggcgggacagcacttggcttgcttggccagctgcgtcatgagtttgatttggtttttttttttttgcagctgcttcatatgctctgctccagcccctccccaacagctggtagcttatggtttcttcaagaggaaagtagactttatgctgtacatttgagctgtagagctaagattcgcttactggtgagctgtgaaaccttgttgctttttcccagagtctgatggcagtgactgtgatcaagggaatcttcaccgccacaagtgcaggcagcaggtgtggttcaggtccccccccaccccactgtgctcctttgaagccaacgtgcctccctcgcctccatactggagggacgacgcaggggagaacagagaagtgcttggccctaggattgaggcacttgtttcctagcccgctgggttagggctggtgcaagcgaggcaatgttgaggatgctttaagcactaccagccgaatccgggaactctgttaacagttgtccaaccagcagaatgaggctaactgtataaagcatgggacccaggatgaggataaggaaaggacagcggctttccctgggcagtacaatggcttgaaggcaaaaagggataaagtgacagccgactgtgactctggtgaggaggggtgagcagggaggttgattctctgatgttaactaagtggcaaagtctcaaccgtgctcagccctccccctcccagggaagagaaacaaagattcaaagtaagcatgatactagtgggtttaccagtgtttcttccaaggagacatatattttttaataaacgatagttgcaatga

SEQ ID NO: 63793 - DNA, 4662 bp, Homo sapiens
agcacccattctctgcttgagctcccgcttcttctttgccgctgggcctcggcccagaagccacgacgggcgacacggagccgccagtgctggagggggagccgtgggtgcggggcaccgtgggggccgaggccccgggacgcccgcccggccccaggccccgctcagcccgggcgcccccacgggtgccccccccttcttggtccgagcagtgtgagtgtgccagggagcccggcggcggcggcggcggtggtggcggcggtggcggcggcgtggaatccggcgtgggctggggggtccgagccgcggggggcagtgccatgcacaagcaccagcactgctgtaagtgccctgagtgctatgaggtgacccgcctggccgccctgcggcgcctcgagcctccggggtacggcgactggcaagtccccgacccttacgggccaggtgggggcaacggcgccagcgcgggttatgggggctacagctcgcagaccttgccctcgcaggcgggggccacccccacccctcgcaccaaggccaagctcatccccaccggccgggatgtggggccggtgcctcttaagccagtcccgggcaagagcacccccaaactcaacggcagcggccccagctggtggccagagtgcacctgtaccaaccgggactggtatgagcaggtgaatggcagtgatggcatgttcaaatatgaggaaatcgtacttgagaggggcaactctggcctgggcttcagtatcgcaggtggcatcgacaatccccatgtccctgatgaccctggcatttttattaccaagattatccctggtggagcagctgccatggatgggaggctgggggtgaatgactgtgtgctgcgggtgaatgaggtggaagtgtcggaggtggtacacagccgggcggtggaggcgctgaaagaggcaggccctgtggtgcgattggtggtgcggaggcgacagcctccacccgagaccatcatggaggtcaacctgctcaaagggcccaaaggcctgggtttcagcattgctgggggtattggcaaccagcacatcccaggagacaacagcatctacatcaccaagatcattgaggggggtgctgctcagaaggatggacgcctacagattggggaccggctgctggcggtgaacaacaccaatctgcaggatgtgaggcacgaggaagctgtggcctcactgaagaacacatctgatatggtgtatttgaaggtggccaagccaggcagcctccacctcaacgacatgtacgctccccctgactacgccagcacttttactgccttggctgacaaccacataagccataattccagcctgggttatctcggggctgtggagagcaaggtcagctaccctgctcctcctcaggttccccccacccgctactctcctattcccaggcacatgctggctgaggaggacttcaccagagagcctcgcaagatcatcctgcacaaaggctccacaggcctgggcttcaacatcgtaggaggagaggatggagaaggcatttttgtctccttcatcctggcaggaggcccagctgacctgagtggggagctgcgcaggggagaccggatcttatcggtgaatggagtgaatctgaggaatgcaactcatgagcaggctgcagctgctctgaaacgggccggccagtcagtcaccattgtggcccagtacagacctgaagaatacagtcgctttgaatcgaagatacatgacttacgagaacaaatgatgaacagcagcatgagctctgggtctgggtccctccgaacaagtgaaaagaggtccttgtatgtcagggccctgtttgattatgatcggactcgggacagctgcctgccaagccaggggctcagcttctcttatggtgacattctgcatgtcattaatgcctctgatgatgagtggtggcaggcaaggctggtgaccccacacggagaaagtgagcagatcggtgtgatccccagtaagaagagggtggaaaagaaagaaagagctcgattgaaaactgtgaagttccatgccaggacggggatgattgagtctaacagggacttcccggggttaagtgacgattattatggagcaaagaacctgaaaggacaagaggatgctattttgtcatatgagccagtgacacggcaagaaattcactatgcaaggcctgtgatcatcctgggcccaatgaaggaccgagtcaatgatgacctgatctccgaatttccacataaatttggatcctgtgtgccacatactacccggcctcgacgtgataatgaggtggatggacaagactaccactttgtggtgtcccgagaacaaatggagaaagatattcaggacaacaagttcatcgaggcgggccaatttaatgataacctctatgggaccagcatccagtcagtgcgggcagttgcagagaggggcaagcactgcatcttagatgtttccggcaatgctatcaagagactgcagcaagcacaactttaccccattgccattttcatcaagcccaagtccattgaagcccttatggaaatgaaccgaaggcagacatatgaacaagcaaataagatctatgacaaagccatgaaactggagcaggaatttggagagtactttacagccattgtacagggtgactcactggaagagatttataacaaaatcaaacaaatcattgaggaccagtctgggcactacatttgggtcccatcccctgaaaaactctgaagaatcccctccaaccattctcttgtgaacagaagaaatcaagtccctcttccctcctccctcttcattcctgtccccatggggagaacaaatgctactgttcttgtccccttttttagatatgtcaaaaaaaattaagttttctagtcctgttctttttttttttttaagtttttgtttgtttcagtttattttttgggatgatgccatctcattcatcatgtgactgtgcccattcctgcatggacctttcccaagcgctagcacaggtgcaaaatccatcagagccattgttttcataaaaaccaagcagaagtgaagagaaaagaggaggactgatggaaagacagactctggacagctgcacggcttgtgaagtgagctaaatgcaccacatgatgagatgctcctgggcatttctccctatctgtactgctgtcttgcagctctgaacggtgcaacgtaatggcgacagaaagtatcttatttatatatagatatatatatgtaatttatataaaatatatagaaattattatatatatatattatacactctcatataatatatatatattcacacacatttgggttagaaaatctatggagacttcatcaatggtactatgttattagagaaatgctttaattttcatattccaatcagatggcatcttctatcccagctggttgggaagggattgaagatggtagcaagtgctgcactaagggcactcgcatttggtcattctcttgagagctaggaggggtcagcctgaggccggagaggaagggcttttgcctggggtgagagggtgagagacttgacctgaaagcagctgctgcccctgaggtgcagccagagtcctgtgtgcggacagagagaatggctaatgatgctccgcgtggaattgcctattgttttatgccacctgatgtgtctgcatgagaggtttcctttttgttcctttttaagctgctgttaaaccaaaaccatgttgtgctactgtgtcagccttttcattattgcaaattttacttttactatttaagtgaatgcatagaatccaatttgccaaggttctaaaggcttatgaggtcctgaaggagccaggccttgtgatggagtaggtgacacaggcctggttgtcctgtcagcagaagggaaagcaggggctgggctgagaggaggacacggagggctctgctgaggttccttcctgggttccaccaacagggacagggagtcacttgccttccagttctgtgctgggatggcgggacagcacttggcttgcttggccagctgcgtcatgagtttgatttggtttttttttttttgcagctgcttcatatgctctgctccagcccctccccaacagctggtagcttatggtttcttcaagaggaaagtagactttatgctgtacatttgagctgtagagctaagattcgcttactggtgagctgtgaaaccttgttgctttttcccagagtctgatggcagtgactgtgatcaagggaatcttcaccgccacaagtgcaggcagcaggtgtggttcaggtccccccccaccccactgtgctcctttgaagccaacgtgcctccctcgcctccatactggagggacgacgcaggggagaacagagaagtgcttggccctaggattgaggcacttgtttcctagcccgctgggttagggctggtgcaagcgaggcaatgttgaggatgctttaagcactaccagccgaatccgggaactctgttaacagttgtccaaccagcagaatgaggctaactgtataaagcatgggacccaggatgaggataaggaaaggtgccatgccggcgccattgggccggctgccattgggcgggtgccgagct

SEQ ID NO: 63794 - DNA, 4430 bp, Homo sapiens
acggagggactggccggagctggcgctttctcagcactagatctggactccgacccggcgccagaatacagtcgctttgaatcgaagatacatgacttacgagaacaaatgatgaacagcagcatgagctctgggtctgggtccctccgaacaagtgaaaagaggtccttgtatgtcagggccctgtttgattatgatcggactcgggacagctgcctgccaagccaggggctcagcttctcttatggtgacattctgcatgtcattaatgcctctgatgatgagtggtggcaggcaaggctggtgaccccacacggagaaagtgagcagatcggtgtgatccccagtaagaagagggtggaaaagaaagaaagagctcgattgaaaactgtgaagttccatgccaggacggggatgattgagtctaacaggtcgatcaaaacgaaacgtaaaaagagtttccgcctctctcgaaagtttccattttacaagagcaaagaaaacatggcccaggagagcagcatacaggaacagggagtgacatccaacaccagtgacagcgaaagcagttccaaaggacaagaggatgctattttgtcatatgagccagtgacacggcaagaaattcactatgcaaggcctgtgatcatcctgggcccaatgaaggaccgagtcaatgatgacctgatctccgaatttccacataaatttggatcctgtgtgccacatactacccggcctcgacgtgataatgaggtggatggacaagactaccactttgtggtgtcccgagaacaaatggagaaagatattcaggacaacaagttcatcgaggcgggccaatttaatgataacctctatgggaccagcatccagtcagtgcgggcagttgcagagaggggcaagcactgcatcttagatgtttccggcaatgctatcaagagactgcagcaagcacaactttaccccattgccattttcatcaagcccaagtccattgaagcccttatggaaatgaaccgaaggcagacatatgaacaagcaaataagatctatgacaaagccatgaaactggagcaggaatttggagagtactttacagccattgtacagggtgactcactggaagagatttataacaaaatcaaacaaatcattgaggaccagtctgggcactacatttgggtcccatcccctgaaaaactctgaagaatcccctccaaccattctcttgtgaacagaagaaatcaagtccctcttccctcctccctcttcattcctgtccccatggggagaacaaatgctactgttcttgtccccttttttagatatgtcaaaaaaaattaagttttctagtcctgttctttttttttttttaagtttttgtttgtttcagtttattttttgggatgatgccatctcattcatcatgtgactgtgcccattcctgcatggacctttcccaagcgctagcacaggtgcaaaatccatcagagccattgttttcataaaaaccaagcagaagtgaagagaaaagaggaggactgatggaaagacagactctggacagctgcacggcttgtgaagtgagctaaatgcaccacatgatgagatgctcctgggcatttctccctatctgtactgctgtcttgcagctctgaacggtgcaacgtaatggcgacagaaagtatcttatttatatatagatatatatatgtaatttatataaaatatatagaaattattatatatatatattatacactctcatataatatatatatattcacacacatttgggttagaaaatctatggagacttcatcaatggtactatgttattagagaaatgctttaattttcatattccaatcagatggcatcttctatcccagctggttgggaagggattgaagatggtagcaagtgctgcactaagggcactcgcatttggtcattctcttgagagctaggaggggtcagcctgaggccggagaggaagggcttttgcctggggtgagagggtgagagacttgacctgaaagcagctgctgcccctgaggtgcagccagagtcctgtgtgcggacagagagaatggctaatgatgctccgcgtggaattgcctattgttttatgccacctgatgtgtctgcatgagaggtttcctttttgttcctttttaagctgctgttaaaccaaaaccatgttgtgctactgtgtcagccttttcattattgcaaattttacttttactatttaagtgaatgcatagaatccaatttgccaaggttctaaaggcttatgaggtcctgaaggagccaggccttgtgatggagtaggtgacacaggcctggttgtcctgtcagcagaagggaaagcaggggctgggctgagaggaggacacggagggctctgctgaggttccttcctgggttccaccaacagggacagggagtcacttgccttccagttctgtgctgggatggcgggacagcacttggcttgcttggccagctgcgtcatgagtttgatttggtttttttttttttgcagctgcttcatatgctctgctccagcccctccccaacagctggtagcttatggtttcttcaagaggaaagtagactttatgctgtacatttgagctgtagagctaagattcgcttactggtgagctgtgaaaccttgttgctttttcccagagtctgatggcagtgactgtgatcaagggaatcttcaccgccacaagtgcaggcagcaggtgtggttcaggtccccccccaccccactgtgctcctttgaagccaacgtgcctccctcgcctccatactggagggacgacgcaggggagaacagagaagtgcttggccctaggattgaggcacttgtttcctagcccgctgggttagggctggtgcaagcgaggcaatgttgaggatgctttaagcactaccagccgaatccgggaactctgttaacagttgtccaaccagcagaatgaggctaactgtataaagcatgggacccaggatgaggataaggaaaggacagcggctttccctgggcagtacaatggcttgaaggcaaaaagggataaagtgacagccgactgtgactctggtgaggaggggtgagcagggaggttgattctctgatgttaactaagtggcaaagtctcaaccgtgctcagccctccccctcccagggaagagaaacaaagattcaaagtaagcatgatactagtgggtttaccagtgtttcttccaaggagacatatattttttaataaacgatagttgcaatgaactgtggctcagagaccttcttaaagtagttgagaagggagggcgtgggcaaagcagtgggaagaacatcccaaacttttgggggccagagggctctctccttagtgatgatcagctagccgagctgggccgtcctggggatcggtacagctccctggggtggtgacaggccctttgtgaaagttgtgtgcttggtcttccaccccagccccagacactgcttcaaatagcaccaaccagatgggagtccacatctgtggtggcaaaatgctgacattttcccaagaggtacacaaggtgggagaggcctgctgtagcagaggtgtgtgttagagaaagcaggggcctgatttagtagcagagaactgggtgagaaaaatggccagagaaagtgacctgccagctaccagtgtttccgaaaatgagggtgggatgggcccatttgcagagcaggacagcagtcatccccatagccctctgaggaggggagggatgcttagagcaggcagttctgtcagttctgacgtggcaggtgccattgcaacttgtgcggaggagtcttaggaagtgctgtcataattcataaggtcaagagcaacatctggatgaatgagccacctgaaatgtgtgtgggctgagccacaggaagggtgagtcctcttgcttgtggtgctttatggtgtgcaggttgcttgctttcccacattctctcatttgcttgaaggcagcctaacaaaagggagtccccaaagagctccatgagagcttaagaaaattcatctcctgaggacaaagagaacaaagatctgtcctgtggtcacactgttgaggctctgtcttcacagctgatgttctcctagtggaggtacagctgaagaacattcagccccagcacgagaagatacagagcaacttggaaaccccaaagggagacacacccttaacactgccgtgctgtgctgtgccgtgtcctgaaggaggagagagccctatctcctcctggttttgttgctgacattgcagctgatcatgccttgactccttcatctctaacagaggaagaactgtattatcaaaccttatggtctacccatgaataaataaaatatttgttcaagcacaaa

SEQ ID NO: 63795 - DNA, 1927 bp, Homo sapiens
  misc_feature (111)..(111): n is a, c, g, or t
tcatgcatgtgctgagcgaaggaaagagtatcgccgtgctggtataagctggagatggccctaagtgctgaagtctggtgatgctgccattgttgatatgggtcctggcangaggaaagtagactttatgctgtacatttgagctgtagagctaagattcgcttactggtgagctgtgaaaccttgttgctttttcccagagtctgatggcagtgactgtgatcaagggaatcttcaccgccacaagtgcaggcagcaggtgtggttcaggtccccccccaccccactgtgctcctttgaagccaacgtgcctccctcgcctccatactggagggacgacgcaggggagaacagagaagtgcttggccctaggattgaggcacttgtttcctagcccgctgggttagggctggtgcaagcgaggcaatgttgaggatgctttaagcactaccagccgaatccgggaactctgttaacagttgtccaaccagcagaatgaggctaactgtataaagcatgggacccaggatgaggataaggaaaggacagcggctttccctgggcagtacaatggcttgaaggcaaaaagggataaagtgacagccgactgtgactctggtgaggaggggtgagcagggaggttgattctctgatgttaactaagtggcaaagtctcaaccgtgctcagccctccccctcccagggaagagaaacaaagattcaaagtaagcatgatactagtgggtttaccagtgtttcttccaaggagacatatattttttaataaacgatagttgcaatgaactgtggctcagagaccttcttaaagtagttgagaagggagggcgtgggcaaagcagtgggaagaacatcccaaacttttgggggccagagggctctctccttagtgatgatcagctagccgagctgggccgtcctggggatcggtacagctccctggggtggtgacaggccctttgtgaaagttgtgtgcttggtcttccaccccagccccagacactgcttcaaatagcaccaaccagatgggagtccacatctgtggtggcaaaatgctgacattttcccaagaggtacacaaggtgggagaggcctgctgtagcagaggtgtgtgttagagaaagcaggggcctgatttagtagcagagaactgggtgagaaaaatggccagagaaagtgacctgccagctaccagtgtttccgaaaatgagggtgggatgggcccatttgcagagcaggacagcagtcatccccatagccctctgaggaggggagggatgcttagagcaggcagttctgtcagttctgacgtggcaggtgccattgcaacttgtgcggaggagtcttaggaagtgctgtcataattcataaggtcaagagcaacatctggatgaatgagccacctgaaatgtgtgtgggctgagccacaggaagggtgagtcctcttgcttgtggtgctttatggtgtgcaggttgcttgctttcccacattctctcatttgcttgaaggcagcctaacaaaagggagtccccaaagagctccatgagagcttaagaaaattcatctcctgaggacaaagagaacaaagatctgtcctgtggtcacactgttgaggctctgtcttcacagctgatgttctcctagtggaggtacagctgaagaacattcagccccagcacgagaagatacagagcaacttggaaaccccaaagggagacacacccttaacactgccgtgctgtgctgtgccgtgtcctgaaggaggagagagccctatctcctcctggttttgttgctgacattgcagctgatcatgccttgactccttcatctctaacagaggaagaactgtattatcaaaccttatggtctacccatgaataaataaaatatttgttcaagcacaaa

SEQ ID NO: 63796 - DNA, 457 bp, Homo sapiens
tggccttccatcttttcaaggtgccagtgtcttggcatttagggttggatgatcacttcatctttcactgtgcctttcagggccctgtttgattatgatcggactcgggacagctgcctgccaagccaggggctcagcttctcttatggtgacattctgcatgtcattaatgcctctgatgatgagtggtggcaggcaaggctggtgaccccacacggagaaagtgagcagatcggtgtgatccccagtaagaagaggtgagtcgtcatgatcatgagcaaggcctttcctgccctcttgctggtatttctttcttgttttcctattagaagttgcttgagagcaacgtttgtgccttgattcctttttggtagagtcggtactcaacatggtttttactcagtgagccaaaaaaatggctgctgtgcctgctgcaacccactgctgagaccattta

SEQ ID NO: 63797 - DNA, 616 bp, Homo sapiens
tttgttaggttcactgtctcctctaccaagtttggcaccctctgccatgctttagctcaggaaaccccacctttctagtccagtttaagctaaagcaaatagccccctgtgtgagacctggagattggaagagaagtaggccagacaaaccgcttcccaactgcttgttttctcccacttacttgaaaaaaaaaatggagtggcccagtgacccacccagatgagaatggaccagtcagtattttttggtttggggcggatcactgcccctgggccacaaagcatttcctttcttccttcagatactacccggcctcgacgtgataatgaggtggatggacaagactaccactttgtggtgtcccgagaacaaatggagaaagatattcaggacaacaagttcatcgaggcgggccaatttaatgataacctctatgggaccagcatccagtcagtgcgggcagttgcagagagggtaagtgtacaggagatggcctcaaaggggaggccaatgcttatgccaaggttccacttggatccttatccttccaacacaggagctgcccaacagtgctgctgaccaaagccatagcacatctgcatactcccagcgcct

SEQ ID NO: 63798 - DNA, 6042 bp, Homo sapiens
agcacccattctctgcttgagctcccgcttcttctttgccgctgggcctcggcccagaagccacgacgggcgacacggagccgccagtgctggagggggagccgtgggtgcggggcaccgtgggggccgaggccccgggacgcccgcccggccccaggccccgctcagcccgggcgcccccacgggtgccccccccttcttggtccgagcagtgtgagtgtgccagggagcccggcggcggcggcggcggtggtggcggcggtggcggcggcgtggaatccggcgtgggctggggggtccgagccgcggggggcagtgccatgcacaagcaccagcactgctgtaagtgccctgagtgctatgaggtgacccgcctggccgccctgcggcgcctcgagcctccggggtacggcgactggcaagtccccgacccttacgggccaggtgggggcaacggcgccagcgcgggttatgggggctacagctcgcagaccttgccctcgcaggcgggggccacccccacccctcgcaccaaggccaagctcatccccaccggccgggatgtggggccggtgcctcttaagccagtcccgggcaagagcacccccaaactcaacggcagcggccccagctggtggccagagtgcacctgtaccaaccgggactggtatgagcaggtgaatggcagtgatggcatgttcaaatatgaggaaatcgtacttgagaggggcaactctggcctgggcttcagtatcgcaggtggcatcgacaatccccatgtccctgatgaccctggcatttttattaccaagattatccctggtggagcagctgccatggatgggaggctgggggtgaatgactgtgtgctgcgggtgaatgaggtggaagtgtcggaggtggtacacagccgggcggtggaggcgctgaaagaggcaggccctgtggtgcgattggtggtgcggaggcgacagcctccacccgagaccatcatggaggtcaacctgctcaaagggcccaaaggcctgggtttcagcattgctgggggtattggcaaccagcacatcccaggagacaacagcatctacatcaccaagatcattgaggggggtgctgctcagaaggatggacgcctacagattggggaccggctgctggcggtgaacaacaccaatctgcaggatgtgaggcacgaggaagctgtggcctcactgaagaacacatctgatatggtgtatttgaaggtggccaagccaggcagcctccacctcaacgacatgtacgctccccctgactacgccagcacttttactgccttggctgacaaccacataagccataattccagcctgggttatctcggggctgtggagagcaaggtcagctaccctgctcctcctcaggttccccccacccgctactctcctattcccaggcacatgctggctgaggaggacttcaccagagagcctcgcaagatcatcctgcacaaaggctccacaggcctgggcttcaacatcgtaggaggagaggatggagaaggcatttttgtctccttcatcctggcaggaggcccagctgacctgagtggggagctgcgcaggggagaccggatcttatcggtgaatggagtgaatctgaggaatgcaactcatgagcaggctgcagctgctctgaaacgggccggccagtcagtcaccattgtggcccagtacagacctgaagaatacagtcgctttgaatcgaagatacatgacttacgagaacaaatgatgaacagcagcatgagctctgggtctgggtccctccgaacaagtgaaaagaggtccttgtatgtcagggccctgtttgattatgatcggactcgggacagctgcctgccaagccaggggctcagcttctcttatggtgacattctgcatgtcattaatgcctctgatgatgagtggtggcaggcaaggctggtgaccccacacggagaaagtgagcagatcggtgtgatccccagtaagaagagggtggaaaagaaagaaagagctcgattgaaaactgtgaagttccatgccaggacggggatgattgagtctaacagggacttcccggggttaagtgacgattattatggagcaaagaacctgaaaggacaagaggatgctattttgtcatatgagccagtgacacggcaagaaattcactatgcaaggcctgtgatcatcctgggcccaatgaaggaccgagtcaatgatgacctgatctccgaatttccacataaatttggatcctgtgtgccacatactacccggcctcgacgtgataatgaggtggatggacaagactaccactttgtggtgtcccgagaacaaatggagaaagatattcaggacaacaagttcatcgaggcgggccaatttaatgataacctctatgggaccagcatccagtcagtgcgggcagttgcagagaggggcaagcactgcatcttagatgtttccggcaatgctatcaagagactgcagcaagcacaactttaccccattgccattttcatcaagcccaagtccattgaagcccttatggaaatgaaccgaaggcagacatatgaacaagcaaataagatctatgacaaagccatgaaactggagcaggaatttggagagtactttacagccattgtacagggtgactcactggaagagatttataacaaaatcaaacaaatcattgaggaccagtctgggcactacatttgggtcccatcccctgaaaaactctgaagaatcccctccaaccattctcttgtgaacagaagaaatcaagtccctcttccctcctccctcttcattcctgtccccatggggagaacaaatgctactgttcttgtccccttttttagatatgtcaaaaaaaattaagttttctagtcctgttctttttttttttttaagtttttgtttgtttcagtttattttttgggatgatgccatctcattcatcatgtgactgtgcccattcctgcatggacctttcccaagcgctagcacaggtgcaaaatccatcagagccattgttttcataaaaaccaagcagaagtgaagagaaaagaggaggactgatggaaagacagactctggacagctgcacggcttgtgaagtgagctaaatgcaccacatgatgagatgctcctgggcatttctccctatctgtactgctgtcttgcagctctgaacggtgcaacgtaatggcgacagaaagtatcttatttatatatagatatatatatgtaatttatataaaatatatagaaattattatatatatatattatacactctcatataatatatatatattcacacacatttgggttagaaaatctatggagacttcatcaatggtactatgttattagagaaatgctttaattttcatattccaatcagatggcatcttctatcccagctggttgggaagggattgaagatggtagcaagtgctgcactaagggcactcgcatttggtcattctcttgagagctaggaggggtcagcctgaggccggagaggaagggcttttgcctggggtgagagggtgagagacttgacctgaaagcagctgctgcccctgaggtgcagccagagtcctgtgtgcggacagagagaatgctgcacctcaggggcagccagagtcctgtgtgcggacagagagaatggctaatgatgctccgcgtggaattgcctattgttttatgccacctgatgtgtctgcatgagaggtttcctttttgttcctttttaagctgctgttaaaccaaaaccatgttgtgctactgtgtcagccttttcattattgcaaattttacttttactatttaagtgaatgcatagaatccaatttgccaaggttctaaaggcttatgaggtcctgaaggagccaggccttgtgatggagtaggtgacacaggcctggttgtcctgtcagcagaagggaaagcaggggctgggctgagaggaggacacggagggctctgctgaggttccttcctgggttccaccaacagggacagggagtcacttgccttccagttctgtgctgggatggcgggacagcacttggcttgcttggccagctgcgtcatgagtttgatttggtttttttttttttgcagctgcttcatatgctctgctccagcccctccccaacagctggtagcttatggtttcttcaagaggaaagtagactttatgctgtacatttgagctgtagagctaagattcgcttactggtgagctgtgaaaccttgttgctttttcccagagtctgatggcagtgactgtgatcaagggaatcttcaccgccacaagtgcaggcagcaggtgtggttcaggtccccccccaccccactgtgctcctttgaagccaacgtgcctccctcgcctccatactggagggacgacgcaggggagaacagagaagtgcttggccctaggattgaggcacttgtttcctagcccgctgggttagggctggtgcaagcgaggcaatgttgaggatgctttaagcactaccagccgaatccgggaactctgttaacagttgtccaaccagcagaatgaggctaactgtataaagcatgggacccaggatgaggataaggaaaggacagcggctttccctgggcagtacaatggcttgaaggcaaaaagggataaagtgacagccgactgtgactctggtgaggaggggtgagcagggaggttgattctctgatgttaactaagtggcaaagtctcaaccgtgctcagccctccccctcccagggaagagaaacaaagattcaaagtaagcatgatactagtgggtttaccagtgtttcttccaaggagacatatattttttaataaacgatagttgcaatgaactgtggctcagagaccttcttaaagtagttgagaagggagggcgtgggcaaagcagtgggaagaacatcccaaacttttgggggccagagggctctctccttagtgatgatcagctagccgagctgggccgtcctggggatcggtacagctccctggggtggtgacaggccctttgtgaaagttgtgtgcttggtcttccaccccagccccagacactgcttcaaatagcaccaaccagatgggagtccacatctgtggtggcaaaatgctgacattttcccaagaggtacacaaggtgggagaggcctgctgtagcagaggtgtgtgttagagaaagcaggggcctgatttagtagcagagaactgggtgagaaaaatggccagagaaagtgacctgccagctaccagtgtttccgaaaatgagggtgggatgggcccatttgcagagcaggacagcagtcatccccatagccctctgaggaggggagggatgcttagagcaggcagttctgtcagttctgacgtggcaggtgccattgcaacttgtgcggaggagtcttaggaagtgctgtcataattcataaggtcaagagcaacatctggatgaatgagccacctgaaatgtgtgtgggctgagccacaggaagggtgagtcctcttgcttgtggtgctttatggtgtgcaggttgcttgctttcccacattctctcatttgcttgaaggcagcctaacaaaagggagtccccaaagagctccatgagagcttaagaaaattcatctcctgaggacaaagagaacaaagatctgtcctgtggtcacactgttgaggctctgtcttcacagctgatgttctcctagtggaggtacagctgaagaacattcagccccagcacgagaagatacagagcaacttggaaaccccaaagggagacacacccttaacactgccgtgctgtgctgtgccgtgtcctgaaggaggagagagccctatctcctcctggttttgttgctgacattgcagctgatcatgccttgactccttcatctctaacagaggaagaactgtattatcaaaccttatggtctacccatgaataaataaaatatttgttcaagcacaaa

SEQ ID NO: 63799 - DNA, 4325 bp, Homo sapiens
agcacccattctctgcttgagctcccgcttcttctttgccgctgggcctcggcccagaagccacgacgggcgacacggagccgccagtgctggagggggagccgtgggtgcggggcaccgtgggggccgaggccccgggacgcccgcccggccccaggccccgctcagcccgggcgcccccacgggtgccccccccttcttggtccgagcagtgtgagtgtgccagggagcccggcggcggcggcggcggtggtggcggcggtggcggcggcgtggaatccggcgtgggctggggggtccgagccgcggggggcagtgccatgcacaagcaccagcactgctgtaagtgccctgagtgctatgaggtgacccgcctggccgccctgcggcgcctcgagcctccggggtacggcgactggcaagtccccgacccttacgggccaggtgggggcaacggcgccagcgcgggttatgggggctacagctcgcagaccttgccctcgcaggcgggggccacccccacccctcgcaccaaggccaagctcatccccaccggccgggatgtggggccggtgcctcttaagccagtcccgggcaagagcacccccaaactcaacggcagcggccccagctggtggccagagtgcacctgtaccaaccgggactggtatgagcaggtgaatggcagtgatggcatgttcaaatatgaggaaatcgtacttgagaggggcaactctggcctgggcttcagtatcgcaggtggcatcgacaatccccatgtccctgatgaccctggcatttttattaccaagattatccctggtggagcagctgccatggatgggaggctgggggtgaatgactgtgtgctgcgggtgaatgaggtggaagtgtcggaggtggtacacagccgggcggtggaggcgctgaaagaggcaggccctgtggtgcgattggtggtgcggaggcgacagcctccacccgagaccatcatggaggtcaacctgctcaaagggcccaaaggcctgggtttcagcattgctgggggtattggcaaccagcacatcccaggagacaacagcatctacatcaccaagatcattgaggggggtgctgctcagaaggatggacgcctacagattggggaccggctgctggcggtgaacaacaccaatctgcaggatgtgaggcacgaggaagctgtggcctcactgaagaacacatctgatatggtgtatttgaaggtggccaagccaggcagcctccacctcaacgacatgtacgctccccctgactacgccagcacttttactgccttggctgacaaccacataagccataattccagcctgggttatctcggggctgtggagagcaaggtcagctaccctgctcctcctcaggttccccccacccgctactctcctattcccaggcacatgctggctgaggaggacttcaccagagagcctcgcaagatcatcctgcacaaaggctccacaggcctgggcttcaacatcgtaggaggagaggatggagaaggcatttttgtctccttcatcctggcaggaggcccagctgacctgagtggggagctgcgcaggggagaccggatcttatcggtgaatggagtgaatctgaggaatgcaactcatgagcaggctgcagctgctctgaaacgggccggccagtcagtcaccattgtggcccagtacagacctgaagaatacagtcgctttgaatcgaagatacatgacttacgagaacaaatgatgaacagcagcatgagctctgggtctgggtccctccgaacaagtgaaaagaggtccttgtatgtcagggccctgtttgattatgatcggactcgggacagctgcctgccaagccaggggctcagcttctcttatggtgacattctgcatgtcattaatgcctctgatgatgagtggtggcaggcaaggctggtgaccccacacggagaaagtgagcagatcggtgtgatccccagtaagaagagggtggaaaagaaagaaagagctcgattgaaaactgtgaagttccatgccaggacggggatgattgagtctaacagggacttcccggggttaagtgacgattattatggagcaaagaacctgaaaggacaagaggatgctattttgtcatatgagccagtgacacggcaagaaattcactatgcaaggcctgtgatcatcctgggcccaatgaaggaccgagtcaatgatgacctgatctccgaatttccacataaatttggatcctgtgtgccacatactacccggcctcgacgtgataatgaggtggatggacaagactaccactttgtggtgtcccgagaacaaatggagaaagatattcaggacaacaagttcatcgaggcgggccaatttaatgataacctctatgggaccagcatccagtcagtgcgggcagttgcagagaggggcaagcactgcatcttagatgtttccggcaatgctatcaagagactgcagcaagcacaactttaccccattgccattttcatcaagcccaagtccattgaagcccttatggaaatgaaccgaaggcagacatatgaacaagcaaataagatctatgacaaagccatgaaactggagcaggaatttggagagtactttacagccattgtacagggtgactcactggaagagatttataacaaaatcaaacaaatcattgaggaccagtctgggcactacatttgggtcccatcccctgaaaaactctgaagaatcccctccaaccattctcttgtgaacagaagaaatcaagtccctcttccctcctccctcttcattcctgtccccatggggagaacaaatgctactgttcttgtccccttttttagatatgtcaaaaaaaattaagttttctagtcctgttctttttttttttttaagtttttgtttgtttcagtttattttttgggatgatgccatctcattcatcatgtgactgtgcccattcctgcatggacctttcccaagcgctagcacaggtgcaaaatccatcagagccattgttttcataaaaaccaagcagaagtgaagagaaaagaggaggactgatggaaagacagactctggacagctgcacggcttgtgaagtgagctaaatgcaccacatgatgagatgctcctgggcatttctccctatctgtactgctgtcttgcagctctgaacggtgcaacgtaatggcgacagaaagtatcttatttatatatagatatatatatgtaatttatataaaatatatagaaattattatatatatatattatacactctcatataatatatatatattcacacacatttgggttagaaaatctatggagacttcatcaatggtactatgttattagagaaatgctttaattttcatattccaatcagatggcatcttctatcccagctggttgggaagggattgaagatggtagcaagtgctgcactaagggcactcgcatttggtcattctcttgagagctaggaggggtcagcctgaggccggagaggaagggcttttgcctggggtgagagggtgagagacttgacctgaaagcagctgctgcccctgaggtgcagccagagtcctgtgtgcggacagagagaatggctaatgatgctccgcgtggaattgcctattgttttatgccacctgatgtgtctgcatgagaggtttcctttttgttcctttttaagctgctgttaaaccaaaaccatgttgtgctactgtgtcagccttttcattattgcaaattttacttttactatttaagtgaatgcatagaatccaatttgccaaggttctaaaggcttatgaggtcctgaaggagccaggccttgtgatggagtaggtgacacaggcctggttgtcctgtcagcagaagggaaagcaggggctgggctgagaggaggacacggagggctctgctgaggttccttcctgggttccaccaacagggacagggagtcacttgccttccagttctgtgctgggatggcgggacagcacttggacagcggctttccctgggcagtacaatggcttgaaggcaaaaagggataaagtgacagccgactgtgactctggtgaggaggggtgagcagggaggttgattctctgatgttaactaagtggcaaagtctcaaccgtgctcagccctccccctcccagggaagagaaacaaagattcaaagtaagcatgatactagtgggtttaccagtgtttcttccaaggagacatatattttttaataaacgatagttgcaatga

SEQ ID NO: 63800 - DNA, 3080 bp, Homo sapiens
agcacccattctctgcttgagctcccgcttcttctttgccgctgggcctcggcccagaagccacgacgggcgacacggagccgccagtgctggagggggagccgtgggtgcggggcaccgtgggggccgaggccccgggacgcccgcccggccccaggccccgctcagcccgggcgcccccacgggtgccccccccttcttggtccgagcagtgtgagtgtgccagggagcccggcggcggcggcggcggtggtggcggcggtggcggcggcgtggaatccggcgtgggctggggggtccgagccgcggggggcagtgccatgcacaagcaccagcactgctgtaagtgccctgagtgctatgaggtgacccgcctggccgccctgcggcgcctcgagcctccggggtacggcgactggcaagtccccgacccttacgggccaggtgggggcaacggcgccagcgcgggttatgggggctacagctcgcagaccttgccctcgcaggcgggggccacccccacccctcgcaccaaggccaagctcatccccaccggccgggatgtggggccggtgcctcttaagccagtcccgggcaagagcacccccaaactcaacggcagcggccccagctggtggccagagtgcacctgtaccaaccgggactggtatgagcaggtgaatggcagtgatggcatgttcaaatatgaggaaatcgtacttgagaggggcaactctggcctgggcttcagtatcgcaggtggcatcgacaatccccatgtccctgatgaccctggcatttttattaccaagattatccctggtggagcagctgccatggatgggaggctgggggtgaatgactgtgtgctgcgggtgaatgaggtggaagtgtcggaggtggtacacagccgggcggtggaggcgctgaaagaggcaggccctgtggtgcgattggtggtgcggaggcgacagcctccacccgagaccatcatggaggtcaacctgctcaaagggcccaaaggcctgggtttcagcattgctgggggtattggcaaccagcacatcccaggagacaacagcatctacatcaccaagatcattgaggggggtgctgctcagaaggatggacgcctacagattggggaccggctgctggcggtgaacaacaccaatctgcaggatgtgaggcacgaggaagctgtggcctcactgaagaacacatctgatatggtgtatttgaaggtggccaagccaggcagcctccacctcaacgacatgtacgctccccctgactacgccagcacttttactgccttggctgacaaccacataagccataattccagcctgggttatctcggggctgtggagagcaaggtcagctaccctgctcctcctcaggttccccccacccgctactctcctattcccaggcacatgctggctgaggaggacttcaccagagagcctcgcaagatcatcctgcacaaaggctccacaggcctgggcttcaacatcgtaggaggagaggatggagaaggcatttttgtctccttcatcctggcaggaggcccagctgacctgagtggggagctgcgcaggggagaccggatcttatcggtgaatggagtgaatctgaggaatgcaactcatgagcaggctgcagctgctctgaaacgggccggccagtcagtcaccattgtggcccagtacagacctgaagaatacagtcgctttgaatcgaagatacatgacttacgagaacaaatgatgaacagcagcatgagctctgggtctgggtccctccgaacaagtgaaaagaggtccttgtatgtcagggccctgtttgattatgatcggactcgggacagctgcctgccaagccaggggctcagcttctcttatggtgacattctgcatgtcattaatgcctctgatgatgagtggtggcaggcaaggctggtgaccccacacggagaaagtgagcagatcggtgtgatccccagtaagaagagggtggaaaagaaagaaagagctcgattgaaaactgtgaagttccatgccaggacggggatgattgagtctaacaggtcgatcaaaacgaaacgtaaaaagagtttccgcctctctcgaaagtttccattttacaagagcaaagaaaacatggcccaggagagcagcatacaggaacagggagtgacatccaacaccagtgacagcgaaagcagttccaaaggacaagaggatgctattttgtcatatgagccagtgacacggcaagaaattcactatgcaaggcctgtgatcatcctgggcccaatgaaggaccgagtcaatgatgacctgatctccgaatttccacataaatttggatcctgtgtgccacatactacccggcctcgacgtgataatgaggtggatggacaagactaccactttgtggtgtcccgagaacaaatggagaaagatattcaggacaacaagttcatcgaggcgggccaatttaatgataacctctatgggaccagcatccagtcagtgcgggcagttgcagagaggggcaagcactgcatcttagatgtttccggcaatgctatcaagagactgcagcaagcacaactttaccccattgccattttcatcaagcccaagtccattgaagcccttatggaaatgaaccgaaggcagacatatgaacaagcaaataagatctatgacaaagccatgaaactggagcaggaatttggagagtactttacagccattgtacagggtgactcactggaagagatttataacaaaatcaaacaaatcattgagacagcggctttccctgggcagtacaatggcttgaaggcaaaaagggataaagtgacagccgactgtgactctggtgaggaggggtgagcagggaggttgattctctgatgttaactaagtggcaaagtctcaaccgtgctcagccctccccctcccagggaagagaaacaaagattcaaagtaagcatgatactagtgggtttaccagtgtttcttccaaggagacatatattttttaataaacgatagttgcaatga

SEQ ID NO: 63801 - DNA, 2505 bp, Homo sapiens
agcacccattctctgcttgagctcccgcttcttctttgccgctgggcctcggcccagaagccacgacgggcgacacggagccgccagtgctggagggggagccgtgggtgcggggcaccgtgggggccgaggccccgggacgcccgcccggccccaggccccgctcagcccgggcgcccccacgggtgccccccccttcttggtccgagcagtgtgagtgtgccagggagcccggcggcggcggcggcggtggtggcggcggtggcggcggcgtggaatccggcgtgggctggggggtccgagccgcggggggcagtgccatgcacaagcaccagcactgctgtaagtgccctgagtgctatgaggtgacccgcctggccgccctgcggcgcctcgagcctccggggtacggcgactggcaagtccccgacccttacgggccaggtgggggcaacggcgccagcgcgggttatgggggctacagctcgcagaccttgccctcgcaggcgggggccacccccacccctcgcaccaaggccaagctcatccccaccggccgggatgtggggccggtgcctcttaagccagtcccgggcaagagcacccccaaactcaacggcagcggccccagctggtggccagagtgcacctgtaccaaccgggactggtatgagcaggtgaatggcagtgatggcatgttcaaatatgaggaaatcgtacttgagaggggcaactctggcctgggcttcagtatcgcaggtggcatcgacaatccccatgtccctgatgaccctggcatttttattaccaagattatccctggtggagcagctgccatggatgggaggctgggggtgaatgactgtgtgctgcgggtgaatgaggtggaagtgtcggaggtggtacacagccgggcggtggaggcgctgaaagaggcaggccctgtggtgcgattggtggtgcggaggcgacagcctccacccgagaccatcatggaggtcaacctgctcaaagggcccaaaggcctgggtttcagcattgctgggggtattggcaaccagcacatcccaggagacaacagcatctacatcaccaagatcattgaggggggtgctgctcagaaggatggacgcctacagattggggaccggctgctggcggtgaacaacaccaatctgcaggatgtgaggcacgaggaagctgtggcctcactgaagaacacatctgatatggtgtatttgaaggtggccaagccaggcagcctccacctcaacgacatgtacgctccccctgactacgccagcacttttactgccttggctgacaaccacataagccataattccagcctgggttatctcggggctgtggagagcaaggtcagctaccctgctcctcctcaggttccccccacccgctactctcctattcccaggcacatgctggctgaggaggacttcaccagagagcctcgcaagatcatcctgcacaaaggctccacaggcctgggcttcaacatcgtaggaggagaggatggagaaggcatttttgtctccttcatcctggcaggaggcccagctgacctgagtggggagctgcgcaggggagaccggatcttatcggtgaatggagtgaatctgaggaatgcaactcatgagcaggctgcagctgctctgaaacgggccggccagtcagtcaccattgtggcccagtacagacctgaagaatacagtcgctttgaatcgaagatacatgacttacgagaacaaatgatgaacagcagcatgagctctgggtctgggtccctccgaacaagtgaaaagaggtccttgtatgtcagggccctgtttgattatgatcggactcgggacagctgcctgccaagccaggggctcagcttctcttatggtgacattctgcatgtcattaatgcctctgatgatgagtggtggcaggcaaggctggtgaccccacacggagaaagtgagcagatcggtgtgatccccagtaagaagagggtggaaaagaaagaaagagctcgattgaaaactgtgaagttccatgccaggacggggatgattgagtctaacagggtaagtggggatccccaaggaaatcagccagtaggtaaagagggttgagaagcctggagtttagtctgatgtgtaggagaactggggaacacaaaagaaaatctctttttcagggggctggctctgtcctatcagaacattgactgcttttcagaaagcagagagggagctcttaaagttcacagccagtctgtgctcctttcccctgggtaccggctcttgaagatgtgttagagttggactgtctggaaggctgacttgcttggggaaaatgaaaccactcgtgggtgtctccctggctatagatcctgtcagagcatccggccaagaagcccagctccagagctcccacctcccttcagaccacctgaggcaggcgggttctccattcacccctttttttctatgagct

SEQ ID NO: 63802 - DNA, 1839 bp, Homo sapiens
  misc_feature (180)..(180): n is a, c, g, or t
ggggacagtcctggcccactgcactgggaatctaggatgggggccttggccagagccctgccgtccatactgctggcattgctgcttacgtccaccccagaggctctgggtgccaaccccggcttggtcgccaggatcaccgacaagggactgcagtatgcggcccaggaggggctattngctctgcagagtgagctgctcaggatcacgctgcctgacttcaccggggacttgaggatcccccacgtcggccgtgggcgctatgagttccacagcctgaacatccacagctgtgagctgcttcactctgcgctgaggcctgtccctggccagggcctgagtctcagcatctccgactcctccatccgggtccagggcaggtggaaggtgcgcaagtcattcttcaaactacagggctcctttgatgtcagtgtcaagggcatcagcatttcggtcaacctcctgttgggcagcgagtcctccgggaggcccacagttactgcctccagctgcagcagtgacatcgctgacgtggaggtggacatgtcgggagacttggggtggctgttgaacctcttccacaaccagattgagtccaagttccagaaagtactggagagcaggatttgcgaaatgatccagaaatcggtgtcctccgatctacagccttatctccaaactctgccagttacaacagagattgacagtttcgccgacattgattatagcttagtggaagcccctcgggcaacagcccagatgctggaggtgatgtttaagggtgaaatctttcatcgtaaccaccgttctccagttaccctccttgctgcagtcatgagccttcctgaggaacacaacaaaatggtctactttgccatctcggattatgtcttcaacacggccagcctggtttatcatgaggaaggatatctgaacttctccatcacagatgacatgataccgcctgactctaatatccgactgaccaccaagtccttccgacccttcgtcccacggttagccaggctctaccccaacatgaacctggaactccagggatcagtgccctctgctccgctcctgaacttcagccctgggaatctgtctgtggacccctatatggagatagatgcctttgtgctcctgcccagctccagcaaggagcctgtcttccggctcagtgtggccactaatgtgtccgccaccttgaccttcaataccagcaagatcactgggttcctgaagccaggaaaggtaaaagtggaactgaaagaatccaaagttggactattcaatgcagagctgttggaagcgctcctcaactattacatccttaacaccttctaccccaagttcaatgataagttggccgaaggcttcccccttcctctgctgaagcgtgttcagctctacgaccttgggctgcagatccataaggacttcctgttcttgggtgccaatgtccaatacatgagagtttgaggacaagaaagatgaagcttggaggtcacagctggatctgcttgttgcatttccagctgtgcagcacgtctcagagattcttgaagaatgaagacatttctgctctcagctccgggggtgaggtgtgcctggcctctgcctccaccctcctcctcttcaccaggtgcatgcatgccctctctgagtctggactttgcttcccctccaggagggaccaccctccccgactggcctgggatatctttacaagcaggcactgtatttttttattcgccatctgatccccatgcctagcagagtgctggcacttagtaggtcctcaataaatatttattaaatgatgagatgatggaatca

SEQ ID NO: 63803 - DNA, 469 bp, Homo sapiens
aaggtccctggtgaggctgggtccaggcccagggctgacacctccttccatgtctctcccttcagcctgaacatccacagctgtgagctgcttcactctgcgctgaggcctgtccctggccagggcctgagtctcagcatctccgactcctccatccgggtccagggcaggtggaaggtgcgcaagtcattcttgtaagttggctctgctcccaggccctggagctcttggccttggccttcgccccatccttcttaggtccaaggtgttcctagcttatcagaaaggccacgtgatggacagatggagtccaagcccggaggtggcctggggattgagtcctggctcttggatgagtgtctttctgtctctgagtctctacttcctcatctcccaaaggggacgggcctgcttccttgatggagtcatgggagggctaagtgcggtaatatcatgtctccttggtttg

SEQ ID NO: 63804 - DNA, 1394 bp, Homo sapiens
ggggacagtcctggcccactgcactgggaatctaggatgggggccttggccagagccctgccgtccatactgctggcattgctgcttacgtccaccccagaggctctgggtgccaaccccggcttggtcgccaggatcaccagattgagtccaagttccagaaagtactggagagcaggatttgcgaaatgatccagaaatcggtgtcctccgatctacagccttatctccaaactctgccagttacaacagagattgacagtttcgccgacattgattatagcttagtggaagcccctcgggcaacagcccagatgctggaggtgatgtttaagggtgaaatctttcatcgtaaccaccgttctccagttaccctccttgctgcagtcatgagccttcctgaggaacacaacaaaatggtctactttgccatctcggattatgtcttcaacacggccagcctggtttatcatgaggaaggatatctgaacttctccatcacagatgacatgataccgcctgactctaatatccgactgaccaccaagtccttccgacccttcgtcccacggttagccaggctctaccccaacatgaacctggaactccagggatcagtgccctctgctccgctcctgaacttcagccctgggaatctgtctgtggacccctatatggagatagatgcctttgtgctcctgcccagctccagcaaggagcctgtcttccggctcagtgtggccactaatgtgtccgccaccttgaccttcaataccagcaagatcactgggttcctgaagccaggaaaggtaaaagtggaactgaaagaatccaaagttggactattcaatgcagagctgttggaagcgctcctcaactattacatccttaacaccttctaccccaagttcaatgataagttggccgaaggcttcccccttcctctgctgaagcgtgttcagctctacgaccttgggctgcagatccataaggacttcctgttcttgggtgccaatgtccaatacatgagagtttgaggacaagaaagatgaagcttggaggtcacagctggatctgcttgttgcatttccagctgtgcagcacgtctcagagattcttgaagaatgaagacatttctgctctcagctccgggggtgaggtgtgcctggcctctgcctccaccctcctcctcttcaccaggtgcatgcatgccctctctgagtctggactttgcttcccctccaggagggaccaccctccccgactggcctgggatatctttacaagcaggcactgtatttttttattcgccatctgatccccatgcctagcagagtgctggcacttagtaggtcctcaataaatatttattaaatgatgagatgatggaatca

SEQ ID NO: 63805 - DNA, 1271 bp, Homo sapiens
  misc_feature (180)..(180): n is a, c, g, or t
ggggacagtcctggcccactgcactgggaatctaggatgggggccttggccagagccctgccgtccatactgctggcattgctgcttacgtccaccccagaggctctgggtgccaaccccggcttggtcgccaggatcaccgacaagggactgcagtatgcggcccaggaggggctattngctctgcagagtgagctgctcaggatcacgctgcctgacttcaccggggacttgaggatcccccacgtcggccgtgggcgctatgagttccacagcctgaacatccacagctgtgagctgcttcactctgcgctgaggcctgtccctggccagggcctgagtctcagcatctccgactcctccatccgggtccagggcaggtggaaggtgcgcaagtcattcttcaaactacagggctcctttgatgtcagtgtcaagggcatcagcatttcggtcaacctcctgttgggcagcgagtcctccgggaggcccacagttactgcctccagctgcagcagtgacatcgctgacgtggaggtggacatgtcgggagacttggggtggctgttgaacctcttccacaaccagattgagtccaagttccagaaagtactggagagcaggatttgcgaaatgatccagaaatcggtgtcctccgatctacagccttatctccaaactctgccagttacaacagagattgacagtttcgccgacattgattatagcttagtggaagcccctcgggcaacagcccagatgctggaggtgatgtttaagggtgaaatctttcatcgtaaccaccgttctccagttaccctccttgctgcagtcatgagccttcctgaggaacacaacaaaatggtctactttgccatctcggattatgtcttcaacacggccagcctggtttatcatgaggaaggatatctgaacttctccatcacagatgacatgataccgcctgactctaatatccgactgaccaccaagtccttccgacccttcgtcccacgggtaaggagtcccttagttccccatgagtgcagaccgagcctactagactccagaggtttctctttaaaacctctgcatctctcagcttgaccaagagtgagaaggccgggatgagactcccactgaaggctggggtgctgctcctttcaaagcctaaataacagaggccacgccccatatcttgtgggaccacagcttgtccaatcttttattggtgttatctaagaatcccaaggaatgctggcatagtccat

SEQ ID NO: 63806 - DNA, 243 bp, Homo sapiens
acaaactcctggactcaagtgacctactcacctcaacatcccaaagtgctgggattgcacgtgtgagccaccgtgcctggccctatatattttttaatgttcacattgcttatctgtataaaatataataaggttacattatttaatcaacattaccaataaataagaatatggagtactctttctgctcattttagatctaggctttaattttacagtggttctaaagtggtaagatggaaa

SEQ ID NO: 63807 - DNA, 726 bp, Homo sapiens
catgatgcagcagctaatttcaaacctaccactgcatgacagttttagtttgcctttttgcctctggtgggcatgaagactgagcaaagctgggaatcctgcagatgagagtgtgaggagccagggaaaggcagaaccacctccatgctgtagcaagcaatttctagatactagaagcataatagaaacatttttctgtacaggtattaaactactggtctgtttgacagactttggtaacaatccaaagaccctgagggtctgagcagctagaagtcctagacaaagaacttgtggatgacttttgtcccatgtggcttttgtgaagtatggcaaaggtttttcatgagtgcctgattgttattcctgaacaatatccatagcactgttggcctcaggagtgcacagctcctgctgatgtatttttctttttgtgaaggcaaagggacaattatcactgcatgtcatctcctagacaatcagtcaaatagagctggtggccagtggttagctattcgcacgttatttgccatgtaaatgaaaacgtctttatttatcaaaaaaacacagaggctatttttatatccttggtatgaaatatgtatttaaactatttaaatatttataaagaaatgaatgttttcttttcattttggtaaaaaaaaagcttgctgttttaacaagaaatgcactactgttgtgtatagtagatcaaaaattatttat

SEQ ID NO: 63808 - DNA, 238 bp, Homo sapiens
aaatggaagttgaactgagtgtggtttccagtacagggcatctggccaccttcacctcagtaaatactgctgatcgactctctctggctctggctgtcctgccagagacagccaaacacaggagacatgacaaattactatcatcttttgcttctttatttttattattattatttttctttttgtggagaacagcgtcttgctgtattgcccagcctgatctcaaactcctgggctg

SEQ ID NO: 63809 - DNA, 264 bp, Homo sapiens
tcctgaaatactctctactgtcactgcttcagtttaatttatagatagcaccagatatgagtccttattagttctgataactctgaaatggttatttggtatttcttcagtgacaagcaaactatccccccacctgcctttaatggccagtgtttttgatttgcataccaataagcgatctaggtagaggtaatcatctactaatttgctaacctttggaacataattttttctctagtaagctgtaaatcacttgaagttaga

SEQ ID NO: 63810 - DNA, 726 bp, Homo sapiens
cctctgtcgctagataggttaccaagggatggtgaggacacacacacacacacacagttggtgataaccttgtgtcctgaagcatgagactcttacctgtggtagataaggagatagaagttgaagagaaagcttggcttatgcagtagctttgtcacttgaaagatgtggaagcagctgctgttgcaaggattatggaggtggctagcttttctaaatcaccttagcagctttgaagcaagagaatgaaagatgcagttcagcctgctatctactcagagtatgctgtgaaaggcaggaactctcccaagacaacatgtaaagaaaaccttgcttccgtggccaggaggcagagcatgctgaaaatgagaaccaatatttcatcacaagagcagcagagctgcaaaagacacttgtgcatcctcagcaggtctcctgtactaaagtgggggcttctattatttttatttttgtagagacggggatcttgctatgttcctcaggctggtttcgaactcctggcctcaactgatccacctgccatggcctcacaaacttctgggattacagacatgagccacagtaaccggcccattgggtgcttttaaaggaataaatgggactctaggcctgacgtgggatgtttgggtggatgtaccaaagaaccttgagcccccagagtcccctgaagcatcctggccagcagaaactgccttcttcccattg

SEQ ID NO: 63811 - DNA, 884 bp, Homo sapiens
ccttgtctctgcaaaaaattaaatattagttgggcacggtgtcatgtgcctgtagtcccagctacttgggaagctgttgttgggaggatgccttgaactcctgagctcaagtcatcctcccacctcagccttccgagtagctggaactgcaggtgtgagccaccatgcctggctgatttgtctttttaaattttttatagagaccgagtctcaactatattgtccaggctggaaaagaacttctttccctccaagtgataaccttttccagacaagtcagcttaaaaactgacccaaaggccctgaagtacacagttttcttggagaaagaaaaaaataagtgaaaaggacttgctgacttgctaattcattttggggcctgtgggtaacatcagaatggcaaagcacttggggcttttttctaatttgtatttttttaatcttctgagaaatgacttttatatgccaagattcattccatgattagtttttatgaccaagttatgaacgcttttgaatatggggacctagaatagaaatgctaacctacctgcaaggagagctctgtgattggcatccccatcatgctgtaactgacacaaaataaacttagggtaattgccgcatagtgtaactttaatgtgtgagcatactgtaacatctgacaagcttcttgatctagatcagcaatgtgtaacccattcattgttgtcactctcaacaaggccttatggtcaaacatcatcactctcactaaagagatagtttactgaaatatactgagattttgaaactggagtcaagaggtagcacactgttttatgttgatccatttaatggtccttgacagccaataaaaagacactggaagaataaaaaaaaaa

SEQ ID NO: 63812 - DNA, 1411 bp, Homo sapiens
ctctcgcccgtgacattttctccaaatcggaagaaaatcaagtgtatgtcgagctttgccgcaggcagcccttggtctccgctttcagattcggggtccgggagcggagcgccctgcccgcggcggtgctaaactctggggccagggtgtggccctcagcgagcgccctgggactggccgccccgccgaaggatgccgaggatcgggcaaggccggcgtccggtctgcgcggggcgcgggtgctctccgaaggccgcgagccaggggcctcgctgcgggttcaagtgcgtccgggtttggacgtcgcggctccaggagtgtgctctctctcctgcccatcccctccccggagttcagcgcatccggggccccggggacccctcttcccggccctgctggccgcgcttgcccgcccgcatggggccgaggttcctggccgacgcgcgagggcgcgggcgggtaccgggttccggtttttcccaggccccgatccccgcccacgcacgaggcccccggcccacgcacgaggcgcccacgcccatcgtggaggctccgcctggaaaagaagtccgacttcctctccaagctgctccgaggggaatggggaatcggcaggaaatgacccgaactgccagcctgcgcctttgcagccggccctcgctttgctgaagacgagcagctcccaccaaagtcttgcctccccttaccccgaaagccccgctcagttcaatatttcaagtgaaaatctgcctgttcgaaaagaaaatattcacaaatgagcagtgtattagaagacaactgaattgcttctaagaatgggtctcactctgccatcacccaggctggagtgtggtggcaccatcatggctcactgcagccttgaactcctgagctcaagtcatcctcccacctcagccttccgagtagctggaactgcaggtgtgagccaccatgcctggctgatttgtctttttaaattttttatagagaccgagtctcaactatattgtccaggctggaaaagaacttctttccctccaagtgataaccttttccagacaagtcagcttaaaaactgacccaaaggccctgaagtacacagttttcttggagaaagaaaaaaataagtgaaaaggacttgctgacttgctaattcattttggggcctgtgggtaacatcagaatggcaaagcacttggggcttttttctaatttgtatttttttaatcttctgagaaatgacttttatatgccaagattcattccatgattagtttttatgaccaagttatgaacgcttttgaatatggggacctagaatagaaatgctaacctacctgcaaggagagctctgtgattggcatccccatcatgctgtaactgacacaaaataaacttagggtaattgccg

SEQ ID NO: 63813 - DNA, 1671 bp, Homo sapiens
ctctcgcccgtgacattttctccaaatcggaagaaaatcaagtgtatgtcgagctttgccgcaggcagcccttggtctccgctttcagattcggggtccgggagcggagcgccctgcccgcggcggtgctaaactctggggccagggtgtggccctcagcgagcgccctgggactggccgccccgccgaaggatgccgaggatcgggcaaggccggcgtccggtctgcgcggggcgcgggtgctctccgaaggccgcgagccaggggcctcgctgcgggttcaagtgcgtccgggtttggacgtcgcggctccaggagtgtgctctctctcctgcccatcccctccccggagttcagcgcatccggggccccggggacccctcttcccggccctgctggccgcgcttgcccgcccgcatggggccgaggttcctggccgacgcgcgagggcgcgggcgggtaccgggttccggtttttcccaggccccgatccccgcccacgcacgaggcccccggcccacgcacgaggcgcccacgcccatcgtggaggctccgcctggaaaagaagtccgacttcctctccaagctgctccgaggggaatggggaatcggcaggaaatgacccgaactgccagcctgcgcctttgcagccggccctcgctttgctgaagacgagcagctcccaccaaagtcttgcctccccttaccccgaaagccccgctcagttcaatatttcaagtgaaaatctgcctgttcgaaaagaaaatattcacaaatgagcagtgtattagaagacaactgaattgcttctaagaatgggtctcactctgccatcacccaggctggagtgtggtggcaccatcatggctcactgcagccttgaactcctgagctcaagtcatcctcccacctcagccttccgagtagctggaactgcaggtgtgagccaccatgcctggctgatttgtctttttaaattttttatagagaccgagtctcaactatattgtccaggctggaaaagaacttctttccctccaagtgataaccttttccagacaagtcagcttaaaaactgacccaaaggccctgaagtacacagttttcttggagaaagaaaaaaataagtgaaaaggacttgctgacttgctaattcattttggggcctgtgggtaacatcagaatggcaaagcacttggggcttttttctaatttgtatttttttaatcttctgagaaatgacttttatatgccaagattcattccatgattagtttttatgaccaagttatgaacgcttttgaatatggggacctagaatagaaatgctaacctacctgcaaggagagctctgtgattggcatccccatcatgctgtaactgacacaaaataaacttagggtaattgccgcatagtgtaactttaatgtgtgagcatactgtaacatctgacaagcttcttgatctagatcagcaatgtgtaacccattcattgttgtcactctcaacaaggccttatggtcaaacatcatcactctcactaaagagatagtttactgaaatatactgagattttgaaactggagtcaagaggtagcacactgttttatgttgatccatttaatggtccttgacagccaataaaaagacactggaagaataaaaaaaaaa

SEQ ID NO: 63814 - DNA, 3040 bp, Homo sapiens
gggccgccgtcggcgcgctgggtgcgggaagggggctctggatttcggtccctcccctttttcctctgagtctcggaacgctccagctctcagaccctcttcctcccaggtaaaggccgggagaggagggcgcatctcttttccaggcaccccaccatgggcaatgcctccaatgactcccagtctgaggactgcgagacgcgacagtggcttcccccaggcgaaagcccagccatcagctccgtcatgttctcggccggggtgctggggaacctcatagcactggcgctgctggcgcgccgctggcggggggacgtggggtgcagcgccggccgcaggagctccctctccttgttccacgtgctggtgaccgagctggtgttcaccgacctgctcgggacctgcctcatcagcccagtggtactggcttcgtacgcgcggaaccagaccctggtggcactggcgcccgagagccgcgcgtgcacctacttcgctttcgccatgaccttcttcagcctggccacgatgctcatgctcttcgccatggccctggagcgctacctctcgatcgggcacccctacttctaccagcgccgcgtctcggcgctccgggggcctggccgtgctgcctgtcatctatgcagtctccctgctcttctgctcgctgccgctgctggactatgggcagtacgtccagtactgccccgggacctggtgcttcatccggcacgggcggaccgcttacctgcagctgtacgccaccctgctgctgcttctcattgtctcggtgctcgcctgcaacttcagtgtcattctcaacctcatccgcatgcaccgccgaagccggagaagccgctgcggaccttccctgggcagtggccggggcggccccggggcccgcaggagaggggaaagggtgtccatggcggaggagacggaccacctcattctcctggctatcatgaccatcaccttcgccgtctgctccttgcctttcacgatttttgcatatatgaatgaaacctcttcccgaaaggaaaaatgggacctccaagctcttaggtttttatcaattaattcaataattgacccttgggtctttgccatccttaggcctcctgttctgagactaatgcgttcagtcctctgttgtcggatttcattaagaacacaagatgcaacacaaacttcctgttctacacagtcagatgccagtaaacaggctgacctttgaggtcagtagtttaaaagttcttagttatatagcatctggaagatcattttgaaattgttccctggagaaatgaaaacagtgtgtaaacaaaatgaagctgccctaataaaaaggagtatacaaacatttaagctgtggtcaaggctacagatgtgctgacaaggcacttcatgtaaagtgtcagaaggagctacaaaacctaccctcaatgagcatggtacttggcctttggaggaacaatcggctgcattgaagatccagctgcctattgatttaagctttcctgttgaatgacaaagtatgtggttttgtaatttgtttgaaaccccaaacagtgactgtactttctattttaatcttgctactaccgttatacacatatagtgtacagccagaccagattaaacttcatatgtaatctctaggaagtcaatatgtggaagcaaccaagcctgctgtcttgtgatcacttagcgaaccctttatttgaacaatgaagttgaaaatcataggcaccttttactgtgatgtttgtgtatgtgggagtactctcatcactacagtattactcttacaagagtggactcagtgggttaacatcagttttgtttactcatcctccaggaactgcaggtcaagttgtcaggttatttattttataatgtccatatgctaatagtgatcaagaagactttaggaatggttctctcaacaagaaataatagaaatgtctcaaggcagttaattctcattaatactcttattatcctatttctgggggaggatgtacgtggccatgtatgaagccaaatattaggcttaaaaactgaaaaatctggttcattcttcagatatactggaacccttttaaagttgatattggggccatgagtaaaatagattttataagatgactgtgttgtaccaaaattcatctgtctatattttatttagggaacatggtttgactcatcttatatgggaaaccatgtagcagtgagtcatatcttaatatatttctaaatgtttggcatgtaaatgtaaactcagcatcaaaatatttcagtgaatttgcactgtttaatcatagttactgtgtaaactcatctgaaatgttacaaaaataaactataaaacaaaaatttgaaaatggagtagtattttatgaactccctcaaataacattttgtgattaatataaacatagtatcttttaaatgagttcaaagtggaaaaattatatttaatttggcagattcgtaaagtgtggttgccaggttttaaagtgaggttgcaaattagagtttaaaatattcattataatacttggtattagaagatatttttttcctccagtttttacccttccagtatgatctttaaaatagtagaatcatcttatttttttcatagtgatattattggatagccactccttaaaaaaaaaaaagagatgcttgttttctccaaagtctcattgagttgtttatccaaagctatttcctttaagcagttatcaaactagctgatcacttagaatgatttcaaaccaatctaggcatcagtgtattttgatacaaacaatctacgtcaaatcagctcttaagaagaataaataagtggtttgcttttctacaaatttaaacaagccaggcaaaatttaacttaactaaaatctagacatgtaaataaatcttccctgtccaccaggcattctaaagttaagaaattattctaaatgggactaattaggcccatgggtaattcctaaacataaaattctgaagttgctttgaactagaagat

SEQ ID NO: 63815 - DNA, 2986 bp, Homo sapiens
gggccgccgtcggcgcgctgggtgcgggaagggggctctggatttcggtccctcccctttttcctctgagtctcggaacgctccagctctcagaccctcttcctcccaggtaaaggccgggagaggagggcgcatctcttttccaggcaccccaccatgggcaatgcctccaatgactcccagtctgaggactgcgagacgcgacagtggcttcccccaggcgaaagcccagccatcagctccgtcatgttctcggccggggtgctggggaacctcatagcactggcgctgctggcgcgccgctggcggggggacgtggggtgcagcgccggccgcaggagctccctctccttgttccacgtgctggtgaccgagctggtgttcaccgacctgctcgggacctgcctcatcagcccagtggtactggcttcgtacgcgcggaaccagaccctggtggcactggcgcccgagagccgcgcgtgcacctacttcgctttcgccatgaccttcttcagcctggccacgatgctcatgctcttcgccatggccctggagcgctacctctcgatcgggcacccctacttctaccagcgccgcgtctcggcgctccgggggcctggccgtgctgcctgtcatctatgcagtctccctgctcttctgctcgctgccgctgctggactatgggcagtacgtccagtactgccccgggacctggtgcttcatccggcacgggcggaccgcttacctgcagctgtacgccaccctgctgctgcttctcattgtctcggtgctcgcctgcaacttcagtgtcattctcaacctcatccgcatgcaccgccgaagccggagaagccgctgcggaccttccctgggcagtggccggggcggccccggggcccgcaggagaggggaaagggtgtccatggcggaggagacggaccacctcattctcctggctatcatgaccatcaccttcgccgtctgctccttgcctttcacgatttttgcatatatgaatgaaacctcttcccgaaaggaaaaatgggacctccaagctcttaggtttttatcaattaattcaataattgacccttgggtctttgccatccttaggcctcctgttctgagactaatgcgttcagtcctctgttgtcggatttcattaagaacacaagatgcaacacaaacttcctgttctacacagtcagatgccagtaaacaggctgacctttgaggtcagtagtttaaaagttcttagttatatagcatctggaagatcattttgaaattgttccctggagaaatgaaaacagtgtgtaaacaaaatgaagctgccctaataaaaaggagtatacaaacatttaagctgtggtcaaggctacagatgtgctgacaaggcacttcatgtaaagtgtcagaaggagctacattgaagatccagctgcctattgatttaagctttcctgttgaatgacaaagtatgtggttttgtaatttgtttgaaaccccaaacagtgactgtactttctattttaatcttgctactaccgttatacacatatagtgtacagccagaccagattaaacttcatatgtaatctctaggaagtcaatatgtggaagcaaccaagcctgctgtcttgtgatcacttagcgaaccctttatttgaacaatgaagttgaaaatcataggcaccttttactgtgatgtttgtgtatgtgggagtactctcatcactacagtattactcttacaagagtggactcagtgggttaacatcagttttgtttactcatcctccaggaactgcaggtcaagttgtcaggttatttattttataatgtccatatgctaatagtgatcaagaagactttaggaatggttctctcaacaagaaataatagaaatgtctcaaggcagttaattctcattaatactcttattatcctatttctgggggaggatgtacgtggccatgtatgaagccaaatattaggcttaaaaactgaaaaatctggttcattcttcagatatactggaacccttttaaagttgatattggggccatgagtaaaatagattttataagatgactgtgttgtaccaaaattcatctgtctatattttatttagggaacatggtttgactcatcttatatgggaaaccatgtagcagtgagtcatatcttaatatatttctaaatgtttggcatgtaaatgtaaactcagcatcaaaatatttcagtgaatttgcactgtttaatcatagttactgtgtaaactcatctgaaatgttacaaaaataaactataaaacaaaaatttgaaaatggagtagtattttatgaactccctcaaataacattttgtgattaatataaacatagtatcttttaaatgagttcaaagtggaaaaattatatttaatttggcagattcgtaaagtgtggttgccaggttttaaagtgaggttgcaaattagagtttaaaatattcattataatacttggtattagaagatatttttttcctccagtttttacccttccagtatgatctttaaaatagtagaatcatcttatttttttcatagtgatattattggatagccactccttaaaaaaaaaaaagagatgcttgttttctccaaagtctcattgagttgtttatccaaagctatttcctttaagcagttatcaaactagctgatcacttagaatgatttcaaaccaatctaggcatcagtgtattttgatacaaacaatctacgtcaaatcagctcttaagaagaataaataagtggtttgcttttctacaaatttaaacaagccaggcaaaatttaacttaactaaaatctagacatgtaaataaatcttccctgtccaccaggcattctaaagttaagaaattattctaaatgggactaattaggcccatgggtaattcctaaacataaaattctgaagttgctttgaactagaagat

SEQ ID NO: 63816 - DNA, 421 bp, Homo sapiens
ctatcttagaaattatttaggtatacaatgaataataatctgttaatcaattcattgtaatattagaccaaaagtgtaagttaccctaaagatcttagaaattgtcttcaaggccaggcgcagtggctcacgcctgtaatcccagcactttgggaagctgaggctggcctcaagcaatccatgtgcctcagcctcccaaagtactggtattataggtgtgagccaccgtgcctggccccaaagtgcttttgcttatataggttatgtgggttataattacttatacttaatcatattaaaaatcacaactgagaaatttagaatgtctgtttaaaaccacattagggccaagtgggagaatcatttgaagccaaaggaggccagcctgggcaacatagtgagacctcatctctacaaaaac

SEQ ID NO: 63817 - DNA, 498 bp, Homo sapiens
tatgttactattattgcaaagcaaactacccagaatttgatgagcaaaagctactgtcatttatttactcatgattctgtggattaggaattcagtgtcactcatttggagggttctgctccctgtgacgttggctgagtctttccttggctgcattcagctggtggttgagctgagccagaaagtccgagaaagcttcttgtttggtgtcagtgcatctctattggcctctttctctctccacatagcttgggcatcctcacagtaacatgttcttaagatagacttagatggctgccggcttctaacagggagtgcttcaagagagcctgtggaagctgacgatctcataaggccgagtcctgggtgtcatatagtgtgacttctgctgcattttattaatcaaaaacaaaacaaaacaaaacgtcattgggccagcccagattcaaggggaaggaaaataaacttcacctctcaatatgaagagtggcaaagaga

SEQ ID NO: 63818 - DNA, 3028 bp, Homo sapiens
  misc_feature (1993)..(1993): n is a, c, g, or t
  misc_feature (2793)..(2793): n is a, c, g, or t
gttcttttaaggtgagcatctccaggcttggccctagagcctcatacttgttacagtaaagaggagatggccacagcacaatgcccagagtgggcagaggccgggcaccaccaactgctgccgtggctcctgcaggagggcaggtgcagaccctcttggtggaggcatgtgccataacccttagcccaggcagggaacctaccatggacccagcatgccaggagagtccaagagcaaggggagagaagccacatgcggctccagattcattcctgggcttgagaggagccaggcaccaccgtaagagccagggtccctgcctgtacctgcccagccttgtggctcttctctggaagagcagccaggcacatggcaattaaggaggggaacaggtagaagcgcccgcagcttattgcataagtacttaaaatgcagtgttcaccaggttcacctcccagaggagacaaccttttgtgtgaggatgttcgtggagggaagtcactgaatggtttcagaatcctgttttttaattgaattgaggcatctctggttacttaaatataatgtatttgccaattaatttttccattgacgtcttaaaactcaggttcagatctcaggccagctacctcagaagatgcagctcagttgagagccccagaggggatttaggagcatcctggttagggctcagttgagggaggaaggaaccaaaggattttccaggtagctcgatcccagcagagcaggagctacactgacaatctgccaggtgcagtcctcgcctgtgaggcaggaagctgcagcccagaggggttgaggggctcacctgagtgagtgtgagcaggtgagcaagtgaggggcagaggcaggattccccccagggcagcctgaccgcagagcagcacagagggcatggcaggtgaatatgcgcaataaagacatcctgagaaggtgaggaccatgtgtctgatcagaagagaaatgacgggctgagaaatggcagccacaccttgaatgagctgccaccaccgaggaccctccctgacccctgtagaactctgacctggggacagggtcttcacagatggcccctggactggtgctctgtgcagtgtctgcctttctgggatagagggcacaggccagatgaggcagatgagggttcagggcctgatgccatacagcaccaggccttcggctccccagagagcagagggctccccctcaggccacaggctttctgctgcctgactgcatggagtggtggggccttgcccctgatgttgctgccttagaggagatgtttaaccttgcatctttgtttactcattagtcacagtgaatggggctgagggctggaagaggatgcgagtggtgtactcacatcacagcccagaagatggcgggggcccacctggccctgagattccatgtcctactctagaagatgccccatatcagtttagttcccttctcacccctcccttccagccatcctaaagatgtcatggccagatgtgccctggggtgagcattcctggccctatatctagacagaccatgaaggaaccaagtgcctggtgaggaattgagccccagaggagcaggagggcgggacacagggaagaggcagaaaggaagacactcccagaggcctcgttctgccacctgtgttcaagcgttaagatcagacgcacacatgtgagcacacatgtacacagctgctatcgggccttgcttggtcctcatcaaattgtgaactccacgagggcaaggaccaaatctccctgttcactgaattccccccctgcagctcacccagggccaccaaggaggcacttagcccatgttgaatgggtgaatgagcaccacctttctctttggtgccgtgaggagcaaagccttccctcaggtcgccccttcatgcgttcctcaggtggtacccttcctagctgcccctccccaggcagtctcacagcgctggccccanggtagtggctgcctctgggttgatgtgtgtggagcagacagccccagccagccagtgaggttcttcgagattgcactaagctctagcatgcttgttccctcctcccagccatctggtcagccctactgcagagacagtagggccagaatctcagggctaggtgggcccccaccatcctggtcatcttcaggcttgagccagagcccttttcttagccttggctgagggagagtcaagcccctgtttcttcatctgctgaccccacgtagacgcttctctgccaaggaggcagtgctgtgttcttcacgtgggagacctgattcctcaatgccagactgctgcagaaatgctgccttggaagccaggtgaggggtgacagagcagagtgggttgaggtgagagcctgcctcgcagaaggcagggcgggcagactccacagggaggtctgtcgggtcctagctgcctgaaggagcttgtttggcccaagcagagtgggtgcgtgcatttcactctccacctcagagtgtgagagcctgagaaagctctgtgtgtgtgcgtgtgtgtgtgtgtgtgtgtgtgttgggggagggggacttgcccaggctgctgtctgcaccatgaattaacttcactctttaagctgagtgtggatgggaagccagggagcagctgcacacaggctcatcctcgctcgcaggcactgctgcagcacagactgcccaaaggagtgtgagcagtgcgctggcttcctcctgcctcaggaatagagcccttcatcctccctgaagggaagattcatnagcagcgagggaagattcacgagcccagcccagctggcatttgtcatcattccagagacatgagccacgcccctgacccctctgccccttggctgctcttcgcagaccctctgtggcctcacctctctctgcatgcatgctgggccctctccttttcccgccaccacacagactgtgtgctttggagaaaatgaaaatgttcccgaagtaggttaataaacatcatctgaagaat

SEQ ID NO: 63819 - DNA, 339 bp, Homo sapiens
caaagcacccgtcctgaaggcctagagggtgccccctgtgccccgcggctccccagcacctgcttctcgtttcacatcttcaagtttgactgctcctgacactgccatactgtaaggaagcttaaaacagctcatatggagaaaccacatggagaagacctgagacttcagagaacgagagatagatgctttgccagctgcatgctaatccagtttcaatcattgtttggctgcaacagcatgagagatcccaaactagaaccacccagctgagcccttcccaaattcttcagccacagaaagtatgagagacagtaaaatcagtgtttttattttaat

SEQ ID NO: 63820 - DNA, 393 bp, Homo sapiens
attgattgacagatgattcatagataacttgcaacgtttcttcagtgaacgcatatttatttcttgggtaataagaaaaaacaatagaatgtggaatttggggcttggcctcttttagctcatttaaaaaaatattaaacacttggaattatcgagcgctgaaaaaggcaatagaaaattcaccttttaactccctcaaagatagaaatgtgtgaatctgctagtgggttgcgtttggctggtcctgcaggctgatttggtctgtcctctctcccagagagatccccaagcccggctgagatgtgcttgtttgtcttgagggcagacaaagcctagcaaaatcttatggaagctgatataaaagcttaatagcttataaaagctctaaaaatg

SEQ ID NO: 63821 - DNA, 399 bp, Homo sapiens
atatgtgccacgctctgtgataaaggcgaggtgtgttcttgtcggaaatttgagcagataatgtaaatcattttatagacggggaagccggggccaaaggaagttgccctgggtcatgcacctaggaagcggcacaatcaggagttggggtgattttaatcggtcatcctccggcctaattcccctctaggctgttcttttggggtacattctgcacctttgtatcgcctgcacctcaccccttgccgggcacgcagggcgtccgctaggcgctggatgcatttactacacctctgggagggttcctgaggggcacctggaaccggttagtccttgtcaacaagtctcccatctagtggcggagacaggcatgcaaaataaagtatgtagaacaagagt

SEQ ID NO: 63822 - DNA, 373 bp, Homo sapiens
actccagaacttcccagggctgccctgaagagcctgtctcttggtgatgggggtgcagccactggggccaggcaacagcaggaggctgaacccctaccataagcagtagaccatgagtgggctcctaagaacctccagttatccaaggccccatcagagtagctagatacacggtgtcgattggtgcattcacaaaccctgagctagacacaggatgctgattggtatgtttacacactttgagctagatacagagtgcgattggtatatttacaacccctgggctagacataaaagttctccaagtccccatgagaatagctagatacagcatgtcaatttggtgcactcaaaatccctgagctagacacag

SEQ ID NO: 63823 - DNA, 1863 bp, Homo sapiens
  misc_feature (1782)..(1782): n is a, c, g, or t
  misc_feature (1793)..(1793): n is a, c, g, or t
  misc_feature (1818)..(1818): n is a, c, g, or t
  misc_feature (1825)..(1825): n is a, c, g, or t
  misc_feature (1830)..(1832): n is a, c, g, or t
  misc_feature (1839)..(1839): n is a, c, g, or t
  misc_feature (1846)..(1846): n is a, c, g, or t
  misc_feature (1850)..(1850): n is a, c, g, or t
  misc_feature (1857)..(1857): n is a, c, g, or t
gcaggaaagaatttgagcccctcccccagcctgaccatctctgttggttgctcggccaggctccacgtcaaatccagtttgaaacacagaccctaggaccacgcaggaggtggtgggctcgcaggaaggttcctctcccagtggccatgggtagcaacagtgggcaggctggccgccacatctataaatccctagctgatgatggcccctttgactctgtggagccgcctaaaagacccaccagcagactcatcatgcacagcatggccatgttcggaagagagttctgctacgcggtggaggcagcgtatgtgaccccagtcctgctcagcgtaggtctgcccagcagcctgtacagcattgtgtggttcctcagccccatcctgggattcctgctgcagcccgtggtcggatcggccagcgaccactgccggtccaggtggggccgccggagaccctacatcctcaccctgggagtcatgatgctcgtgggcatggctctgtacctcaatggggctactgttgtagcagctttgattgctaacccaaggaggaagctggtttgggccataagtgtcaccatgataggtgtcgttctctttgattttgctgccgacttcattgatgggcccatcaaagcctacttatttgatgtctgctcccatcaggacaaggagaagggcctccactaccatgccctcttcacaggttttggaggtgccctgggttaccttttgggtgctatagactgggcccatctggagctgggaagactgttgggtacagaattccaggtcatgttcttcttctctgcattggtgctcactttgtgttttactgttcatctgtgcagtatctctgaagccccacttacagaggttgcaaagggcattcccccacagcaaacccctcaggaccctccattgtcatcagatggaatgtacgagtatggttctatcgagaaagttaaaaatggttacgtaaatccagagctggcaatgcagggagcaaaaaacaaaaatcatgctgaacagactcgcagggcaatgacattaaagtcactgctgagagcactggtgaacatgcctcctcactaccgctacctttgcatcagccacctcattggatggacggccttcctgtccaacatgctgttcttcacagatttcatgggccagattgtgtaccgcggggatccctatagtgcacacaactccacagagtttctcatctacgaaagaggagtcgaggttggatgttggggcttctgcatcaactccgtgttttcctcactttattcttactttcagaaagttttggtatcctacattggattaaagggtctttacttcacgggatatttgctgtttggcctggggacgggatttattgggctcttcccgaatgtctactccaccctggtcctgtgcagcctgtttggtgtaatgtccagcaccctgtacactgtgccctttaacctcattactgagtaccaccgcgaggaagaaaaggagaggcagcaggccccaggaggggacccagacaacagcgtgagagggaagggcatggactgcgccaccctcacatgcatggtgcagctggctcagatcctggtcggaggtggcctgggctttctggtcaacacagccgggaccgttgtcgtcgtggtgatcacagcgtctgcggtggcactgataggctgttgctttgtcgctctctttgttagatatgtggattaggtcaataaagagacaatgaccctaaaaaaaaaaaaaaaaaaangaaaaaaaaanaaaaaaaaaaaaaaaaaaacaaaanaccgccnggggnnntcattantggcggnggcnggaaaanaaaggg

SEQ ID NO: 63824 - DNA, 1686 bp, Homo sapiens
  misc_feature (1605)..(1605): n is a, c, g, or t
  misc_feature (1616)..(1616): n is a, c, g, or t
  misc_feature (1641)..(1641): n is a, c, g, or t
  misc_feature (1648)..(1648): n is a, c, g, or t
  misc_feature (1653)..(1655): n is a, c, g, or t
  misc_feature (1662)..(1662): n is a, c, g, or t
  misc_feature (1669)..(1669): n is a, c, g, or t
  misc_feature (1673)..(1673): n is a, c, g, or t
  misc_feature (1680)..(1680): n is a, c, g, or t
gcaggaaagaatttgagcccctcccccagcctgaccatctctgttggttgctcggccaggctccacgtcaaatccagtttgaaacacagaccctaggaccacgcaggaggtggtgggctcgcaggaaggttcctctcccagtggccatgggtagcaacagtgggcaggctggccgccacatctataaatccctagctgatgatggcccctttgactctgtggagccgcctaaaagacccaccagcagactcatcatgcacagcatggccatgttcggaagagagttctgctacgcggtggaggcagcgtatgtgaccccagtcctgctcagcgtaggtctgcccagcagcctgtacagcattgtgtggttcctcagccccatcctgggattcctgctgcagcccgtggtcggatcggccagcgaccactgccggtccaggtggggccgccggagaccctacatcctcaccctgggagtcatgatgctcgtgggcatggctctgtacctcaatggggctactgttgtagcaggttttggaggtgccctgggttaccttttgggtgctatagactgggcccatctggagctgggaagactgttgggtacagaattccaggtcatgttcttcttctctgcattggtgctcactttgtgttttactgttcatctgtgcagtatctctgaagccccacttacagaggttgcaaagggcattcccccacagcaaacccctcaggaccctccattgtcatcagatggaatgtacgagtatggttctatcgagaaagttaaaaatggttacgtaaatccagagctggcaatgcagggagcaaaaaacaaaaatcatgctgaacagactcgcagggcaatgacattaaagtcactgctgagagcactggtgaacatgcctcctcactaccgctacctttgcatcagccacctcattggatggacggccttcctgtccaacatgctgttcttcacagatttcatgggccagattgtgtaccgcggggatccctatagtgcacacaactccacagagtttctcatctacgaaagaggagtcgaggttggatgttggggcttctgcatcaactccgtgttttcctcactttattcttactttcagaaagttttggtatcctacattggattaaagggtctttacttcacgggatatttgctgtttggcctggggacgggatttattgggctcttcccgaatgtctactccaccctggtcctgtgcagcctgtttggtgtaatgtccagcaccctgtacactgtgccctttaacctcattactgagtaccaccgcgaggaagaaaaggagaggcagcaggccccaggaggggacccagacaacagcgtgagagggaagggcatggactgcgccaccctcacatgcatggtgcagctggctcagatcctggtcggaggtggcctgggctttctggtcaacacagccgggaccgttgtcgtcgtggtgatcacagcgtctgcggtggcactgataggctgttgctttgtcgctctctttgttagatatgtggattaggtcaataaagagacaatgaccctaaaaaaaaaaaaaaaaaaangaaaaaaaaanaaaaaaaaaaaaaaaaaaacaaaanaccgccnggggnnntcattantggcggnggcnggaaaanaaaggg

SEQ ID NO: 63825 - DNA, 498 bp, Homo sapiens
gtgaccccagtcctgctcagcgtaggtctgcccagcagcctgtacagcattgtgtggttcctcagccccatcctgggattcctgctgcagcccgtggtcggatcggccagcgaccactgccggtccaggtggggccgccggagaccctacatcctcaccctgggagtcatgatgctcgtgggcatggctctgtacctcaatggggctactgttgtagcaggtaagtgggctgcacaaggtgggcagacagggatatgtgtcttagtgtgtacctctgcaggaggaggatgttcatgtgtttgacctttcctagaaatttgttagaattgatctctcctaggttacaatgaacttcccctttgacaaatttggcccagattctgtggttggggagcctctacttctagaaatatcaaaataaatatgtttcattgttgtgaagatttaaaaataggattaaatttgtatctattttattaaatttgtatctattttatc

SEQ ID NO: 63826 - DNA, 1121 bp, Homo sapiens
gcaggaaagaatttgagcccctcccccagcctgaccatctctgttggttgctcggccaggctccacgtcaaatccagtttgaaacacagaccctaggaccacgcaggaggtggtgggctcgcaggaaggttcctctcccagtggccatgggtagcaacagtgggcaggctggccgccacatctataaatccctagctgatgatggcccctttgactctgtggagccgcctaaaagacccaccagcagactcatcatgcacagcatggccatgttcggaagagagttctgctacgcggtggaggcagcgtatgtgaccccagtcctgctcagcgtaggtctgcccagcagcctgtacagcattgtgtggttcctcagccccatcctgggattcctgctgcagcccgtggtcggatcggccagcgaccactgccggtccaggtggggccgccggagaccctacatcctcaccctgggagtcatgatgctcgtgggcatggctctgtacctcaatggggctactgttgtagcagctttgattgctaacccaaggaggaagctggtttgggccataagtgtcaccatgataggtgtcgttctctttgattttgctgccgacttcattgatgggcccatcaaagcctacttatttgatgtctgctcccatcaggacaaggagaagggcctccactaccatgccctcttcacagactcgcagggcaatgacattaaagtcactgctgagagcactggtgaacatgcctcctcactaccgctacctttgcatcagccacctcattggatggacggccttcctgtccaacatgctgttcttcacagatttcatgggccagattgtgtaccgcggggatccctatagtgcacacaactccacagagtttctcatctacgaaagaggagtcgaggttggatgttggggcttctgcatcaactccgtgttttcctcactttattcttgtaagtctttctctctcctaaggatgtcttctaaaagtttctggtctagcacaacttggatttgatatttctatgtgtatttcctactgtttaaaataccagattcttaataaatctatggacgtcaggaaaaactatcacctta

SEQ ID NO: 63827 - DNA, 388 bp, Homo sapiens
taataatgtccatcaatatatattggaaagccaactcagctccacattgcccctgcttttgcactacagcagcagagttgagtagttatgaccagggctgtataatccacgaagccaaaggtatttactatctggctggtcacagaaaaattttgctgacctgtgccctaaatgacagttccttgtaggtcaaatggtggttctgtgcttcctttgcagaggcagcaggccccaggaggggacccagacaacagcgtgagagggaagggcatggactgcgccaccctcacatgcatggtgcagctggctcagatcctggtcggaggtggcctgggctttctggtcaacacagccgggaccgttgtcgtcgtggtgatcacagcgtctg

SEQ ID NO: 63828 - DNA, 2349 bp, Homo sapiens
  misc_feature (1849)..(1849): n is a, c, g, or t
gctgaacccaaggtcttgcctcaaaatcaattcccccttccccctccaacacatacaccgcaacagaatgatacagctattgtgattgctaggagaagggctttgggcagtgcagtctcctgtttgcagtaacacctgctctttctgaagagctacatcagtaacatggtgggttttcctcacaacttaaaagtctgatcgtaacacattcatggaaactagaaccagcacacgaaaccattggcttgtggccctaaagaaataactctgtgtccagaaaatgccatgttaccaggttgcctacagctttgcctgtaacatgggcacaggctgggacatcagatagaagctggttcccatggtggctgggttgggatgggctaagttatgttgcagtaacgtacaacctcatcattttagtggctagcatgacgaagttttatttctcatgctacatgtctactgtggctttcccggtggctcagggttctcagagcccctggcagatggaggctccaccctgtgggacgtcaccagttgttatggctggggaaggacacactggaggctcttgctgctctgagccacaggagacatttgtcatatctgcacacagcccactggccctgcggcatcctaccacctgcccagaaggaggagaaccagaattactgctgagcagctcctctgcatgtgggtgcaatggcgtcttatgactctcagaaagctactctagtggccatctaccagtgtcacacagtgtcacgctcggtcatggcctgggaagatcagagtcacagagggataggacctggagtgtctctgaaaatagctgcctggtttcactccccggttttacgcctcttgagaagcagagtgatgcctagaatgagccctggactgggagggcacgtcccaggtttgaatcggggcctttgttccttttctgctgtatgactttggtcagatttctccttctgagaagtggagccaattaagcgatctccgatatgctgtaatctctgaaacatttcctcatatgtttctagcaacttccaacctgaggtctgatagacccagggttactttgcaagctaactgacatatcagtctcattgtctggtaaatctaattttaaccacttaatacttattttaggcttcacaaattattttaaaagaaaagataggggcataacaagaagaaagcttcggttacaatttccccgaaatgcctggatctgggattcctgcttcctggctgtgtggcagagaagatgaggatggccctggagtcagacgggactagggtccaagccccagctcttccacttgttaacaatgttctcagcctcagcttccttacctataccatggagacggcagtatttccttgtgggcttgttttaaggatccagtgacaggaagcatgcgaagctcttagaacagagcctggcactggtaaatagtcagtgagcagtagatgatattattaccatcctgtccctatccctgtcccccagcaaatattttggcttttaaatgttttaaatgatttcttgagaataagcaatgggtcagatgaaatctccttacctctcacctactggccatggcctaaatgtctgtagggagctggagccaggtgaggggagctgtggtttgggaagtgccgagttcattatgagcaagtgcacggtgctgggatgggctaggttccccgcacctcgccctgccactgcctcccaggacctgcctcttgctcccctgccacatagacagtctgcttgccccctgctttcagggacctcatggtccctgcccaatttaaagttcaaactctgcaactncacaaagttgcaggcttggcagctgtgggacctgggcttcagagactccaggttcctcggcccttgccccaggagggccctgctgaggtgaagtgggcataggagagagagtggacagagaatctgaatactgggtcacgttgcagttctgcgccttggaatgccataggctcccaggcccataagcccggcttcactaggcctgggtgtctgggttgtgaaatggggtgtctccttcccaggattgccgtaaggacctggattcatccaagcttaaagtaaattgctttgtaaggtgggagacaccgagtacaggcgagggactttattaggtcagggatttaatcaggcatctgtttttacagatttctttattcctgttccctcccctccccttcctgtcctttcacaataaagaataacaacttgacacagcttagagactaaaaatcatccttcaataaagcagcagaagttgcaaagtttcctatgatgctata

SEQ ID NO: 63829 - DNA, 370 bp, Homo sapiens
ctcttaattctctcctggcccttgattgattgcatgaggcccacccctattaaggagggcaatctgcttcacttagtctgcccatcccaatgttaatcgtatctgaaagactctctggaacacaaccagaatcatgtttggccaaatgtcctggcaccctggtgctcggtcacagtgacaagtacaagtaactatcacacatgccctttgtcatattggtgatttccactgtttttctcccaaactgcagcttatatttgttctcttaatactgttgagcaaaaacttttaatttttataaagtcgaatttatcaatgttttctttaatggtttgtgtttattgataataaagaacactttgcctaactc

SEQ ID NO: 63830 - DNA, 376 bp, Homo sapiens
atcagcataaactatcatcagcctttctgttgcagtataactgctggactttcctcatttcccaaagtgaccctaaaatcaatcagacctgacctggggccagatcagacttccctgagctcggattctctgggcccaaattgtggttccaaacagctccagcccacagtctcctctctgcccttcatcacctcctaggtacatgtgagagactcagatctatggttttacatctgttctaaagggaattcaactcatcccaggggttggttcacacacataaaaacaaggaaactaagctcctaattaacatgtgcatattatttgtcttccacttcttgcaggatcacgggatcaaatgctatatatatatgag

SEQ ID NO: 63831 - DNA, 500 bp, Homo sapiens
tagccgggcatggtggcaggcgcctgtaatcccagctactcggggggccgaggcaggagaatcacttgaatccgggagtcagaggttgcagtgagccgagattgtgccatcacactccagcctgggggacaagagcgagactttgtctcaaaaaaaaaaagagagagagagacagattgcacactgggcagagctggggtttgaacacaggatcaagacctgggttcttcctctgccttctctacttcctcaacaaaattggtaggctgacaaaaattcttgcccagtagctggaaggcagcgtggattgtgaagaggagatctaaagggaaacaaataaatggtcctggaacaggacaaatgggcggcagaagagaatagccggcctctcagcccttcagctgattcctcctatatcaagggtcacagccctgctaccactgatggcagaagacaagtgcttgtggcatttatactcaaggatggctctttagagcccc

SEQ ID NO: 63832 - DNA, 343 bp, Homo sapiens
  misc_feature (79)..(79): n is a, c, g, or t
  misc_feature (161)..(161): n is a, c, g, or t
catttgtcaccctctacgctacaccataatcatgagccacagagcatgtatcatcctagccatggggacctcattcttnggctgcattcaggccacctttctgaccactctcaccttccaattgccttactgtgtccccaatgaggtggactattatttcngtgatatcccagtcatgctgaagctggcttgtgcagatacctcagccctggagatggtggggttcatcagtgtgggcctcatgcccctcagctgtttccttctcatcctcacctcctacagtggcatcgtcttctccatcttgtagatctgctctgccgagggccgacgccgtgccttctcc

SEQ ID NO: 63833 - DNA, 431 bp, Homo sapiens
tatgtatgtgtgtgtatgcagatatgggtatatatatgtatgtacaaatatatacatgtttaatgtattattacacatacagatatacacaaagagagaaaaatttgaagaattagatgaatatacgtataaagagaagttttaggccaggtgcagtagctcacggctgtaatcctagcactttgggaggccaaggctggtggatcacctgaggtcaggagttcgagaccagcctggccaaaatggtgaaacctcgtctctactaaaaaaaaatacaaaaactagccgggcatggtggcgcgtgcctgtattcccagctactcagaaggctgaggcaggagaatcacttgaactcgagaggtggaggttgcagtgagccgacatcgtgccatcacactccagcctgggcaacagagcaaaacgctgtctca

SEQ ID NO: 63834 - DNA, 1587 bp, Homo sapiens
  misc_feature (52)..(52): n is a, c, g, or t
tatccataaatattatttattataattattttaaaggttttttgtatatgcnggaaaataaaagcagatctttacctaataatatttacatagatttcaaaaggattaaagggcctaaatgggaaaggtaaatgtagaaagttaatttttttaatgtaggagaatattcttgaaacctaggactttcaaaagcacagaaattaaggaaaatgcttattaaatttctctcctcaaaattaaggatgcttattcaatgtgagacacagtatatgaatattaaaatcaagtacaggtgccaagacaattcaatgaaaaaagaacagtctgttcaacaaatagcaaatagtgctaagaaaactggatgtgcacatgaaaaagaatgaagttggaccccctactttacatcatatacaaaaattaacttatagtgggtaaaaggcctaaatgtaacagctaaaactataaacaactagatgaaatcatagatataaatcttcatgaccttgaaataggcaatggtttcttagatatgacatcaaaagcacaaggaacaacaaaaaataaatgaatgaattggaactcatcaaaatgaaaaacttttgtgtatcagtggataccatcgagaaagtgaagacaccaacatgggtgaacgtatttgtaaatcatatatctgatgagacttgtagctagaatacataaataactcttacaattcaacactttagaaagacaaataacccaattaaacaatgggccaaagtatctgaatagacatttttcaaaagaagacatataaatgcccaataggcacatgaaaagatggtcaatgtcataagtcattagggaaacggaaatcaaaacaacaatgagatattgcttagccaccagattggctacagtaaaaaagacagataataaaagggttgccaagggagtggagaaattggaaccctcatacattgttggtgggaatgtaaaatggtgcaatttatttggcaaacagtctggcagtttcccaagggtttaaacatagagttattatatgactcagcattccactcctagatatacaaccaagagaaattaaaacttatgcctacacataagcttgtacataaatgttcaaaacaacattattaataatagccaaaagtagaaacaatccaaaatagccattaatgaataaataagatgtgatgtattcatccaatggcacattatgtagccatgaaaagaaatgaataactggttcatgcaccaacatggatgacccttcaacatgttatgctaagtaaagttcgtttcaaaagaccacgtattgtgtgagtacactgacagaaaatgttcaaaatatgtacatctacagaaagtagattagtgattgcctagggctgaggagtttgggaaaaattggaagtgactgttaatgggtatcaggtatctttttgagattatgtaaatgtcctaaaaattgattgcagtgatagttgcacaactctctggatataataaaattcatttaactgtgctctttaaatgggtaaactgtatccattatatctcaataaagtttctataagaaatatc

SEQ ID NO: 63835 - DNA, 467 bp, Homo sapiens
tgtatctgtgcttttcagatttttccatgaactacagaaattcctgtggcactgctccctagggagttgttctaagctttaacagaaggcatcttagaataatgtaaaaggtcggggttaccacagtattaaagtatttgaactcttggtctgtcaggatgggagttgactttgttggccagcctggtctgcctgtaagattcatatcaggggttgtacgagttggaaaagcatctcctcatatcttttttattgaaagggagcttcctctggcagtgcagaaaatgattgcgtgaaaagtttgataattatatcaaaagaaaatggtggtagttaggttaaatggaagatgcttgtactcacatggtcccattaaaggctattctattgttttttttcatattttgcagtctccttaacatttaagaaactgaaggtgtatttaatcaatagtgtcactatgatag

SEQ ID NO: 63836 - DNA, 448 bp, Homo sapiens
tgccaactggaggtgaccttgccagtcaggatccaggggcttaacctactctaaccaacctttctttttcctccaatcttctgtggggttctccactgggcacgccccaaagccagggggcacagggagcgcgaagtaatttgtagaggtcagcctcctggggcagagggcaggcaggagaagtatttggagcagatgagggtatctggaggggaaaatgtaagacatcaggcacaatattgccctgtctaatggacagagtgattccaggttttgtagggactgaagctcacataattttgggggatctactttaagaaaaatcagctgggtgtggtggctcatgcctgtaattctagcactttgggaggctgaggcggggtggattgtttgagctcaggagttcaagaccagcctgggcaacatggtcaaaccctgtctctacaaa

SEQ ID NO: 63837 - DNA, 507 bp, Homo sapiens
atatttgacaaaattggggtttgataaagacaggtgaatactataaagccaataaaatggtaacaacatatttacagacaaaaaatattaagggctggttatagtatagcataatcacaccttgtttccaaaacaatgagagatagtattaaaggatttgctccaaaagtttgacagtgattatctatgattggtaagattacaggtaaccatatcctttttttctttttatctacattatgatgagggaaagctgttttgctaaaatggagagtataattttataaaaggaaagtaaacaatcttctaaaacaaaaggtacaggtattaaaggatacttaaaagtaacagttattgaccataaacaggatgagacatagatacatatatataaatttaaaaaacaaacactgggccaggcatggtggctcatgcctgtaattccagcacgttgggaggccgaggcagatggatcacgaggtcaagagatcgagaccatcctggcca

SEQ ID NO: 63838 - DNA, 332 bp, Homo sapiens
gtaaggtcatgtcaaagagacagttgcaaagtctactcctgataccctggggaattgcagggaagcgtcacaggcagagcccagtggcacatgaacatacatttgcttctccctctgaggttggcacctctcaggcgtgtgcaggagaaacattggataggtatgtgggaacccaaggcacatattcacccagatgccaacttggagaggagcaaagagtggcaaggtatttattcaaaagaagtaatcgagaagagactgaccaccatggtgctaattaacaagtttaaatttccctattccccatcagggtgggctcaagaggataattt

SEQ ID NO: 63839 - DNA, 151 bp, Homo sapiens
ggatcctccatttcagcctcgtacagagggaaaagagcaggagtacagccgtgtgatgacccgtaaagcttctgcttggatacagcacatatccttctgctcacattctattggccaaagcaggccacaaggacaagctgatgtcaattag

SEQ ID NO: 63840 - DNA, 728 bp, Homo sapiens
gcagaggctcccgcagtgacctgcgccgccttcttcaggtggaaccaaaaggtcccggaaccggagccaggggtccaagttttctccgttgcctttggaatatgtagtccaagccagaacagtcaggaccgcaggtaccggtgagaaatggagtccagaatcctaaaaacctacgagaaatacggcagcgaccacttggaccgcgcctcccacccaccgctcgagccccggagacttctgggagtggccgccttgcctcgagtgcgcatgcgcagatcggccactactgggcccctggcctgaggcttagggtggagttagtgcgttcttagggccagtaggaggcgagtctgagtagaaactgatccaggtagcctcggaagggatcacctgctggatgggtgtgagctcctcagggtggggcgccgaaaccttcatggctcctgaggtagagccggcctccttggtaacacatgggactgggacttttaataccacccgacaggcccagcttgtctcgtcaagcgctaagtaaatggactcacgtcctatatgagggtttgaagttccatcacattcttcaatacatgacattatgttcttcatctttggacacgaatatatttgactaaaaatttgactaaaaaatcatctgaagaaataactgctaaatagttttattatttttgttctggaataggcttcttgaagataaaataagaaattta

SEQ ID NO: 63841 - DNA, 546 bp, Homo sapiens
ggtttatatctcggaagaaaaaagtcgcaagcagctgaagcaccaaagcaaggaagacttgaatgcataaaagcagaataagtggaaaaatatgcaggaataataaaagcagatatctgataatcaggaaaactgagaccccacctctcaatctgcctggatctcctttccaagcaataagcccattccacagctgctgtgagtgttggctgacaactctcagctgctactttctctgctttatcacccccatatccagaccttggccaatgggtgattgaaatattttgattgaattaatatataatgttaggaaaagtaactttcattgtttcctcatccatgtgtaaatacctctcagctactggtcgcctagacgtcattatgacacaagcacattgctagatttttcaaactattttttgtaataaaaatgattcaaatctttcaaaagatagaattaattagcaaaagtataatctaaagaatacccttcctcattaaaattataataacctaataaaaggtaaatttacattgcaaaaa

SEQ ID NO: 63842 - DNA, 3720 bp, Homo sapiens
cgccgagccgggactgcgctagcccgccgcgctctgggctgcccgagcgagcgttcggacctcgcaccccgcgcgccccgcgccgccgccgccgccggcttttgttgtctccgcctcctcggccgccgccgcctctggaccgcgagccgcgcgcgccgggaccttggctctgcccttcgcgggcgggaactgcgcaggacccggccaggatccgagagaggcgcgggcgggtggccgggggcgccgccggccccgccatggagctccgggcccgaggctggtggctgctatgtgcggccgcagcgctggtcgcctgcgcccgcggggacccggccagcaagagccggagctgcggcgaggtccgccagatctacggagccaagggcttcagcctgagcgacgtgccccaggcggagatctcgggtgagcacctgcggatctgtccccagggctacacctgctgcaccagcgagatggaggagaacctggccaaccgcagccatgccgagctggagaccgcgctccgggacagcagccgcgtcctgcaggccatgcttgccacccagctgcgcagcttcgatgaccacttccagcacctgctgaacgactcggagcggacgctgcaggccaccttccccggcgccttcggagagctgtacacgcagaacgcgagggccttccgggacctgtactcagagctgcgcctgtactaccgcggtgccaacctgcacctggaggagacgctggccgagttctgggcccgcctgctcgagcgcctcttcaagcagctgcacccccagctgctgctgcctgatgactacctggactgcctgggcaagcaggccgaggcgctgcggcccttcggggaggccccgagagagctgcgcctgcgggccacccgtgccttcgtggctgctcgctcctttgtgcagggcctgggcgtggccagcgacgtggtccggaaagtggctcaggtccccctgggcccggagtgctcgagagctgtcatgaagctggtctactgtgctcactgcctgggagtccccggcgccaggccctgccctgactattgccgaaatgtgctcaagggctgccttgccaaccaggccgacctggacgccgagtggaggaacctcctggactccatggtgctcatcaccgacaagttctggggtacatcgggtgtggagagtgtcatcggcagcgtgcacacgtggctggcggaggccatcaacgccctccaggacaacagggacacgctcacggccaaggtcatccagggctgcgggaaccccaaggtcaacccccagggccccgggcctgaggagaagcggcgccggggcaagctggccccgcgggagaggccaccttcaggcacgctggagaagctggtctccgaagccaaggcccagctccgcgacgtccaggacttctggatcagcctcccagggacactgtgcagtgagaagatggccctgagcactgccagtgatgaccgctgctggaacgggatggccagaggccggtacctccccgaggtcatgggtgacggcctggccaaccagatcaacaaccccgaggtggaggtggacatcaccaagccggacatgaccatccggcagcagatcatgcagctgaagatcatgaccaaccggctgcgcagcgcctacaacggcaacgacgtggacttccaggacgccagtgacgacggcagcggctcgggcagcggtgatggctgtctggatgacctctgcggccggaaggtcagcaggaagagctccagctcccggacgcccttgacccatgccctcccaggcctgtcagagcaggaaggacagaagacctcggctgccagctgcccccagcccccgaccttcctcctgcccctcctcctcttcctggcccttacagtagccaggccccggtggcggtaactgccccaaggccccagggacagaggccaaggactgactttgccaaaaatacaacacagacgatatttaattcacctcagcctggagaggcctggggtgggacagggagggccggcggctctgagcaggggcaggcgcagaggtcccagccccaggcctggcctcgcctgcctttctgccttttaattttgtatgaggtcctcaggtcagctgggagccagtgtgcccaaaagccatgtatttcagggacctcaggggcacctccggctgcctagccctccccccagctccctgcaccgccgcagaagcagcccctcgaggcctacagaggaggcctcaaagcaacccgctggagcccacagcgagcctgtgccttcctccccgcctcctcccactgggactcccagcagagcccaccagccagccctggcccaccccccagcctccagagaagccccgcacgggctgtctgggtgtccgccatccagggtctggcagagcctctgagatgatgcatgatgccctcccctcagcgcaggctgcagagcccggccccacctccctgcgcccttgaggggccccagcgtctgcagggtgacgcctgagacagcaccactgctgaggagtctgaggactgtcctcccacagacctgcagtgaggggccctccatgcgcagatgaggggccactgacccacctgcgcttctgctggaggaggggaagctgggcccaaaggcccagggaggcagcgtgggctctgccaatgtgggctgcccctcgcacacagggctcacagggcaggccttgctggggtccagggctgttggaggaccccgagggctgaggagcagccaggacccgcctgctcccatcctcacccagatcaggaaccagggcctccctgttcacggtgacacaggtcagggctcagagtgaccctcggctgtcacctgctcacagggatgctggtggctggtgagaccccgcactgcacacgggaatgcctaggtcccttcccgacccagccagctgcagggcacggggacctggatagttaagggcttttccaaacatgcatccatttactgacacttcctgtccttgttcatggagagctgttcgctcctcccagatggcttcggagggccgcagggcccaccttggaccctggtgacctcctgtcactcactgaggccatcagggccctgccccaggcctggacgggccctccttccctcctgtgccccagctgccaggcggccctggggaggggtggtgtggtgttgggaaggggtcctgcagggggaggaggacttggagggtctgggggcagctgtcctgaaccgactgaccctgaggaggccgcttagtgctgctttgcttttcatcaccgtcccgcacagtggacggaggtccccggttgctggtcaggtccccatggcttgttctctggaacctgactttagatgttttgggatcaggagcccccaacacaggcaagtccaccccataataaccctgccagtgccagggtgggctggggactctggcacagtgatgccgggcgccaggacagcagcactcccgctgcacacagacggcctaggggtggcgctcagaccccaccctacgctcatctctggaaggggcagccctgagtggtcactggtcagggcagtggccaagcctgctgtgtccttcctccacaaggtccccccaccgctcagtgtcagcgggtgacgtgtgttcttttgagtccttgtatgaataaaaggctggaaaccta

SEQ ID NO: 63843 - DNA, 3746 bp, Homo sapiens
  misc_feature (3736)..(3736): n is a, c, g, or t
cgccgagccgggactgcgctagcccgccgcgctctgggctgcccgagcgagcgttcggacctcgcaccccgcgcgccccgcgccgccgccgccgccggcttttgttgtctccgcctcctcggccgccgccgcctctggaccgcgagccgcgcgcgccgggaccttggctctgcccttcgcgggcgggaactgcgcaggacccggccaggatccgagagaggcgcgggcgggtggccgggggcgccgccggccccgccatggagctccgggcccgaggctggtggctgctatgtgcggccgcagcgctggtcgcctgcgcccgcggggacccggccagcaagagccggagctgcggcgaggtccgccagatctacggagccaagggcttcagcctgagcgacgtgccccaggcggagatctcgggtgagcacctgcggatctgtccccagggctacacctgctgcaccagcgagatggaggagaacctggccaaccgcagccatgccgagctggagaccgcgctccgggacagcagccgcgtcctgcaggccatgcttgccacccagctgcgcagcttcgatgaccacttccagcacctgctgaacgactcggagcggacgctgcaggccaccttccccggcgccttcggagagctgtacacgcagaacgcgagggccttccgggacctgtactcagagctgcgcctgtactaccgcggtgccaacctgcacctggaggagacgctggccgagttctgggcccgcctgctcgagcgcctcttcaagcagctgcacccccagctgctgctgcctgatgactacctggactgcctgggcaagcaggccgaggcgctgcggcccttcggggaggccccgagagagctgcgcctgcgggccacccgtgccttcgtggctgctcgctcctttgtgcagggcctgggcgtggccagcgacgtggtccggaaagtggctcaggtccccctgggcccggagtgctcgagagctgtcatgaagctggtctactgtgctcactgcctgggagtccccggcgccaggccctgccctgactattgccgaaatgtgctcaagggctgccttgccaaccaggccgacctggacgccgagtggaggaacctcctggactccatggtgctcatcaccgacaagttctggggtacatcgggtgtggagagtgtcatcggcagcgtgcacacgtggctggcggaggccatcaacgccctccaggacaacagggacacgctcacggccaaggtcatccagggctgcgggaaccccaaggtcaacccccagggccccgggcctgaggagaagcggcgccggggcaagctggccccgcgggagaggccaccttcaggcacgctggagaagctggtctccgaagccaaggcccagctccgcgacgtccaggacttctggatcagcctcccagggacactgtgcagtgagaagatggccctgagcactgccagtgatgaccgctgctggaacgggatggccagaggccggtacctccccgaggtcatgggtgacggcctggccaaccagatcaacaaccccgaggtggaggtggacatcaccaagccggacatgaccatccggcagcagatcatgcagctgaagatcatgaccaaccggctgcgcagcgcctacaacggcaacgacgtggacttccaggacgccagtgacgacggcagcggctcgggcagcggtgatggctgtctggatgacctctgcggccggaaggtcagcaggaagagctccagctcccggacgcccttgacccatgccctcccaggcctgtcagagcaggaaggacagaagacctcggctgccagctgcccccagcccccgaccttcctcctgcccctcctcctcttcctggcccttacagtagccaggccccggtggcggtaactgccccaaggccccagggacagaggccaaggactgactttgccaaaaatacaacacagacgatatttaattcacctcagcctggagaggcctggggtgggacagggagggccggcggctctgagcaggggcaggcgcagaggtcccagccccaggcctggcctcgcctgcctttctgccttttaattttgtatgaggtcctcaggtcagctgggagccagtgtgcccaaaagccatgtatttcagggacctcaggggcacctccggctgcctagccctccccccagctccctgcaccgccgcagaagcagcccctcgaggcctacagaggaggcctcaaagcaacccgctggagcccacagcgagcctgtgccttcctccccgcctcctcccactgggactcccagcagagcccaccagccagccctggcccaccccccagcctccagagaagccccgcacgggctgtctgggtgtccgccatccagggtctggcagagcctctgagatgatgcatgatgccctcccctcagcgcaggctgcagagcccggccccacctccctgcgcccttgaggggccccagcgtctgcagggtgacgcctgagacagcaccactgctgaggagtctgaggactgtcctcccacagacctgcagtgaggggccctccatgcgcagatgaggggccactgacccacctgcgcttctgctggaggaggggaagctgggcccaaaggcccagggaggcagcgtgggctctgccaatgtgggctgcccctcgcacacagggctcacagggcaggccttgctggggtccagggctgttggaggaccccgagggctgaggagcagccaggacccgcctgctcccatcctcacccagatcaggaaccagggcctccctgttcacggtgacacaggtcagggctcagagtgaccctcggctgtcacctgctcacagggatgctggtggctggtgagaccccgcactgcacacgggaatgcctaggtcccttcccgacccagccagctgcagggcacggggacctggatagttaagggcttttccaaacatgcatccatttactgacacttcctgtccttgttcatggagagctgttcgctcctcccagatggcttcggagggccgcagggcccaccttggaccctggtgacctcctgtcactcactgaggccatcagggccctgccccaggcctggacgggccctccttccctcctgtgccccagctgccaggcggccctggggaggggtggtgtggtgttgggaaggggtcctgcagggggaggaggacttggagggtctgggggcagctgtcctgaaccgactgaccctgaggaggccgcttagtgctgctttgcttttcatcaccgtcccgcacagtggacggaggtccccggttgctggtcaggtccccatggcttgttctctggaacctgactttagatgttttgggatcaggagcccccaacacaggcaagtccaccccataataaccctgccagtgccagggtgggctggggactctggcacagtgatgccgggcgccaggacagcagcactcccgctgcacacagacggcctaggggtggcgctcagaccccaccctacgctcatctctggaaggggcagccctgagtggtcactggtcagggcagtggccaagcctgctgtgtccttcctccacaaggtccccccaccgctcagtgtcagcgggtgacgtgtgttcttttgagtccttgtatgaataaaaggctggaaacctaaaaaaaaaaaccaaanaacacaagat

SEQ ID NO: 63844 - DNA, 3572 bp, Homo sapiens
tgcggctgcggcgctgcccggggtggctgcggccagagtctcccgcgcgcccggcggaccgcagcccgccctcgtcccccgctggcttttcgcctcctgcgagcccttccgcccggccccgctccgccgcctttccccggcccgagcacctgcacccagagcccgcgcgccgcccggagccgctggagccgccgctgcgaagggggtcccgcgtccgccgccgcgctggaagccaggcccgagcccctctccctcacactggcctttccccacaggtgagcacctgcggatctgtccccagggctacacctgctgcaccagcgagatggaggagaacctggccaaccgcagccatgccgagctggagaccgcgctccgggacagcagccgcgtcctgcaggccatgcttgccacccagctgcgcagcttcgatgaccacttccagcacctgctgaacgactcggagcggacgctgcaggccaccttccccggcgccttcggagagctgtacacgcagaacgcgagggccttccgggacctgtactcagagctgcgcctgtactaccgcggtgccaacctgcacctggaggagacgctggccgagttctgggcccgcctgctcgagcgcctcttcaagcagctgcacccccagctgctgctgcctgatgactacctggactgcctgggcaagcaggccgaggcgctgcggcccttcggggaggccccgagagagctgcgcctgcgggccacccgtgccttcgtggctgctcgctcctttgtgcagggcctgggcgtggccagcgacgtggtccggaaagtggctcaggtccccctgggcccggagtgctcgagagctgtcatgaagctggtctactgtgctcactgcctgggagtccccggcgccaggccctgccctgactattgccgaaatgtgctcaagggctgccttgccaaccaggccgacctggacgccgagtggaggaacctcctggactccatggtgctcatcaccgacaagttctggggtacatcgggtgtggagagtgtcatcggcagcgtgcacacgtggctggcggaggccatcaacgccctccaggacaacagggacacgctcacggccaaggtcatccagggctgcgggaaccccaaggtcaacccccagggccccgggcctgaggagaagcggcgccggggcaagctggccccgcgggagaggccaccttcaggcacgctggagaagctggtctccgaagccaaggcccagctccgcgacgtccaggacttctggatcagcctcccagggacactgtgcagtgagaagatggccctgagcactgccagtgatgaccgctgctggaacgggatggccagaggccggtacctccccgaggtcatgggtgacggcctggccaaccagatcaacaaccccgaggtggaggtggacatcaccaagccggacatgaccatccggcagcagatcatgcagctgaagatcatgaccaaccggctgcgcagcgcctacaacggcaacgacgtggacttccaggacgccagtgacgacggcagcggctcgggcagcggtgatggctgtctggatgacctctgcggccggaaggtcagcaggaagagctccagctcccggacgcccttgacccatgccctcccaggcctgtcagagcaggaaggacagaagacctcggctgccagctgcccccagcccccgaccttcctcctgcccctcctcctcttcctggcccttacagtagccaggccccggtggcggtaactgccccaaggccccagggacagaggccaaggactgactttgccaaaaatacaacacagacgatatttaattcacctcagcctggagaggcctggggtgggacagggagggccggcggctctgagcaggggcaggcgcagaggtcccagccccaggcctggcctcgcctgcctttctgccttttaattttgtatgaggtcctcaggtcagctgggagccagtgtgcccaaaagccatgtatttcagggacctcaggggcacctccggctgcctagccctccccccagctccctgcaccgccgcagaagcagcccctcgaggcctacagaggaggcctcaaagcaacccgctggagcccacagcgagcctgtgccttcctccccgcctcctcccactgggactcccagcagagcccaccagccagccctggcccaccccccagcctccagagaagccccgcacgggctgtctgggtgtccgccatccagggtctggcagagcctctgagatgatgcatgatgccctcccctcagcgcaggctgcagagcccggccccacctccctgcgcccttgaggggccccagcgtctgcagggtgacgcctgagacagcaccactgctgaggagtctgaggactgtcctcccacagacctgcagtgaggggccctccatgcgcagatgaggggccactgacccacctgcgcttctgctggaggaggggaagctgggcccaaaggcccagggaggcagcgtgggctctgccaatgtgggctgcccctcgcacacagggctcacagggcaggccttgctggggtccagggctgttggaggaccccgagggctgaggagcagccaggacccgcctgctcccatcctcacccagatcaggaaccagggcctccctgttcacggtgacacaggtcagggctcagagtgaccctcggctgtcacctgctcacagggatgctggtggctggtgagaccccgcactgcacacgggaatgcctaggtcccttcccgacccagccagctgcagggcacggggacctggatagttaagggcttttccaaacatgcatccatttactgacacttcctgtccttgttcatggagagctgttcgctcctcccagatggcttcggagggccgcagggcccaccttggaccctggtgacctcctgtcactcactgaggccatcagggccctgccccaggcctggacgggccctccttccctcctgtgccccagctgccaggcggccctggggaggggtggtgtggtgttgggaaggggtcctgcagggggaggaggacttggagggtctgggggcagctgtcctgaaccgactgaccctgaggaggccgcttagtgctgctttgcttttcatcaccgtcccgcacagtggacggaggtccccggttgctggtcaggtccccatggcttgttctctggaacctgactttagatgttttgggatcaggagcccccaacacaggcaagtccaccccataataaccctgccagtgccagggtgggctggggactctggcacagtgatgccgggcgccaggacagcagcactcccgctgcacacagacggcctaggggtggcgctcagaccccaccctacgctcatctctggaaggggcagccctgagtggtcactggtcagggcagtggccaagcctgctgtgtccttcctccacaaggtccccccaccgctcagtgtcagcgggtgacgtgtgttcttttgagtccttgtatgaataaaaggctggaaaccta

SEQ ID NO: 63845 - DNA, 3344 bp, Homo sapiens
gtgtcacctgggaagctcagctggcacctgccaccccctcccccatggtgagcacctgcggatctgtccccagggctacacctgctgcaccagcgagatggaggagaacctggccaaccgcagccatgccgagctggagaccgcgctccgggacagcagccgcgtcctgcaggccatgcttgccacccagctgcgcagcttcgatgaccacttccagcacctgctgaacgactcggagcggacgctgcaggccaccttccccggcgccttcggagagctgtacacgcagaacgcgagggccttccgggacctgtactcagagctgcgcctgtactaccgcggtgccaacctgcacctggaggagacgctggccgagttctgggcccgcctgctcgagcgcctcttcaagcagctgcacccccagctgctgctgcctgatgactacctggactgcctgggcaagcaggccgaggcgctgcggcccttcggggaggccccgagagagctgcgcctgcgggccacccgtgccttcgtggctgctcgctcctttgtgcagggcctgggcgtggccagcgacgtggtccggaaagtggctcaggtccccctgggcccggagtgctcgagagctgtcatgaagctggtctactgtgctcactgcctgggagtccccggcgccaggccctgccctgactattgccgaaatgtgctcaagggctgccttgccaaccaggccgacctggacgccgagtggaggaacctcctggactccatggtgctcatcaccgacaagttctggggtacatcgggtgtggagagtgtcatcggcagcgtgcacacgtggctggcggaggccatcaacgccctccaggacaacagggacacgctcacggccaaggtcatccagggctgcgggaaccccaaggtcaacccccagggccccgggcctgaggagaagcggcgccggggcaagctggccccgcgggagaggccaccttcaggcacgctggagaagctggtctccgaagccaaggcccagctccgcgacgtccaggacttctggatcagcctcccagggacactgtgcagtgagaagatggccctgagcactgccagtgatgaccgctgctggaacgggatggccagaggccggtacctccccgaggtcatgggtgacggcctggccaaccagatcaacaaccccgaggtggaggtggacatcaccaagccggacatgaccatccggcagcagatcatgcagctgaagatcatgaccaaccggctgcgcagcgcctacaacggcaacgacgtggacttccaggacgccagtgacgacggcagcggctcgggcagcggtgatggctgtctggatgacctctgcggccggaaggtcagcaggaagagctccagctcccggacgcccttgacccatgccctcccaggcctgtcagagcaggaaggacagaagacctcggctgccagctgcccccagcccccgaccttcctcctgcccctcctcctcttcctggcccttacagtagccaggccccggtggcggtaactgccccaaggccccagggacagaggccaaggactgactttgccaaaaatacaacacagacgatatttaattcacctcagcctggagaggcctggggtgggacagggagggccggcggctctgagcaggggcaggcgcagaggtcccagccccaggcctggcctcgcctgcctttctgccttttaattttgtatgaggtcctcaggtcagctgggagccagtgtgcccaaaagccatgtatttcagggacctcaggggcacctccggctgcctagccctccccccagctccctgcaccgccgcagaagcagcccctcgaggcctacagaggaggcctcaaagcaacccgctggagcccacagcgagcctgtgccttcctccccgcctcctcccactgggactcccagcagagcccaccagccagccctggcccaccccccagcctccagagaagccccgcacgggctgtctgggtgtccgccatccagggtctggcagagcctctgagatgatgcatgatgccctcccctcagcgcaggctgcagagcccggccccacctccctgcgcccttgaggggccccagcgtctgcagggtgacgcctgagacagcaccactgctgaggagtctgaggactgtcctcccacagacctgcagtgaggggccctccatgcgcagatgaggggccactgacccacctgcgcttctgctggaggaggggaagctgggcccaaaggcccagggaggcagcgtgggctctgccaatgtgggctgcccctcgcacacagggctcacagggcaggccttgctggggtccagggctgttggaggaccccgagggctgaggagcagccaggacccgcctgctcccatcctcacccagatcaggaaccagggcctccctgttcacggtgacacaggtcagggctcagagtgaccctcggctgtcacctgctcacagggatgctggtggctggtgagaccccgcactgcacacgggaatgcctaggtcccttcccgacccagccagctgcagggcacggggacctggatagttaagggcttttccaaacatgcatccatttactgacacttcctgtccttgttcatggagagctgttcgctcctcccagatggcttcggagggccgcagggcccaccttggaccctggtgacctcctgtcactcactgaggccatcagggccctgccccaggcctggacgggccctccttccctcctgtgccccagctgccaggcggccctggggaggggtggtgtggtgttgggaaggggtcctgcagggggaggaggacttggagggtctgggggcagctgtcctgaaccgactgaccctgaggaggccgcttagtgctgctttgcttttcatcaccgtcccgcacagtggacggaggtccccggttgctggtcaggtccccatggcttgttctctggaacctgactttagatgttttgggatcaggagcccccaacacaggcaagtccaccccataataaccctgccagtgccagggtgggctggggactctggcacagtgatgccgggcgccaggacagcagcactcccgctgcacacagacggcctaggggtggcgctcagaccccaccctacgctcatctctggaaggggcagccctgagtggtcactggtcagggcagtggccaagcctgctgtgtccttcctccacaaggtccccccaccgctcagtgtcagcgggtgacgtgtgttcttttgagtccttgtatgaataaaaggctggaaaccta

SEQ ID NO: 63846 - DNA, 3663 bp, Homo sapiens
cgccgagccgggactgcgctagcccgccgcgctctgggctgcccgagcgagcgttcggacctcgcaccccgcgcgcgccgggaccttggctctgcccttcgcgggcgggaactgcgcaggacccggccaggatccgagagaggcgcgggcgggtggccgggggcgccgccggccccgccatggagctccgggcccgaggctggtggctgctatgtgcggccgcagcgctggtcgcctgcgcccgcggggacccggccagcaagagccggagctgcggcgaggtccgccagatctacggagccaagggcttcagcctgagcgacgtgccccaggcggagatctcgggtgagcacctgcggatctgtccccagggctacacctgctgcaccagcgagatggaggagaacctggccaaccgcagccatgccgagctggagaccgcgctccgggacagcagccgcgtcctgcaggccatgcttgccacccagctgcgcagcttcgatgaccacttccagcacctgctgaacgactcggagcggacgctgcaggccaccttccccggcgccttcggagagctgtacacgcagaacgcgagggccttccgggacctgtactcagagctgcgcctgtactaccgcggtgccaacctgcacctggaggagacgctggccgagttctgggcccgcctgctcgagcgcctcttcaagcagctgcacccccagctgctgctgcctgatgactacctggactgcctgggcaagcaggccgaggcgctgcggcccttcggggaggccccgagagagctgcgcctgcgggccacccgtgccttcgtggctgctcgctcctttgtgcagggcctgggcgtggccagcgacgtggtccggaaagtggctcaggtccccctgggcccggagtgctcgagagctgtcatgaagctggtctactgtgctcactgcctgggagtccccggcgccaggccctgccctgactattgccgaaatgtgctcaagggctgccttgccaaccaggccgacctggacgccgagtggaggaacctcctggactccatggtgctcatcaccgacaagttctggggtacatcgggtgtggagagtgtcatcggcagcgtgcacacgtggctggcggaggccatcaacgccctccaggacaacagggacacgctcacggccaaggaccctgcagtgtctctccaggtcatccagggctgcgggaaccccaaggtcaacccccagggccccgggcctgaggagaagcggcgccggggcaagctggccccgcgggagaggccaccttcaggcacgctggagaagctggtctccgaagccaaggcccagctccgcgacgtccaggacttctggatcagcctcccagggacactgtgcagtgagaagatggccctgagcactgccagtgatgaccgctgctggaacgggatggccagaggccggtacctccccgaggtcatgggtgacggcctggccaaccagatcaacaaccccgaggtggaggtggacatcaccaagccggacatgaccatccggcagcagatcatgcagctgaagatcatgaccaaccggctgcgcagcgcctacaacggcaacgacgtggacttccaggacgccagtgacgacggcagcggctcgggcagcggtgatggctgtctggatgacctctgcggccggaaggtcagcaggaagagctccagctcccggacgcccttgacccatgccctcccaggcctgtcagagcaggaaggacagaagacctcggctgccagctgcccccagcccccgaccttcctcctgcccctcctcctcttcctggcccttacagtagccaggccccggtggcggtaactgccccaaggccccagggacagaggccaaggactgactttgccaaaaatacaacacagacgatatttaattcacctcagcctggagaggcctggggtgggacagggagggccggcggctctgagcaggggcaggcgcagaggtcccagccccaggcctggcctcgcctgcctttctgccttttaattttgtatgaggtcctcaggtcagctgggagccagtgtgcccaaaagccatgtatttcagggacctcaggggcacctccggctgcctagccctccccccagctccctgcaccgccgcagaagcagcccctcgaggcctacagaggaggcctcaaagcaacccgctggagcccacagcgagcctgtgccttcctccccgcctcctcccactgggactcccagcagagcccaccagccagccctggcccaccccccagcctccagagaagccccgcacgggctgtctgggtgtccgccatccagggtctggcagagcctctgagatgatgcatgatgccctcccctcagcgcaggctgcagagcccggccccacctccctgcgcccttgaggggccccagcgtctgcagggtgacgcctgagacagcaccactgctgaggagtctgaggactgtcctcccacagacctgcagtgaggggccctccatgcgcagatgaggggccactgacccacctgcgcttctgctggaggaggggaagctgggcccaaaggcccagggaggcagcgtgggctctgccaatgtgggctgcccctcgcacacagggctcacagggcaggccttgctggggtccagggctgttggaggaccccgagggctgaggagcagccaggacccgcctgctcccatcctcacccagatcaggaaccagggcctccctgttcacggtgacacaggtcagggctcagagtgaccctcggctgtcacctgctcacagggatgctggtggctggtgagaccccgcactgcacacgggaatgcctaggtcccttcccgacccagccagctgcagggcacggggacctggatagttaagggcttttccaaacatgcatccatttactgacacttcctgtccttgttcatggagagctgttcgctcctcccagatggcttcggagggccgcagggcccaccttggaccctggtgacctcctgtcactcactgaggccatcagggccctgccccaggcctggacgggccctccttccctcctgtgccccagctgccaggcggccctggggaggggtggtgtggtgttgggaaggggtcctgcagggggaggaggacttggagggtctgggggcagctgtcctgaaccgactgaccctgaggaggccgcttagtgctgctttgcttttcatcaccgtcccgcacagtggacggaggtccccggttgctggtcaggtccccatggcttgttctctggaacctgactttagatgttttgggatcaggagcccccaacacaggcaagtccaccccataataaccctgccagtgccagggtgggctggggactctggcacagtgatgccgggcgccaggacagcagcactcccgctgcacacagacggcctaggggtggcgctcagaccccaccctacgctcatctctggaaggggcagccctgagtggtcactggtcagggcagtggccaagcctgctgtgtccttcctccacaaggtccccccaccgctcagtgtcagcgggtgacgtgtgttcttttgagtccttgtatgaataaaaggctggaaaccta

SEQ ID NO: 63847 - DNA, 2721 bp, Homo sapiens
cgccgagccgggactgcgctagcccgccgcgctctgggctgcccgagcgagcgttcggacctcgcaccccgcgcgcgccgggaccttggctctgcccttcgcgggcgggaactgcgcaggacccggccaggatccgagagaggcgcgggcgggtggccgggggcgccgccggccccgccatggagctccgggcccgaggctggtggctgctatgtgcggccgcagcgctggtcgcctgcgcccgcggggacccggccagcaagagccggagctgcggcgaggtccgccagatctacggagccaagggcttcagcctgagcgacgtgccccaggcggagatctcgggtgagcacctgcggatctgtccccagggctacacctgctgcaccagcgagatggaggagaacctggccaaccgcgacgtccaggacttctggatcagcctcccagggacactgtgcagtgagaagatggccctgagcactgccagtgatgaccgctgctggaacgggatggccagaggccggtacctccccgaggtcatgggtgacggcctggccaaccagatcaacaaccccgaggtggaggtggacatcaccaagccggacatgaccatccggcagcagatcatgcagctgaagatcatgaccaaccggctgcgcagcgcctacaacggcaacgacgtggacttccaggacgccagtgacgacggcagcggctcgggcagcggtgatggctgtctggatgacctctgcggccggaaggtcagcaggaagagctccagctcccggacgcccttgacccatgccctcccaggcctgtcagagcaggaaggacagaagacctcggctgccagctgcccccagcccccgaccttcctcctgcccctcctcctcttcctggcccttacagtagccaggccccggtggcggtaactgccccaaggccccagggacagaggccaaggactgactttgccaaaaatacaacacagacgatatttaattcacctcagcctggagaggcctggggtgggacagggagggccggcggctctgagcaggggcaggcgcagaggtcccagccccaggcctggcctcgcctgcctttctgccttttaattttgtatgaggtcctcaggtcagctgggagccagtgtgcccaaaagccatgtatttcagggacctcaggggcacctccggctgcctagccctccccccagctccctgcaccgccgcagaagcagcccctcgaggcctacagaggaggcctcaaagcaacccgctggagcccacagcgagcctgtgccttcctccccgcctcctcccactgggactcccagcagagcccaccagccagccctggcccaccccccagcctccagagaagccccgcacgggctgtctgggtgtccgccatccagggtctggcagagcctctgagatgatgcatgatgccctcccctcagcgcaggctgcagagcccggccccacctccctgcgcccttgaggggccccagcgtctgcagggtgacgcctgagacagcaccactgctgaggagtctgaggactgtcctcccacagacctgcagtgaggggccctccatgcgcagatgaggggccactgacccacctgcgcttctgctggaggaggggaagctgggcccaaaggcccagggaggcagcgtgggctctgccaatgtgggctgcccctcgcacacagggctcacagggcaggccttgctggggtccagggctgttggaggaccccgagggctgaggagcagccaggacccgcctgctcccatcctcacccagatcaggaaccagggcctccctgttcacggtgacacaggtcagggctcagagtgaccctcggctgtcacctgctcacagggatgctggtggctggtgagaccccgcactgcacacgggaatgcctaggtcccttcccgacccagccagctgcagggcacggggacctggatagttaagggcttttccaaacatgcatccatttactgacacttcctgtccttgttcatggagagctgttcgctcctcccagatggcttcggagggccgcagggcccaccttggaccctggtgacctcctgtcactcactgaggccatcagggccctgccccaggcctggacgggccctccttccctcctgtgccccagctgccaggcggccctggggaggggtggtgtggtgttgggaaggggtcctgcagggggaggaggacttggagggtctgggggcagctgtcctgaaccgactgaccctgaggaggccgcttagtgctgctttgcttttcatcaccgtcccgcacagtggacggaggtccccggttgctggtcaggtccccatggcttgttctctggaacctgactttagatgttttgggatcaggagcccccaacacaggcaagtccaccccataataaccctgccagtgccagggtgggctggggactctggcacagtgatgccgggcgccaggacagcagcactcccgctgcacacagacggcctaggggtggcgctcagaccccaccctacgctcatctctggaaggggcagccctgagtggtcactggtcagggcagtggccaagcctgctgtgtccttcctccacaaggtccccccaccgctcagtgtcagcgggtgacgtgtgttcttttgagtccttgtatgaataaaaggctggaaaccta

SEQ ID NO: 63848 - DNA, 2225 bp, Homo sapiens
cgccgagccgggactgcgctagcccgccgcgctctgggctgcccgagcgagcgttcggacctcgcaccccgcgcgcgccgggaccttggctctgcccttcgcgggcgggaactgcgcaggacccggccaggatccgagagaggcgcgggcgggtggccgggggcgccgccggccccgccatggagctccgggcccgaggctggtggctgctatgtgcggccgcagcgctggtcgcctgcgcccgcggggacccggccagcaagagccggagctgcggcgaggtccgccagatctacggagccaagggcttcagcctgagcgacgtgccccaggcggagatctcgggtgagcacctgcggatctgtccccagggctacacctgctgcaccagcgagatggaggagaacctggccaaccgcagccatgccgagctggagaccgcgctccgggacagcagccgcgtcctgcaggccatgcttgccacccagctgcgcagcttcgatgaccacttccagcacctgctgaacgactcggagcggacgctgcaggccaccttccccggcgccttcggagagctgtacacgcagaacgcgagggccttccgggacctgtactcagagctgcgcctgtactaccgcggtgccaacctgcacctggaggagacgctggccgagttctgggcccgcctgctcgagcgcctcttcaagcagctgcacccccagctgctgctgcctgatgactacctggactgcctgggcaagcaggccgaggcgctgcggcccttcggggaggccccgagagagctgcgcctgcgggccacccgtgccttcgtggctgctcgctcctttgtgcagggcctgggcgtggccagcgacgtggtccggaaagtggctcaggtccccctgggcccggagtgctcgagagctgtcatgaagctggtctactgtgctcactgcctgggagtccccggcgccaggccctgccctgactattgccgaaatgtgctcaagggctgccttgccaaccaggccgacctggacgccgagtggaggaacctcctggactccatggtgctcatcaccgacaagttctggggtacatcgggtgtggagagtgtcatcggcagcgtgcacacgtggctggcggaggccatcaacgccctccaggacaacagggacacgctcacggccaaggtcatccagggctgcgggaaccccaaggtcaacccccagggccccgggcctgaggagaagcggcgccggggcaagctggccccgcgggagaggccaccttcaggcacgctggagaagctggtctccgaagccaaggcccagctccgcgacgtccaggacttctggatcagcctcccagggacactgtgcagtgagaagatggccctgagcactgccagtgatgaccgctgctggaacgggatggccagaggccggtacctccccgaggtcatgggtgacggcctggccaaccagatcaacaaccccgaggtggaggtggacatcaccaagccggacatgaccatccggcagcagatcatgcagctgaagatcatgaccaaccggctgcgcagcgcctacaacggcaacgacgtggacttccaggacgccagtgacgacggcagcggctcgggcagcggtgatggctgtctggatgacctctgcggccggaaggtcagcaggaagagctccagctcccggacgcccttgacccatgccctcccaggcctgtcagagcaggaaggacagaagacctcggagctgtcctgaaccgactgaccctgaggaggccgcttagtgctgctttgcttttcatcaccgtcccgcacagtggacggaggtccccggttgctggtcaggtccccatggcttgttctctggaacctgactttagatgttttgggatcaggagcccccaacacaggcaagtccaccccataataaccctgccagtgccagggtgggctggggactctggcacagtgatgccgggcgccaggacagcagcactcccgctgcacacagacggcctaggggtggcgctcagaccccaccctacgctcatctctggaaggggcagccctgagtggtcactggtcagggcagtggccaagcctgctgtgtccttcctccacaaggtccccccaccgctcagtgtcagcgggtgacgtgtgttcttttgagtccttgtatgaataaaaggctggaaaccta

SEQ ID NO: 63849 - DNA, 1999 bp, Homo sapiens
cgccgagccgggactgcgctagcccgccgcgctctgggctgcccgagcgagcgttcggacctcgcaccccgcgcgcgccgggaccttggctctgcccttcgcgggcgggaactgcgcaggacccggccaggatccgagagaggcgcgggcgggtggccgggggcgccgccggccccgccatggagctccgggcccgaggctggtggctgctatgtgcggccgcagcgctggtcgcctgcgcccgcggggacccggccagcaagagccggagctgcggcgaggtccgccagatctacggagccaagggcttcagcctgagcgacgtgccccaggcggagatctcgggtgagcacctgcggatctgtccccagggctacacctgctgcaccagcgagatggaggagaacctggccaaccgcagccatgccgagctggagaccgcgctccgggacagcagccgcgtcctgcaggccatgcttgccacccagctgcgcagcttcgatgaccacttccagcacctgctgaacgactcggagcggacgctgcaggccaccttccccggcgccttcggagagctgtacacgcagaacgcgagggccttccgggacctgtactcagagctgcgcctgtactaccgcggtgccaacctgcacctggaggagacgctggccgagttctgggcccgcctgctcgagcgcctcttcaagcagctgcacccccagctgctgctgcctgatgactacctggactgcctgggcaagcaggccgaggcgctgcggcccttcggggaggccccgagagagctgcgcctgcgggccacccgtgccttcgtggctgctcgctcctttgtgcagggcctgggcgtggccagcgacgtggtccggaaagtggctcaggtccccctgggcccggagtgctcgagagctgtcatgaagctggtctactgtgctcactgcctgggagtccccggcgccaggccctgccctgactattgccgaaatgtgctcaagggctgccttgccaaccaggccgacctggacgccgagtggaggaacctcctggactccatggtgctcatcaccgacaagttctggggtacatcgggtgtggagagtgtcatcggcagcgtgcacacgtggctggcggaggccatcaacgccctccaggacaacagggacacgctcacggccaaggtcatccagggctgcgggaaccccaaggtcaacccccagggccccgggcctgaggagaagcggcgccggggcaagctggccccgcgggagaggccaccttcaggcacgctggagaagctggtctccgaagccaaggcccagctccgcgacgtccaggacttctggatcagcctcccagggacactgtgcagtgagaagatggccctgagcactgccagtgatgaccgctgctggaacgggatggccagaggccggtacctccccgaggtcatgggtgacggcctggccaaccagatcaacaaccccgaggtggaggtggacatcaccaagccggacatgaccatccggcagagctgtcctgaaccgactgaccctgaggaggccgcttagtgctgctttgcttttcatcaccgtcccgcacagtggacggaggtccccggttgctggtcaggtccccatggcttgttctctggaacctgactttagatgttttgggatcaggagcccccaacacaggcaagtccaccccataataaccctgccagtgccagggtgggctggggactctggcacagtgatgccgggcgccaggacagcagcactcccgctgcacacagacggcctaggggtggcgctcagaccccaccctacgctcatctctggaaggggcagccctgagtggtcactggtcagggcagtggccaagcctgctgtgtccttcctccacaaggtccccccaccgctcagtgtcagcgggtgacgtgtgttcttttgagtccttgtatgaataaaaggctggaaaccta

SEQ ID NO: 63850 - DNA, 1889 bp, Homo sapiens
cgccgagccgggactgcgctagcccgccgcgctctgggctgcccgagcgagcgttcggacctcgcaccccgcgcgcgccgggaccttggctctgcccttcgcgggcgggaactgcgcaggacccggccaggatccgagagaggcgcgggcgggtggccgggggcgccgccggccccgccatggagctccgggcccgaggctggtggctgctatgtgcggccgcagcgctggtcgcctgcgcccgcggggacccggccagcaagagccggagctgcggcgaggtccgccagatctacggagccaagggcttcagcctgagcgacgtgccccaggcggagatctcgggtgagcacctgcggatctgtccccagggctacacctgctgcaccagcgagatggaggagaacctggccaaccgcagccatgccgagctggagaccgcgctccgggacagcagccgcgtcctgcaggccatgcttgccacccagctgcgcagcttcgatgaccacttccagcacctgctgaacgactcggagcggacgctgcaggccaccttccccggcgccttcggagagctgtacacgcagaacgcgagggccttccgggacctgtactcagagctgcgcctgtactaccgcggtgccaacctgcacctggaggagacgctggccgagttctgggcccgcctgctcgagcgcctcttcaagcagctgcacccccagctgctgctgcctgatgactacctggactgcctgggcaagcaggccgaggcgctgcggcccttcggggaggccccgagagagctgcgcctgcgggccacccgtgccttcgtggctgctcgctcctttgtgcagggcctgggcgtggccagcgacgtggtccggaaagtggctcaggtccccctgggcccggagtgctcgagagctgtcatgaagctggtctactgtgctcactgcctgggagtccccggcgccaggccctgccctgactattgccgaaatgtgctcaagggctgccttgccaaccaggccgacctggacgccgagtggaggaacctcctggactccatggtgctcatcaccgacaagttctggggtacatcgggtgtggagagtgtcatcggcagcgtgcacacgtggctggcggaggccatcaacgccctccaggacaacagggacacgctcacggccaaggtcatccagggctgcgggaaccccaaggtcaacccccagggccccgggcctgaggagaagcggcgccggggcaagctggccccgcgggagaggccaccttcaggcacgctggagaagctggtctccgaagccaaggcccagctccgcgacgtccaggacttctggatcagcctcccagggacactgtgcagtgagaagatggccctgagcactgccagtgatgaccgctgctggaacgggatggccagaggccggtacctccccgaggtcatgggtgacggcctggccaaccagatcaacaaccccgaggtggaggtggacatcaccaagccggacatgaccatccggcagcagatcatgcagctgaagatcatgaccaaccggctgcgcagcgcctacaacggcaacgacgtggacttccaggacgccagtgagggcagggcctggccgggcggccaaggggccagggttggtgggggtgccacaggggtgtgactgccctccgggttcccccacccgaggggccctctgctccggcatcaccacagtgagtctgaggacgctgtgctgcccaggcacgatcaccgagccctgcacctctgcggcgccctggaggcctggccgggatgtctgttggctttggctccagggaccaagggaggcagccccagggagtgagagtctcccagcctcagg

SEQ ID NO: 63851 - DNA, 3642 bp, Homo sapiens
cgccgagccgggactgcgctagcccgccgcgctctgggctgcccgagcgagcgttcggacctcgcaccccgcgcgcgccgggaccttggctctgcccttcgcgggcgggaactgcgcaggacccggccaggatccgagagaggcgcgggcgggtggccgggggcgccgccggccccgccatggagctccgggcccgaggctggtggctgctatgtgcggccgcagcgctggtcgcctgcgcccgcggggacccggccagcaagagccggagctgcggcgaggtccgccagatctacggagccaagggcttcagcctgagcgacgtgccccaggcggagatctcgggtgagcacctgcggatctgtccccagggctacacctgctgcaccagcgagatggaggagaacctggccaaccgcagccatgccgagctggagaccgcgctccgggacagcagccgcgtcctgcaggccatgcttgccacccagctgcgcagcttcgatgaccacttccagcacctgctgaacgactcggagcggacgctgcaggccaccttccccggcgccttcggagagctgtacacgcagaacgcgagggccttccgggacctgtactcagagctgcgcctgtactaccgcggtgccaacctgcacctggaggagacgctggccgagttctgggcccgcctgctcgagcgcctcttcaagcagctgcacccccagctgctgctgcctgatgactacctggactgcctgggcaagcaggccgaggcgctgcggcccttcggggaggccccgagagagctgcgcctgcgggccacccgtgccttcgtggctgctcgctcctttgtgcagggcctgggcgtggccagcgacgtggtccggaaagtggctcaggtccccctgggcccggagtgctcgagagctgtcatgaagctggtctactgtgctcactgcctgggagtccccggcgccaggccctgccctgactattgccgaaatgtgctcaagggctgccttgccaaccaggccgacctggacgccgagtggaggaacctcctggactccatggtgctcatcaccgacaagttctggggtacatcgggtgtggagagtgtcatcggcagcgtgcacacgtggctggcggaggccatcaacgccctccaggacaacagggacacgctcacggccaaggtcatccagggctgcgggaaccccaaggtcaacccccagggccccgggcctgaggagaagcggcgccggggcaagctggccccgcgggagaggccaccttcaggcacgctggagaagctggtctccgaagccaaggcccagctccgcgacgtccaggacttctggatcagcctcccagggacactgtgcagtgagaagatggccctgagcactgccagtgatgaccgctgctggaacgggatggccagaggccggtacctccccgaggtcatgggtgacggcctggccaaccagatcaacaaccccgaggtggaggtggacatcaccaagccggacatgaccatccggcagcagatcatgcagctgaagatcatgaccaaccggctgcgcagcgcctacaacggcaacgacgtggacttccaggacgccagtgacgacggcagcggctcgggcagcggtgatggctgtctggatgacctctgcggccggaaggtcagcaggaagagctccagctcccggacgcccttgacccatgccctcccaggcctgtcagagcaggaaggacagaagacctcggctgccagctgcccccagcccccgaccttcctcctgcccctcctcctcttcctggcccttacagtagccaggccccggtggcggtaactgccccaaggccccagggacagaggccaaggactgactttgccaaaaatacaacacagacgatatttaattcacctcagcctggagaggcctggggtgggacagggagggccggcggctctgagcaggggcaggcgcagaggtcccagccccaggcctggcctcgcctgcctttctgccttttaattttgtatgaggtcctcaggtcagctgggagccagtgtgcccaaaagccatgtatttcagggacctcaggggcacctccggctgcctagccctccccccagctccctgcaccgccgcagaagcagcccctcgaggcctacagaggaggcctcaaagcaacccgctggagcccacagcgagcctgtgccttcctccccgcctcctcccactgggactcccagcagagcccaccagccagccctggcccaccccccagcctccagagaagccccgcacgggctgtctgggtgtccgccatccagggtctggcagagcctctgagatgatgcatgatgccctcccctcagcgcaggctgcagagcccggccccacctccctgcgcccttgaggggccccagcgtctgcagggtgacgcctgagacagcaccactgctgaggagtctgaggactgtcctcccacagacctgcagtgaggggccctccatgcgcagatgaggggccactgacccacctgcgcttctgctggaggaggggaagctgggcccaaaggcccagggaggcagcgtgggctctgccaatgtgggctgcccctcgcacacagggctcacagggcaggccttgctggggtccagggctgttggaggaccccgagggctgaggagcagccaggacccgcctgctcccatcctcacccagatcaggaaccagggcctccctgttcacggtgacacaggtcagggctcagagtgaccctcggctgtcacctgctcacagggatgctggtggctggtgagaccccgcactgcacacgggaatgcctaggtcccttcccgacccagccagctgcagggcacggggacctggatagttaagggcttttccaaacatgcatccatttactgacacttcctgtccttgttcatggagagctgttcgctcctcccagatggcttcggagggccgcagggcccaccttggaccctggtgacctcctgtcactcactgaggccatcagggccctgccccaggcctggacgggccctccttccctcctgtgccccagctgccaggcggccctggggaggggtggtgtggtgttgggaaggggtcctgcagggggaggaggacttggagggtctgggggcagctgtcctgaaccgactgaccctgaggaggccgcttagtgctgctttgcttttcatcaccgtcccgcacagtggacggaggtccccggttgctggtcaggtccccatggcttgttctctggaacctgactttagatgttttgggatcaggagcccccaacacaggcaagtccaccccataataaccctgccagtgccagggtgggctggggactctggcacagtgatgccgggcgccaggacagcagcactcccgctgcacacagacggcctaggggtggcgctcagaccccaccctacgctcatctctggaaggggcagccctgagtggtcactggtcagggcagtggccaagcctgctgtgtccttcctccacaaggtccccccaccgctcagtgtcagcgggtgacgtgtgttcttttgagtccttgtatgaataaaaggctggaaaccta

SEQ ID NO: 63852 - DNA, 3484 bp, Homo sapiens
agccactggtcacgggcagctgccaggctgggtctggacaaatgaggtctgggtccatcattggggatgggggccactgtcaggatgggagtctcgcctaaagctttggggtgaaggtgctgatgaccaagaggaaactgcggggtggggacatgtcagcaggggacgagaatgcatgacctaaaaggtgagcacctgcggatctgtccccagggctacacctgctgcaccagcgagatggaggagaacctggccaaccgcagccatgccgagctggagaccgcgctccgggacagcagccgcgtcctgcaggccatgcttgccacccagctgcgcagcttcgatgaccacttccagcacctgctgaacgactcggagcggacgctgcaggccaccttccccggcgccttcggagagctgtacacgcagaacgcgagggccttccgggacctgtactcagagctgcgcctgtactaccgcggtgccaacctgcacctggaggagacgctggccgagttctgggcccgcctgctcgagcgcctcttcaagcagctgcacccccagctgctgctgcctgatgactacctggactgcctgggcaagcaggccgaggcgctgcggcccttcggggaggccccgagagagctgcgcctgcgggccacccgtgccttcgtggctgctcgctcctttgtgcagggcctgggcgtggccagcgacgtggtccggaaagtggctcaggtccccctgggcccggagtgctcgagagctgtcatgaagctggtctactgtgctcactgcctgggagtccccggcgccaggccctgccctgactattgccgaaatgtgctcaagggctgccttgccaaccaggccgacctggacgccgagtggaggaacctcctggactccatggtgctcatcaccgacaagttctggggtacatcgggtgtggagagtgtcatcggcagcgtgcacacgtggctggcggaggccatcaacgccctccaggacaacagggacacgctcacggccaaggtcatccagggctgcgggaaccccaaggtcaacccccagggccccgggcctgaggagaagcggcgccggggcaagctggccccgcgggagaggccaccttcaggcacgctggagaagctggtctccgaagccaaggcccagctccgcgacgtccaggacttctggatcagcctcccagggacactgtgcagtgagaagatggccctgagcactgccagtgatgaccgctgctggaacgggatggccagaggccggtacctccccgaggtcatgggtgacggcctggccaaccagatcaacaaccccgaggtggaggtggacatcaccaagccggacatgaccatccggcagcagatcatgcagctgaagatcatgaccaaccggctgcgcagcgcctacaacggcaacgacgtggacttccaggacgccagtgacgacggcagcggctcgggcagcggtgatggctgtctggatgacctctgcggccggaaggtcagcaggaagagctccagctcccggacgcccttgacccatgccctcccaggcctgtcagagcaggaaggacagaagacctcggctgccagctgcccccagcccccgaccttcctcctgcccctcctcctcttcctggcccttacagtagccaggccccggtggcggtaactgccccaaggccccagggacagaggccaaggactgactttgccaaaaatacaacacagacgatatttaattcacctcagcctggagaggcctggggtgggacagggagggccggcggctctgagcaggggcaggcgcagaggtcccagccccaggcctggcctcgcctgcctttctgccttttaattttgtatgaggtcctcaggtcagctgggagccagtgtgcccaaaagccatgtatttcagggacctcaggggcacctccggctgcctagccctccccccagctccctgcaccgccgcagaagcagcccctcgaggcctacagaggaggcctcaaagcaacccgctggagcccacagcgagcctgtgccttcctccccgcctcctcccactgggactcccagcagagcccaccagccagccctggcccaccccccagcctccagagaagccccgcacgggctgtctgggtgtccgccatccagggtctggcagagcctctgagatgatgcatgatgccctcccctcagcgcaggctgcagagcccggccccacctccctgcgcccttgaggggccccagcgtctgcagggtgacgcctgagacagcaccactgctgaggagtctgaggactgtcctcccacagacctgcagtgaggggccctccatgcgcagatgaggggccactgacccacctgcgcttctgctggaggaggggaagctgggcccaaaggcccagggaggcagcgtgggctctgccaatgtgggctgcccctcgcacacagggctcacagggcaggccttgctggggtccagggctgttggaggaccccgagggctgaggagcagccaggacccgcctgctcccatcctcacccagatcaggaaccagggcctccctgttcacggtgacacaggtcagggctcagagtgaccctcggctgtcacctgctcacagggatgctggtggctggtgagaccccgcactgcacacgggaatgcctaggtcccttcccgacccagccagctgcagggcacggggacctggatagttaagggcttttccaaacatgcatccatttactgacacttcctgtccttgttcatggagagctgttcgctcctcccagatggcttcggagggccgcagggcccaccttggaccctggtgacctcctgtcactcactgaggccatcagggccctgccccaggcctggacgggccctccttccctcctgtgccccagctgccaggcggccctggggaggggtggtgtggtgttgggaaggggtcctgcagggggaggaggacttggagggtctgggggcagctgtcctgaaccgactgaccctgaggaggccgcttagtgctgctttgcttttcatcaccgtcccgcacagtggacggaggtccccggttgctggtcaggtccccatggcttgttctctggaacctgactttagatgttttgggatcaggagcccccaacacaggcaagtccaccccataataaccctgccagtgccagggtgggctggggactctggcacagtgatgccgggcgccaggacagcagcactcccgctgcacacagacggcctaggggtggcgctcagaccccaccctacgctcatctctggaaggggcagccctgagtggtcactggtcagggcagtggccaagcctgctgtgtccttcctccacaaggtccccccaccgctcagtgtcagcgggtgacgtgtgttcttttgagtccttgtatgaataaaaggctggaaaccta

SEQ ID NO: 63853 - DNA, 4264 bp, Homo sapiens
cgccgagccgggactgcgctagcccgccgcgctctgggctgcccgagcgagcgttcggacctcgcaccccgcgcgcgccgggaccttggctctgcccttcgcgggcgggaactgcgcaggacccggccaggatccgagagaggcgcgggcgggtggccgggggcgccgccggccccgccatggagctccgggcccgaggctggtggctgctatgtgcggccgcagcgctggtcgcctgcgcccgcggggacccggccagcaagagccggagctgcggcgaggtccgccagatctacggagccaagggcttcagcctgagcgacgtgccccaggcggagatctcgggtgagcacctgcggatctgtccccagggctacacctgctgcaccagcgagatggaggagaacctggccaaccgcagccatgccgagctggagaccgcgctccgggacagcagccgcgtcctgcaggccatgcttgccacccagctgcgcagcttcgatgaccacttccagcacctgctgaacgactcggagcggacgctgcaggccaccttccccggcgccttcggagagctgtacacgcagaacgcgagggccttccgggacctgtactcagagctgcgcctgtactaccgcggtgccaacctgcacctggaggagacgctggccgagttctgggcccgcctgctcgagcgcctcttcaagcagctgcacccccagctgctgctgcctgatgactacctggactgcctgggcaagcaggccgaggcgctgcggcccttcggggaggccccgagagagctgcgcctgcgggccacccgtgccttcgtggctgctcgctcctttgtgcagggcctgggcgtggccagcgacgtggtccggaaagtggctcaggtccccctgggcccggagtgctcgagagctgtcatgaagctggtctactgtgctcactgcctgggagtccccggcgccaggccctgccctgactattgccgaaatgtgctcaagggctgccttgccaaccaggccgacctggacgccgagtggaggaacctcctggactccatggtgctcatcaccgacaagttctggggtacatcgggtgtggagagtgtcatcggcagcgtgcacacgtggctggcggaggccatcaacgccctccaggacaacagggacacgctcacggccaaggtcatccagggctgcgggaaccccaaggtcaacccccagggccccgggcctgaggagaagcggcgccggggcaagctggccccgcgggagaggccaccttcaggcacgctggagaagctggtctccgaagccaaggcccagctccgcgacgtccaggacttctggatcagcctcccagggacactgtgcagtgagaagatggccctgagcactgccagtgatgaccgctgctggaacgggatggccagaggccggtacctccccgaggtcatgggtgacggcctggccaaccagatcaacaaccccgaggtggaggtggacatcaccaagccggacatgaccatccggcagcagatcatgcagctgaagatcatgaccaaccggctgcgcagcgcctacaacggcaacgacgtggacttccaggacgccagtgacgacggcagcggctcgggcagcggtgatggctgtctggatgacctctgcggccggaaggtcagcaggaagagctccagctcccggacgcccttgacccatgccctcccaggcctgtcagagcaggaaggacagaagacctcggctgccagctgcccccagcccccgaccttcctcctgcccctcctcctcttcctggcccttacagtagccaggccccggtggcggtaactgccccaaggccccagggacagaggccaaggactgactttgccaaaaatacaacacagacgatatttaattcacctcagcctggagaggcctggggtgggacagggagggccggcggctctgagcaggggcaggcgcagaggtcccagccccaggcctggcctcgcctgcctttctgccttttaattttgtatgaggtcctcaggtcagctgggagccagtgtgcccaaaagccatgtatttcagggacctcaggggcacctccggctgcctagccctccccccagctccctgcaccgccgcagaagcagcccctcgaggcctacagaggaggcctcaaagcaacccgctggagcccacagcgagcctgtgccttcctccccgcctcctcccactgggactcccagcagagcccaccagccagccctggcccaccccccagcctccagagaagccccgcacgggctgtctgggtgtccgccatccagggtctggcagagcctctgagatgatgcatgatgccctcccctcagcgcaggctgcagagcccggccccacctccctgcgcccttgaggggccccagcgtctgcagggtgacgcctgagacagcaccactgctgaggagtctgaggactgtcctcccacagacctgcagtgaggggccctccatgcgcagatgaggggccactgacccacctgcgcttctgctggaggaggggaagctgggcccaaaggcccagggaggcagcgtgggctctgccaatgtgggctgcccctcgcacacagggctcacagggcaggccttgctggggtccagggctgttggaggaccccgagggctgaggagcagccaggacccgcctgctcccatcctcacccagatcaggaaccagggcctccctgttcacggtgacacaggtcagggctcagagtgaccctcggctgtcacctgctcacagggatgctggtggctggtgagaccccgcactgcacacgggaatgcctaggtcccttcccgacccagccagctgcagggcacggggacctggatagttaagggcttttccaaacatgcatccatttactgacacttcctgtccttgttcatggagagctgttcgctcctcccagatggcttcggagggccgcagggcccaccttggaccctggtgacctcctgtcactcactgaggccatcagggccctgccccaggcctggacgggccctccttccctcctgtgccccagctgccaggcggccctggggaggggtggtgtggtgttgggaaggggtcctgcagggggaggaggacttggagggtctgggggcagctgtcctgaaccgactgaccctgaggaggccgcttagtgctgctttgcttttcatcaccgtcccgcacagtggacggaggtccccggttgctggtcaggtccccatggcttgttctctggaacctgactttagatgttttgggatcaggagcccccaacacaggcaagtccaccccataataaccctgccagtgccagggtgggctggggactctggcacagtgatgccgggcgccaggacagcagcactcccgctgcacacagacggcctaggggtggcgctcagaccccaccctacgctcatctctggaaggggcagccctgagtggtcactggtcagggcagtggccaagcctgctgtgtccttcctccacaaggtccccccaccgctcagtgtcagcgggtgacgtgtgttcttttgagtccttgtatgaataaaaggctggaaacctacagcagggcgaggcctcggggggagagagaaaaaagaaaaaacaacaaaaacaaaaaacagaaagagaacaaaacaaaacaaaaaaagaacaacaaaaaaacagaaacagaagaaaaaacaaccagacaaataaaaaacaacaaagagaggcggcgggcgcgccgaaataaaaactctccccggaggggggggcccacaagttgcggcccacccgaggttttttgataaaaaagagggcgcgccccactagagggcggggcaataaataaagacagcaggagcgcgccgcgctctataacaacaccgcgtgtggggtgaggaacaaaaacagtccttcgcaggggagtatctttgtgaggacacaaccccccacaccggcggggggcgcgaccaccaaacagggggccacgcaccccccccgcaaggatataagccgccgccggggcaaaaacaaccaacaacgggcgaggcacagcgggggtaaaccacacgcgcccccgaactgggggcgggaagaaacagtcccatcgccagagaactagcggcacacattactgccaccgaccgggataacaaacctgcgactaacgagcaaacagacggcaacaggcagacaaaaat

SEQ ID NO: 63854 - DNA, 3713 bp, Homo sapiens
cgccgagccgggactgcgctagcccgccgcgctctgggctgcccgagcgagcgttcggacctcgcaccccgcgcgcgccgggaccttggctctgcccttcgcgggcgggaactgcgcaggacccggccaggatccgagagaggcgcgggcgggtggccgggggcgccgccggccccgccatggagctccgggcccgaggctggtggctgctatgtgcggccgcagcgctggtcgcctgcgcccgcggggacccggccagcaagagccggagctgcggcgaggtccgccagatctacggagccaagggcttcagcctgagcgacgtgccccaggcggagatctcgggtgagcacctgcggatctgtccccagggctacacctgctgcaccagcgagatggaggagaacctggccaaccgcagccatgccgagctggagaccgcgctccgggacagcagccgcgtcctgcaggccatgcttgccacccagctgcgcagcttcgatgaccacttccagcacctgctgaacgactcggagcggacgctgcaggccaccttccccggcgccttcggagagctgtacacgcagaacgcgagggccttccgggacctgtactcagagctgcgcctgtactaccgcggtgccaacctgcacctggaggagacgctggccgagttctgggcccgcctgctcgagcgcctcttcaagcagctgcacccccagctgctgctgcctgatgactacctggactgcctgggcaagcaggccgaggcgctgcggcccttcggggaggccccgagagagctgcgcctgcgggccacccgtgccttcgtggctgctcgctcctttgtgcagggcctgggcgtggccagcgacgtggtccggaaagtggctcaggtccccctgggcccggagtgctcgagagctgtcatgaagctggtctactgtgctcactgcctgggagtccccggcgccaggccctgccctgactattgccgaaatgtgctcaagggctgccttgccaaccaggccgacctggacgccgagtggaggaacctcctggactccatggtgctcatcaccgacaagttctggggtacatcgggtgtggagagtgtcatcggcagcgtgcacacgtggctggcggaggccatcaacgccctccaggacaacagggacacgctcacggccaaggtcatccagggctgcgggaaccccaaggtcaacccccagggccccgggcctgaggagaagcggcgccggggcaagctggccccgcgggagaggccaccttcaggcacgctggagaagctggtctccgaagccaaggcccagctccgcgacgtccaggacttctggatcagcctcccagggacactgtgcagtgagaagatggccctgagcactgccagtgatgaccgctgctggaacgggatggccagaggccggtacctccccgaggtcatgggtgacggcctggccaaccagatcaacaaccccgaggtggaggtggacatcaccaagccggacatgaccatccggcagcagatcatgcagctgaagatcatgaccaaccggctgcgcagcgcctacaacggcaacgacgtggacttccaggacgccagtgacgacggcagcggctcgggcagcggtgatggctgtctggatgacctctgcggccggaaggtcagcaggaagagctccagctcccggacgcccttgacccatgccctcccaggcctgtcagagcaggaaggacagaagacctcggctgccagctgcccccagcccccgaccttcctcctgcccctcctcctcttcctggcccttacagtagccaggccccggtggcggtaactgccccaaggccccagggacagaggccaaggactgactttgccaaaaatacaacacagacgatatttaattcacctcagcctggagaggcctggggtgggacagggagggccggcggctctgagcaggggcaggcgcagaggtcccagccccaggcctggcctcgcctgcctttctgccttttaattttgtatgaggtcctcaggtcagctgggagccagtgtgcccaaaagccatgtatttcagggacctcaggggcacctccggctgcctagccctccccccagctccctgcaccgccgcagaagcagcccctcgaggcctacagaggaggcctcaaagcaacccgctggagcccacagcgagcctgtgccttcctccccgcctcctcccactgggactcccagcagagcccaccagccagccctggcccaccccccagcctccagagaagccccgcacgggctgtctgggtgtccgccatccagggtctggcagagcctctgagatgatgcatgatgccctcccctcagcgcaggctgcagagcccggccccacctccctgcgcccttgaggggccccagcgtctgcagggtgacgcctgagacagcaccactgctgaggagtctgaggactgtcctcccacagacctgcagtgaggggccctccatgcgcagatgaggggccactgacccacctgcgcttctgctggaggaggggaagctgggcccaaaggcccagggaggcagcgtgggctctgccaatgtgggctgcccctcgcacacagggctcacagggcaggccttgctggggtccagggctgttggaggaccccgagggctgaggagcagccaggacccgcctgctcccatcctcacccagatcaggaaccagggcctccctgttcacggtgacacaggtcagggctcagagtgaccctcggctgtcacctgctcacagggatgctggtggctggtgagaccccgcactgcacacgggaatgcctaggtcccttcccgacccagccagctgcagggcacggggacctggatagttaagggcttttccaaacatgcatccatttactgacacttcctgtccttgttcatggagagctgttcgctcctcccagatggcttcggagggccgcagggcccaccttggaccctggtgacctcctgtcactcactgaggccatcagggccctgccccaggcctggacgggccctccttccctcctgtgccccagctgccaggcggccctggggaggggtggtgtggtgttgggaaggggtcctgcagggggaggaggacttggagggtctgggggcagctgtcctgaaccgactgaccctgaggaggccgcttagtgctgctttgcttttcatcaccgtcccgcacagtggacggaggtccccggttgctggtcaggtccccatggcttgttctctggaacctgactttagatgttttgggatcaggagcccccaacacaggcaagtccaccccataataaccctgccagtgccagggtgggctggggactctggcacagtgatgccgggcgccaggacagcagcactcccgctgcacacagacggcctaggggtggcgctcagaccccaccctacgctcatctctggaaggggcagccctgagtggtcactggtcagggcagtggccaagcctgctgtgtccttcctccacaaggtccccccaccgctcagtgtcagcgggtgacgtgtgttcttttgagtccttgtatgaataaaaggctggaaacctaaaaaaaaaaaacaccaccaaaacaaacaaaaaaaacaaaaacacacacacccatccgggcatcactccagc

SEQ ID NO: 63855 - DNA, 2295 bp, Homo sapiens
cgccgagccgggactgcgctagcccgccgcgctctgggctgcccgagcgagcgttcggacctcgcaccccgcgcgcgccgggaccttggctctgcccttcgcgggcgggaactgcgcaggacccggccaggatccgagagaggcgcgggcgggtggccgggggcgccgccggccccgccatggagctccgggcccgaggctggtggctgctatgtgcggccgcagcgctggtcgcctgcgcccgcggggacccggccagcaagagccggagctgcggcgaggtccgccagatctacggagccaagggcttcagcctgagcgacgtgccccaggcggagatctcgggtgagcacctgcggatctgtccccagggctacacctgctgcaccagcctgtcagagcaggaaggacagaagacctcggctgccagctgcccccagcccccgaccttcctcctgcccctcctcctcttcctggcccttacagtagccaggccccggtggcggtaactgccccaaggccccagggacagaggccaaggactgactttgccaaaaatacaacacagacgatatttaattcacctcagcctggagaggcctggggtgggacagggagggccggcggctctgagcaggggcaggcgcagaggtcccagccccaggcctggcctcgcctgcctttctgccttttaattttgtatgaggtcctcaggtcagctgggagccagtgtgcccaaaagccatgtatttcagggacctcaggggcacctccggctgcctagccctccccccagctccctgcaccgccgcagaagcagcccctcgaggcctacagaggaggcctcaaagcaacccgctggagcccacagcgagcctgtgccttcctccccgcctcctcccactgggactcccagcagagcccaccagccagccctggcccaccccccagcctccagagaagccccgcacgggctgtctgggtgtccgccatccagggtctggcagagcctctgagatgatgcatgatgccctcccctcagcgcaggctgcagagcccggccccacctccctgcgcccttgaggggccccagcgtctgcagggtgacgcctgagacagcaccactgctgaggagtctgaggactgtcctcccacagacctgcagtgaggggccctccatgcgcagatgaggggccactgacccacctgcgcttctgctggaggaggggaagctgggcccaaaggcccagggaggcagcgtgggctctgccaatgtgggctgcccctcgcacacagggctcacagggcaggccttgctggggtccagggctgttggaggaccccgagggctgaggagcagccaggacccgcctgctcccatcctcacccagatcaggaaccagggcctccctgttcacggtgacacaggtcagggctcagagtgaccctcggctgtcacctgctcacagggatgctggtggctggtgagaccccgcactgcacacgggaatgcctaggtcccttcccgacccagccagctgcagggcacggggacctggatagttaagggcttttccaaacatgcatccatttactgacacttcctgtccttgttcatggagagctgttcgctcctcccagatggcttcggagggccgcagggcccaccttggaccctggtgacctcctgtcactcactgaggccatcagggccctgccccaggcctggacgggccctccttccctcctgtgccccagctgccaggcggccctggggaggggtggtgtggtgttgggaaggggtcctgcagggggaggaggacttggagggtctgggggcagctgtcctgaaccgactgaccctgaggaggccgcttagtgctgctttgcttttcatcaccgtcccgcacagtggacggaggtccccggttgctggtcaggtccccatggcttgttctctggaacctgactttagatgttttgggatcaggagcccccaacacaggcaagtccaccccataataaccctgccagtgccagggtgggctggggactctggcacagtgatgccgggcgccaggacagcagcactcccgctgcacacagacggcctaggggtggcgctcagaccccaccctacgctcatctctggaaggggcagccctgagtggtcactggtcagggcagtggccaagcctgctgtgtccttcctccacaaggtccccccaccgctcagtgtcagcgggtgacgtgtgttcttttgagtccttgtatgaataaaaggctggaaaccta

SEQ ID NO: 63856 - DNA, 2437 bp, Homo sapiens
cgccgagccgggactgcgctagcccgccgcgctctgggctgcccgagcgagcgttcggacctcgcaccccgcgcgcgccgggaccttggctctgcccttcgcgggcgggaactgcgcaggacccggccaggatccgagagaggcgcgggcgggtggccgggggcgccgccggccccgccatggagctccgggcccgaggctggtggctgctatgtgcggccgcagcgctggtcgcctgcgcccgcggggacccggccagcaagagccggagctgcggcgaggtccgccagatctacggagccaagggcttcagcctgagcgacgtgccccaggcggagatctcgggtgagcacctgcggatctgtccccagggctacacctgctgcaccagcgagatggaggagaacctggccaaccgcagccatgccgagctggagaccgcgctccgggacagcagccgcgtcctgcaggccatgcttgccacccagctgcgcagcttcgatgaccacttccagcacctgctgaacgactcggagcggacgctgcaggccaccttccccggcgccttcggagagctgtacacgcagaacgcgagggccttccgggacctgtactcagagctgcgcctgtactaccgcggtgccaacctgcacctggaggagacgctggccgagttctgggcccgcctgctcgagcgcctcttcaagcagctgcacccccagctgctgctgcctgatgactacctggactgcctgggcaagcaggccgaggcgctgcggcccttcggggaggccccgagagagctgcgcctgcgggccacccgtgccttcgtggctgctcgctcctttgtgcagggcctgggcgtggccagcgacgtggtccggaaagtggctcaggtccccctgggcccggagtgctcgagagctgtcatgaagctggtctactgtgctcactgcctgggagtccccggcgccaggccctgccctgactattgccgaaatgtgctcaagggctgccttgccaaccaggccgacctggacgccgagtggaggaacctcctggactccatggtgctcatcaccgacaagttctggggtacatcgggtgtggagagtgtcatcggcagcgtgcacacgtggctggcggaggccatcaacgccctccaggacaacagggacacgctcacggccaaggtcatccagggctgcgggaaccccaaggtcaacccccagggccccgggcctgaggagaagcggcgccggggcaagctggccccgcgggagaggccaccttcaggcacgctggagaagctggtctccgaagccaaggcccagctccgcgacgtccaggacttctggatcagcctcccagggacactgtgcagtgagaagatggccctgagcactgccagtgatgaccgctgctggaacgggatggccagaggccggtacctccccgaggtcatgggtgacggcctggccaaccagatcaacaaccccgaggtggaggtggacatcaccaagccggacatgaccatccggcagcagatcatgcagctgaagatcatgaccaaccggctgcgcagcgcctacaacggcaacgacgtggacttccaggacgccagtgacgacggcagcggctcgggcagcggtgatggctgtctggatgacctctgcggccggaaggtcagcaggaagagctccagctcccggacgcccttgacccatgccctcccaggcctgtcagagcaggaaggacagaagacctcggctgccagctgcccccagcccccgaccttcctcctgcccctcctcctcttcctggcccttacagtagccaggccccggtggcggtaactgccccaaggccccagggacagaggccaaggactgactttgccaaaaatacaacacagacgatatttaattcacctcagcctggagaggcctggggtgggacagggagggccggcggctctgagcaggggcaggcgcagaggtcccagccccaggcctggcctcgcctgcctttctgccttttaattttgtatgaggtcctcaggtcagctgggagccagtgtgcccaaaagccatgtatttcagggacctcaggggcacctccggctgcctagccctccccccagctccctgcaccgccgcagaagcagcccctcgaggcctacagaggaggcctcaaagcaacccgctggagcccacagcgagcctgtgccttctcccgctgcacacagacggcctaggggtggcgctcagaccccaccctacgctcatctctggaaggggcagccctgagtggtcactggtcagggcagtggccaagcctgctgtgtccttcctccacaaggtccccccaccgctcagtgtcagcgggtgacgtgtgttcttttgagtccttgtatgaataaaaggctggaaaccta

SEQ ID NO: 63857 - DNA, 910 bp, Homo sapiens
cagggagtctccatcccatcgtcatgagatcagtggagagttcaggtggacattcagggacccaagatcttggtttcctggacccaaatatttctgtgactaacttgctggatgtttaccgagtttgtgttttagactaatgctctctccccgttattccctacagtctaatcagcctgccgtgtaagtctgtgtgaaaactgtaacaaaggtgtgaaatgattcatagtacgcataagccatgccttcagtctgaccgcaccctaagctagactctgcaccgtctacagcacgccaccctcctcgtcccctctcatcacccacctcgttccatgctgtgtgtgcgcattcccgtcgactgagccgtcctgtttactattgtgttttacaggccgagacagcggctaacaggatatgtaaggttcttgctgtgaatcaagagaatgagaggctgatggaagaatatgagaggctagcgagtgagcttttggaatggattcgtcgcacgatcccctggctggagaaccggactcccgagaagaccatgcaagccatgcagaagaagctggaggacttccgggattaccgccggaagcacaagccacccaaggtgcaggagaaatgccagctggagatcaacttcaacacgctgcagaccaagctgcggatcagcaaccgtcctgccttcatgccctccgagggcaagatggtgtcggatattgctggtgcctggcagaggctggagcaggctgagaagggttacgaggagtggttgctcaatgagattcggagactggagcgcttggaacacctggctgagaagttcaggcagaaggcctcaacgcacgagacttgggcttatggcaaagagcagatcttgctgcagaagtgcgccaagtgcggaccggct

SEQ ID NO: 63858 - DNA, 4308 bp, Homo sapiens
cagggagtctccatcccatcgtcatgagatcagtggagagttcaggtggacattcagggacccaagatcttggtttcctggacccaaatatttctgtgactaacttgctggatgtttaccgagtttgtgttttagactaatgctctctccccgttattccctacagtctaatcagcctgccgtgtaagtctgtgtgaaaactgtaacaaaggtgtgaaatgattcatagtacgcataagccatgccttcagtctgaccgcaccctaagctagactctgcaccgtctacagcacgccaccctcctcgtcccctctcatcacccacctcgttccatgctgtgtgtgcgcattcccgtcgactgagccgtcctgtttactattgtgttttacaggccgagacagcggctaacaggatatgtaaggttcttgctgtgaatcaagagaatgagaggctgatggaagaatatgagaggctagcgagtgagcttttggaatggattcgtcgcacgatcccctggctggagaaccggactcccgagaagaccatgcaagccatgcagaagaagctggaggacttccgggattaccgccggaagcacaagccacccaaggtgcaggagaaatgccagctggagatcaacttcaacacgctgcagaccaagctgcggatcagcaaccgtcctgccttcatgccctccgagggcaagatggtgtcggatattgctggtgcctggcagaggctggagcaggctgagaagggttacgaggagtggttgctcaatgagattcggagactggagcgcttggaacacctggctgagaagttcaggcagaaggcctcaacgcacgagacttgggcttatggcaaagagcagatcttgctgcagaaggattacgagtcggcgtcgctgacagaggtgcgggctctgctgcggaagcacgaggcgttcgagagcgacctggcagcgcaccaggaccgcgtggagcagatcgcagccatcgcgcaggagctcaatgaactggactatcacgacgctgtgaatgtcaatgatcggtgccagaaaatttgtgaccagtgggaccgactgggaacgcttactcagaagaggagagaagccctagagagaatggagaaattgctagaaaccattgatcagcttcacctggagtttgccaagagggctgctcctttcaacaattggatggagggcgctatggaggatctgcaagatatgttcattgtccacagcattgaggagatccagagtctgatcactgcgcatgagcagttcaaggccacgctgcccgaggcggacggagagcggcagtccatcatggccatccagaacgaggtggagaaggtgattcagagctacaacatcagaatcagctcaagcaacccgtacagcactgtcaccatggatgagctccggaccaagtgggacaaggtgaagcaactcgtgcccatccgcgatcaatccctgcaggaggagctggctcgccagcatgctaacgagcgtctgaggcgccagtttgctgcccaagccaatgccattgggccctggatccagaacaagatggaggagattgcccggagctccatccagatcacaggagccctggaagaccagatgaaccagctgaagcagtatgagcacaacatcatcaactataagaacaacatcgacaagctggagggagaccatcagctcatccaggaggcccttgtctttgacaacaagcacacgaactacacgatggagcacattcgtgttggatgggagctgctgctgacaaccatcgccagaaccatcaatgaggtggagactcagatcctgacgagagatgcgaagggcatcacccaggagcagatgaatgagttcagagcctccttcaaccactttgacaggaggaagaatggcctgatggatcatgaggatttcagagcctgcctgatttccatgggttatgacctgggtgaagccgaatttgcccgcattatgaccctggtagatcccaacgggcaaggcaccgtcaccttccaatccttcatcgacttcatgactagagagacggctgacaccgacactgccgagcaggtcatcgcctccttccggatcctggcttctgataagccatacatcctggcggaggagctgcgtcgggagctgcccccggatcaggcccagtactgcatcaagaggatgcccgcctactcgggcccaggcagtgtgcctggtgcactggattacgctgcgttctcttccgcactctacggggagagcgatctgtgatgctgagcttctgtaatcactcatcccatcagaatgcaataaaagcggaagtcacagtttgtttcctggaaactttgacaagctttattaagttgagagagagagagggggaaaaaaaaagcctttcgtagttcagtaattgccagcaatataacacggctaaaatgaagtttttacagtatatgacatagtgcgcttcataaataggtttatttctgagtttttagcaaaatgtaatgaaatatcaggttgatttctttgattaaacagaacaaattacttgagtaataggaaattaggaggatctagggacagaaggaaagtgaaaaatgtgaaaatacaaaatacccaagatttaagaccggggggaaaaaaccacaaattggtaaataaaggtttgctatttgtaaaaaatttcatttatctctaatatgcttatgtgattggccctaggggagtatatttgggattctaatgttttattttcatgcttatccaaagattactattgtatcttcaaatgaacttaatattgtgagatggaactgccggggattaaaaagactacccaaaagatttttggcacttacaatttttaaaatagtttatgtcatctcttcattatttagggctggatggtcaactcagtcagtgattttttgatgcttctcttatcctccagaatagagacctaaggacacgtggaagtcagtttaattgccagagagaaggatgcaatcactaggtgaaatgaggtttttaggattatttattgattccaggttcccatgctttttgttagagcttattagtacaggttctcaagagatgaccacataaaagtgctctgtttataaataagcaggtttctgtagtactgactggttcatcacaaggcaagtcagaaaccagtatccttctagctctccagtcaggacttccttatgcctctagttttatgaccggttaaggagaagccagagttagagtaggagaggactaattctcagcagcagtggaggtgagttctttcttttgcggaagctttacatatgttttgtgtagtaggaataactagatattttagctagtgtgcggtgtgtgttcacccctgggattggacagtgtatcctaacaagtcccatgtctggttctgtgtctaaaggcctgctccatgacacaggatgctacatgcactcctgctagcacatcttgatctgttgaatgttcattctttctttttgctcatactgctgtaggctataattcccccctgtttttccatcttgttgacagcttgtagagaataaagcaggaattctttttatatctgagtccttaatgatcaggaaatggattacaaacaaacaaaaacagttgcaaacagcaattaaagcattactagagaagcagtaacatgtctgttacctacagtctgtttgctcagatttttatagatttccaccaacagctggaaatgtaatatttccattccaagctgtctgacagcttgactcttcttcctacactgggccatttagaaccttcaacctttatgaatttcacttaatttgcttcattattaagtaattggtagtttccagattcctgaaatatttgaatccttgagtttaatgccaaacacttttggggtggtttagatgaactctgactctattttatttcaagtaggtgctatatcccggccataaacccctatagaaaagccagaaagttgtgcttcctttgaggctattagggggctctgtggtgttttaggatgggtgtgggtaactcatctacctaaacttttaatttctttacaacattcagcaagagagggggtcagtagtctctatctgctaataaatgaagaaaggaagtaaactctgaaaaataataaacatgtttatactctcattttaggtattatttttatttctgaagctggatgctcaaaaattaaaacgtttataagtttctaaattaaacttaatttataaaagaaaaaagaa
